United States Patent Application Publication US 2011/0183924 A1 - sequence listing, part 97

SEQ ID NO: 306993 - DNA, 6477 bp, Homo sapiens
  misc_feature (6465)..(6467): n is a, c, g, or t
  misc_feature (6469)..(6477): n is a, c, g, or t
cattgtttgaatttgaaaacggtaacatcgcagtgctgctcgcgggtctggctagtcaggcgaagtttgcaggtgaggaggtgacccgcgggaatgtgtggggaaggagaatggaatctaattttaatcaagagggagtacctcgaccatcttatgtttttagtgctgacccaattgcaaggccttcagaaataaatttcgatggcattaagcttgatctgtctcatgaattttccttagttgctccaaatactgaggcaaacagtttcgaatctaaagattatctccaggtttgtcttcgaataagaccatttacacagtcagaaaaagaacttgagtctgagggctgtgtgcatattctggattcacagactgttgtgctgaaagagcctcaatgcatccttggtcggttaagtgaaaaaagctcagggcagatggcacagaaattcagtttttccaaggtttttggcccagcaactacacagaaggaattctttcagggttgcattatgcaaccagtaaaagacctcttgaaaggacagagtcgtctgatttttacttacgggctaaccaattcaggaaaaacatatacatttcaagggacagaagaaaatattggcattctgcctcgaactttgaatgtattatttgatagtcttcaagaaagactgtatacaaagatgaaccttaaaccacatagatccagagaatacttaaggttatcatcagaacaagagaaagaagaaattgctagcaaaagtgcattgcttcggcaaattaaagaggttactgtgcataatgatagtgatgatactctttatggaagtttaactaactctttgaatatctcagagtttgaagaatccataaaagattatgaacaagccaacttgaatatggctaatagtataaaattttctgtgtgggtttctttctttgaaatttacaatgaatatatttatgacttatttgttcctgtatcatctaaattccaaaagagaaagatgctgcgcctttcccaagacgtaaagggctattcttttataaaagatctacaatggattcaagtatctgattccaaagaagcctatagacttttaaaactaggaataaagcaccagagtgttgccttcacaaaattgaataatgcttccagtagaagtcacagcatattcactgttaaaatattacagattgaagattctgaaatgtctcgtgtaattcgagtcagtgaattatctttatgtgatcttgctggttcagaacgaactatgaagacacagaatgaaggtgaaaggttaagagagactgggaatatcaacacttctttattgactctgggaaagtgtattaacgtcttgaagaatagtgaaaagtcaaagtttcaacagcatgtgcctttccgggaaagtaaactgactcactattttcaaagtttttttaatggtaaagggaaaatttgtatgattgtcaatatcagccaatgttatttagcctatgatgaaacactcaatgtattgaagttctccgccattgcacaaaaagtttgtgtcccagacactttaaattcctctcaagagaaattatttggacctgtcaaatcttctcaagatgtatcactagacagtaattcaaacagtaaaatattaaatgtaaaaagagccaccatttcatgggaaaatagtctagaagatttgatggaagacgaggatttggttgaggagctagaaaacgctgaagaaactcaaaatgtggaaactaaacttcttgatgaagatctagataaaacattagaggaaaataaggctttcattagccacgaggagaaaagaaaactgttggacttaatagaagacttgaaaaaaaaactgataaatgaaaaaaaggaaaaattaaccttggaatttaaaattcgagaagaagttacacaggagtttactcagtattgggctcaacgggaagctgactttaaggagactctgcttcaagaacgagagatattagaagaaaatgctgaacgtcgtttggctatcttcaaggatttggttggtaaatgtgacactcgagaagaagcagcgaaagacatttgtgccacaaaagttgaaactgaagaaacacataattatgtaggatttgaagatattattgattctcttcaagataatgttgctgatattaagaaacaggctgaaattgctcacttatatattgcatctcttcctgacccccaggaagctactgcttgtttagaactaaagtttaatcaaattaaagctgaattagctaaaaccaaaggagaattaatcaaaaccaaagaagagttaaaaaagagagaaaatgaatcagattcattgattcaagagcttgagacatctaataagaaaataattacacagaatcaaagaattaaagaattgataaatataattgatcaaaaagaagatactatcaacgaatttcagaacctaaagtctcatatggaaaacacatttaaatgcaatgacaaggctgatacatcttctttaataataaacaataaattgatttgtaatgaaacagttgaagtacctaaggacagcaaatctaaaatctgttcagaaagaaaaagagtaaatgaaaatgaacttcagcaagatgaaccaccagcaaagaaagggtctatccatgttagttcagctatcactgaagaccaaaagaaaagtgaagaagtgcgaccgaacattgcagaaattgaagacatcagagttttacaagaaaataatgaaggactgagagcatttttactcactattgagaatgaacttaaaaatgaaaaggaagaaaaagcagaattaaataaacagattgttcattttcagcaggaactttctctttctgaaaaaaagaatttaactttaagtaaagaggtccaacaaattcagtcaaattatgatattgcaattgctgaattacatgtgcagaaaagtaaaaatcaagaacaggaggaaaagatcatgaaattgtcaaatgagatagaaactgctacaagaagcattacaaataatgtttcacaaataaaattaatgcacacgaaaatagacgaactacgtactcttgattcagtttctcagatttcaaacatagatttgctcaatctcagggatctgtcaaatggttctgaggaggataatttgccaaatacacagttagaccttttaggtaatgattatttggtaagtaagcaagttaaagaatatcgaattcaagaacccaatagggaaaattctttccactctagtattgaagctatttgggaagaatgtaaagagattgtgaaggcctcttccaaaaaaagtcatcagattgaggaactggaacaacaaattgaaaaattgcaggcagaagtaaaaggctataaggatgaaaacaatagactaaaggagaaggagcataaaaaccaagatgacctactaaaagaaaaagaaactcttatacagcagctgaaagaagaattgcaagaaaaaaatgttactcttgatgttcaaatacagcatgtagttgaaggaaagagagcgctttcagaacttacacaaggtgttacttgctataaggcaaaaataaaggaacttgaaacaattttagagactcagaaagttgaacgtagtcattcagccaagttagaacaagacattttggaaaaggaatctatcatcttaaagctagaaagaaatttgaaggaatttcaagaacatcttcaggattctgtcaaaaacaccaaagatttaaatgtaaaggaactcaagctgaaagaagaaatcacacagttaacaaataatttgcaagatatgaaacatttacttcaattaaaagaagaagaagaagaaaccaacaggcaagaaacagaaaaattgaaagaggaactctctgcaagctctgctcgtacccagaatctgaaagcagatcttcagaggaaggaagaagattatgctgacctgaaagagaaactgactgatgccaaaaagcagattaagcaagtacagaaagaggtatctgtaatgcgtgatgaggataaattactgaggattaaaattaatgaactggagaaaaagaaaaaccagtgttctcaggaattagatatgaaacagcgaaccattcagcaactcaaggagcagttaaataatcagaaagtggaagaagctatacaacagtatgagagagcatgcaaagatctaaatgttaaagagaaaataattgaagacatgcgaatgacactagaagaacaggaacaaactcaggtagaacaggatcaagtgcttgaggctaaattagaggaagttgaaaggctggccacagaattggaaaaatggaaggaaaaatgcaatgatttggaaaccaaaaacaatcaaaggtcaaataaagaacatgagaacaacacagatgtgcttggaaagctcactaatcttcaagatgagttacaggagtctgaacagaaatataatgctgatagaaagaaatggttagaagaaaaaatgatgcttatcactcaagcgaaagaagcagagaatatacgaaataaagagatgaaaaaatatgctgaggacagggagcgtttttttaagcaacagaatgaaatggaaatactgacagcccagctgacagagaaagatagtgaccttcaaaagtggcgagaagaacgagatcaactggttgcagctttagaaatacagctaaaagcactgatatccagtaatgtacagaaagataatgaaattgaacaactaaaaaggatcatatcagagacttctaaaatagaaacacaaatcatggatatcaagcccaaacgtattagttcagcagatcctgacaaacttcaaactgaacctctatcgacaagttttgaaatttccagaaataaaatagaggatggatctgtagtccttgactcttgtgaagtgtcaacagaaaatgatcaaagcactcgatttccaaaacctgagttagagattcaatttacacctttacagccaaacaaaatggcagtgaaacaccctggttgtaccacaccagtgacagttaagattcccaaggctcggaagaggaagagtaatgaaatggaggaggacttggtgaaatgtgaaaataagaagaatgctacacccagaactaatttgaaatttcctatttcagatgatagaaattcttctgtcaaaaaggaacaaaaggttgccatacgtccatcatctaagaaaacatattctttacggagtcaggcatccataattggtgtaaacctggccactaagaaaaaagaaggaacactacagaaatttggagacttcttacaacattctccctcaattcttcaatcaaaagcaaagaagataattgaaacaatgagctcttcaaagctctcaaatgtagaagcaagtaaagaaaatgtgtctcaaccaaaacgagccaaacggaaattatacacaagtgaaatttcatctcctattgatatatcaggccaagtgattttaatggaccagaaaatgaaggagagtgatcaccagattatcaaacgacgacttcgaacaaaaacagccaaataaatcacttatggaaatgtttaatataaattttatagtcatagtcattggaacttgcatcctgtattgtaaatataaatgtatatattatgcattaaatcactctgcatatagattgctgttttatacatagtataattttaattcaataaatgagtcaaaatttgtatatttttataaggcttttttataatagcttctttcaaactgtatttccctattatctcagacattggatcagtgaagatcctaggaaagaggctgttattctcatttattttgctatacaggatgtaataggtcaggtatttggtttacttatatttaacaatgtcttatgaattttttttactttatctgttatacaactgattttacatatctgtttggattatagctaggatttggagaataagtgtgtacagatcacaaaacatgtatatacattatttagaaaagatctcaagtctttaattagaatgtctcacttattttgtaaacattttgtgggtacatagtacatgtatatatttacggggtatgtgagatgttttgacacaggcatgcaatgtgaaatacgtgtatcatggagaatgaggtatccatcccctcaagcatttttcctttgaattacagataatccaattacattctttagatcatttaaaaatatacaagtaagttattattgattatagtcactctattgtgctatcagatagtagatcattctttttatcttatttgtttttgtacccattaaccatccccacctccccctgcaaccgtcagtacccttaccagccactggtaaccattcttctactctgtatgcccatgaggtcaattgattttatttttagatcccataaataaatgagaacatgcagtcttnnncnnnnnnnnn

SEQ ID NO: 306994 - DNA, 5701 bp, Homo sapiens
cattgtttgaatttgaaaacggtaacatcgcagtgctgctcgcgggtctggctagtcaggcgaagtttgcagaatggaatctaattttaatcaagagggagtacctcgaccatcttatgtttttagtgctgacccaattgcaaggccttcagaaataaatttcgatggcattaagcttgatctgtctcatgaattttccttagttgctccaaatactgaggcaaacagtttcgaatctaaagattatctccaggtttgtcttcgaataagaccatttacacagtcagaaaaagaacttgagtctgagggctgtgtgcatattctggattcacagactgttgtgctgaaagagcctcaatgcatccttggtcggttaagtgaaaaaagctcagggcagatggcacagaaattcagtttttccaaggtttttggcccagcaactacacagaaggaattctttcagggttgcattatgcaaccagtaaaagacctcttgaaaggacagagtcgtctgatttttacttacgggctaaccaattcaggaaaaacatatacatttcaagggacagaagaaaatattggcattctgcctcgaactttgaatgtattatttgatagtcttcaagaaagactgtatacaaagatgaaccttaaaccacatagatccagagaatacttaaggttatcatcagaacaagagaaagaagaaattgctagcaaaagtgcattgcttcggcaaattaaagaggttactgtgcataatgatagtgatgatactctttatggaagtttaactaactctttgaatatctcagagtttgaagaatccataaaagattatgaacaagccaacttgaatatggctaatagtataaaattttctgtgtgggtttctttctttgaaatttacaatgaatatatttatgacttatttgttcctgtatcatctaaattccaaaagagaaagatgctgcgcctttcccaagacgtaaagggctattcttttataaaagatctacaatggattcaagtatctgattccaaagaagcctatagacttttaaaactaggaataaagcaccagagtgttgccttcacaaaattgaataatgcttccagtagaagtcacagcatattcactgttaaaatattacagattgaagattctgaaatgtctcgtgtaattcgagtcagtgaattatctttatgtgatcttgctggttcagaacgaactatgaagacacagaatgaaggtgaaaggttaagagagactgggaatatcaacacttctttattgactctgggaaagtgtattaacgtcttgaagaatagtgaaaagtcaaagtttcaacagcatgtgcctttccgggaaagtaaactgactcactattttcaaagtttttttaatggtaaagggaaaatttgtatgattgtcaatatcagccaatgttatttagcctatgatgaaacactcaatgtattgaagttctccgccattgcacaaaaagtttgtgtcccagacactttaaattcctctcaagagaaattatttggacctgtcaaatcttctcaagatgtatcactagacagtaattcaaacagtaaaatattaaatgtaaaaagagccaccatttcatgggaaaatagtctagaagatttgatggaagacgaggatttggttgaggagctagaaaacgctgaagaaactcaaaatgtggaaactaaacttcttgatgaagatctagataaaacattagaggaaaataaggctttcattagccacgaggagaaaagaaaactgttggacttaatagaagacttgaaaaaaaaactgataaatgaaaaaaaggaaaaattaaccttggaatttaaaattcgagaagaagttacacaggagtttactcagtattgggctcaacgggaagctgactttaaggagactctgcttcaagaacgagagatattagaagaaaatgctgaacgtcgtttggctatcttcaaggatttggttggtaaatgtgacactcgagaagaagcagcgaaagacatttgtgccacaaaagttgaaactgaagaaacacataattatgtaggatttgaagatattattgattctcttcaagataatgttgctgatattaagaaacaggctgaaattgctcacttatatattgcatctcttcctgacccccaggaagctactgcttgtttagaactaaagtttaatcaaattaaagctgaattagctaaaaccaaaggagaattaatcaaaaccaaagaagagttaaaaaagagagaaaatgaatcagattcattgattcaagagcttgagacatctaataagaaaataattacacagaatcaaagaattaaagaattgataaatataattgatcaaaaagaagatactatcaacgaatttcagaacctaaagtctcatatggaaaacacatttaaatgcaatgacaaggctgatacatcttctttaataataaacaataaattgatttgtaatgaaacagttgaagtacctaaggacagcaaatctaaaatctgttcagaaagaaaaagagtaaatgaaaatgaacttcagcaagatgaaccaccagcaaagaaagggtctatccatgttagttcagctatcactgaagaccaaaagaaaagtgaagaagtgcgaccgaacattgcagaaattgaagacatcagagttttacaagaaaataatgaaggactgagagcatttttactcactattgagaatgaacttaaaaatgaaaaggaagaaaaagcagaattaaataaacagattgttcattttcagcaggaactttctctttctgaaaaaaagaatttaactttaagtaaagaggtccaacaaattcagtcaaattatgatattgcaattgctgaattacatgtgcagaaaagtaaaaatcaagaacaggaggaaaagatcatgaaattgtcaaatgagatagaaactgctacaagaagcattacaaataatgtttcacaaataaaattaatgcacacgaaaatagacgaactacgtactcttgattcagtttctcagatttcaaacatagatttgctcaatctcagggatctgtcaaatggttctgaggaggataatttgccaaatacacagttagaccttttaggtaatgattatttggtaagtaagcaagttaaagaatatcgaattcaagaacccaatagggaaaattctttccactctagtattgaagctatttgggaagaatgtaaagagattgtgaaggcctcttccaaaaaaagtcatcagattgaggaactggaacaacaaattgaaaaattgcaggcagaagtaaaaggctataaggatgaaaacaatagactaaaggagaaggagcataaaaaccaagatgacctactaaaagaaaaagaaactcttatacagcagctgaaagaagaattgcaagaaaaaaatgttactcttgatgttcaaatacagcatgtagttgaaggaaagagagcgctttcagaacttacacaaggtgttacttgctataaggcaaaaataaaggaacttgaaacaattttagagactcagaaagttgaacgtagtcattcagccaagttagaacaagacattttggaaaaggaatctatcatcttaaagctagaaagaaatttgaaggaatttcaagaacatcttcaggattctgtcaaaaacaccaaagatttaaatgtaaaggaactcaagctgaaagaagaaatcacacagttaacaaataatttgcaagatatgaaacatttacttcaattaaaagaagaagaagaagaaaccaacaggcaagaaacagaaaaattgaaagaggaactctctgcaagctctgctcgtacccagaatctgaaagcagatcttcagaggaaggaagaagattatgctgacctgaaagagaaactgactgatgccaaaaagcagattaagcaagtacagaaagaggtatctgtaatgcgtgatgaggataaattactgaggattaaaattaatgaactggagaaaaagaaaaaccagtgttctcaggaattagatatgaaacagcgaaccattcagcaactcaaggagcagttaaataatcagaaagtggaagaagctatacaacagtatgagagagcatgcaaagatctaaatgttaaagagaaaataattgaagacatgcgaatgacactagaagaacaggaacaaactcaggtagaacaggatcaagtgcttgaggctaaattagaggaagttgaaaggctggccacagaattggaaaaatggaaggaaaaatgcaatgatttggaaaccaaaaacaatcaaaggtcaaataaagaacatgagaacaacacagatgtgcttggaaagctcactaatcttcaagatgagttacaggagtctgaacagaaatataatgctgatagaaagaaatggttagaagaaaaaatgatgcttatcactcaagcgaaagaagcagagaatatacgaaataaagagatgaaaaaatatgctgaggacagggagcgtttttttaagcaacagaatgaaatggaaatactgacagcccagctgacagagaaagatagtgaccttcaaaagtggcgagaagaacgagatcaactggttgcagctttagaaatacagctaaaagcactgatatccagtaatgtacagaaagataatgaaattgaacaactaaaaaggatcatatcagagacttctaaaatagaaacacaaatcatggatatcaagcccaaacgtattagttcagcagatcctgacaaacttcaaactgaacctctatcgacaagttttgaaatttccagaaataaaatagaggatggatctgtagtccttgactcttgtgaagtgtcaacagaaaatgatcaaagcactcgatttccaaaacctgagttagagattcaatttacacctttacagccaaacaaaatggcagtgaaacaccctggttgtaccacaccagtgacagttaagattcccaaggctcggaagaggaagagtaatgaaatggaggaggacttggtgaaatgtgaaaataagaagaatgctacacccagaactaatttgaaatttcctatttcagatgatagaaattcttctgtcaaaaaggaacaaaaggttgccatacgtccatcatctaagaaaacatattctttacggagtcaggcatccataattggtgtaaacctggccactaagaaaaaagaaggaacactacagaaatttggagacttcttacaacattctccctcaattcttcaatcaaaagcaaagaagataattgaaacaatgagctcttcaaagctctcaaatgtagaagcaagtaaagaaaatgtgtctcaaccaaaacgagccaaacggaaattatacacaagtgaaatttcatctcctattgatatatcaggccaagtgattttaatggaccagaaaatgaaggagagtgatcaccagattatcaaacgacgacttcgaacaaaaacagccaaataaatcacttatggaaatgtttaatataaattttatagtcatagtcattggaacttgcatcctgtattgtaaatataaatgtatatattatgcattaaatcactctgcatatagattgctgttttatacatagtataattttaattcaataaatgagtcaaaatttgt

SEQ ID NO: 306995 - DNA, 4456 bp, Homo sapiens
  misc_feature (4444)..(4446): n is a, c, g, or t
  misc_feature (4448)..(4456): n is a, c, g, or t
ttttttaaaaactgtctaaattagatggtaccacatgtaaagggtgaaccctactgttaatattaggcatgtggtttttgctatttttaggaaacacataattatgtaggatttgaagatattattgattctcttcaagataatgttgctgatattaagaaacaggctgaaattgctcacttatatattgcatctcttcctgacccccaggaagctactgcttgtttagaactaaagtttaatcaaattaaagctgaattagctaaaaccaaaggagaattaatcaaaaccaaagaagagttaaaaaagagagaaaatgaatcagattcattgattcaagagcttgagacatctaataagaaaataattacacagaatcaaagaattaaagaattgataaatataattgatcaaaaagaagatactatcaacgaatttcagaacctaaagtctcatatggaaaacacatttaaatgcaatgacaaggctgatacatcttctttaataataaacaataaattgatttgtaatgaaacagttgaagtacctaaggacagcaaatctaaaatctgttcagaaagaaaaagagtaaatgaaaatgaacttcagcaagatgaaccaccagcaaagaaagggtctatccatgttagttcagctatcactgaagaccaaaagaaaagtgaagaagtgcgaccgaacattgcagaaattgaagacatcagagttttacaagaaaataatgaaggactgagagcatttttactcactattgagaatgaacttaaaaatgaaaaggaagaaaaagcagaattaaataaacagattgttcattttcagcaggaactttctctttctgaaaaaaagaatttaactttaagtaaagaggtccaacaaattcagtcaaattatgatattgcaattgctgaattacatgtgcagaaaagtaaaaatcaagaacaggaggaaaagatcatgaaattgtcaaatgagatagaaactgctacaagaagcattacaaataatgtttcacaaataaaattaatgcacacgaaaatagacgaactacgtactcttgattcagtttctcagatttcaaacatagatttgctcaatctcagggatctgtcaaatggttctgaggaggataatttgccaaatacacagttagaccttttaggtaatgattatttggtaagtaagcaagttaaagaatatcgaattcaagaacccaatagggaaaattctttccactctagtattgaagctatttgggaagaatgtaaagagattgtgaaggcctcttccaaaaaaagtcatcagattgaggaactggaacaacaaattgaaaaattgcaggcagaagtaaaaggctataaggatgaaaacaatagactaaaggagaaggagcataaaaaccaagatgacctactaaaagaaaaagaaactcttatacagcagctgaaagaagaattgcaagaaaaaaatgttactcttgatgttcaaatacagcatgtagttgaaggaaagagagcgctttcagaacttacacaaggtgttacttgctataaggcaaaaataaaggaacttgaaacaattttagagactcagaaagttgaacgtagtcattcagccaagttagaacaagacattttggaaaaggaatctatcatcttaaagctagaaagaaatttgaaggaatttcaagaacatcttcaggattctgtcaaaaacaccaaagatttaaatgtaaaggaactcaagctgaaagaagaaatcacacagttaacaaataatttgcaagatatgaaacatttacttcaattaaaagaagaagaagaagaaaccaacaggcaagaaacagaaaaattgaaagaggaactctctgcaagctctgctcgtacccagaatctgaaagcagatcttcagaggaaggaagaagattatgctgacctgaaagagaaactgactgatgccaaaaagcagattaagcaagtacagaaagaggtatctgtaatgcgtgatgaggataaattactgaggattaaaattaatgaactggagaaaaagaaaaaccagtgttctcaggaattagatatgaaacagcgaaccattcagcaactcaaggagcagttaaataatcagaaagtggaagaagctatacaacagtatgagagagcatgcaaagatctaaatgttaaagagaaaataattgaagacatgcgaatgacactagaagaacaggaacaaactcaggtagaacaggatcaagtgcttgaggctaaattagaggaagttgaaaggctggccacagaattggaaaaatggaaggaaaaatgcaatgatttggaaaccaaaaacaatcaaaggtcaaataaagaacatgagaacaacacagatgtgcttggaaagctcactaatcttcaagatgagttacaggagtctgaacagaaatataatgctgatagaaagaaatggttagaagaaaaaatgatgcttatcactcaagcgaaagaagcagagaatatacgaaataaagagatgaaaaaatatgctgaggacagggagcgtttttttaagcaacagaatgaaatggaaatactgacagcccagctgacagagaaagatagtgaccttcaaaagtggcgagaagaacgagatcaactggttgcagctttagaaatacagctaaaagcactgatatccagtaatgtacagaaagataatgaaattgaacaactaaaaaggatcatatcagagacttctaaaatagaaacacaaatcatggatatcaagcccaaacgtattagttcagcagatcctgacaaacttcaaactgaacctctatcgacaagttttgaaatttccagaaataaaatagaggatggatctgtagtccttgactcttgtgaagtgtcaacagaaaatgatcaaagcactcgatttccaaaacctgagttagagattcaatttacacctttacagccaaacaaaatggcagtgaaacaccctggttgtaccacaccagtgacagttaagattcccaaggctcggaagaggaagagtaatgaaatggaggaggacttggtgaaatgtgaaaataagaagaatgctacacccagaactaatttgaaatttcctatttcagatgatagaaattcttctgtcaaaaaggaacaaaaggttgccatacgtccatcatctaagaaaacatattctttacggagtcaggcatccataattggtgtaaacctggccactaagaaaaaagaaggaacactacagaaatttggagacttcttacaacattctccctcaattcttcaatcaaaagcaaagaagataattgaaacaatgagctcttcaaagctctcaaatgtagaagcaagtaaagaaaatgtgtctcaaccaaaacgagccaaacggaaattatacacaagtgaaatttcatctcctattgatatatcaggccaagtgattttaatggaccagaaaatgaaggagagtgatcaccagattatcaaacgacgacttcgaacaaaaacagccaaataaatcacttatggaaatgtttaatataaattttatagtcatagtcattggaacttgcatcctgtattgtaaatataaatgtatatattatgcattaaatcactctgcatatagattgctgttttatacatagtataattttaattcaataaatgagtcaaaatttgtatatttttataaggcttttttataatagcttctttcaaactgtatttccctattatctcagacattggatcagtgaagatcctaggaaagaggctgttattctcatttattttgctatacaggatgtaataggtcaggtatttggtttacttatatttaacaatgtcttatgaattttttttactttatctgttatacaactgattttacatatctgtttggattatagctaggatttggagaataagtgtgtacagatcacaaaacatgtatatacattatttagaaaagatctcaagtctttaattagaatgtctcacttattttgtaaacattttgtgggtacatagtacatgtatatatttacggggtatgtgagatgttttgacacaggcatgcaatgtgaaatacgtgtatcatggagaatgaggtatccatcccctcaagcatttttcctttgaattacagataatccaattacattctttagatcatttaaaaatatacaagtaagttattattgattatagtcactctattgtgctatcagatagtagatcattctttttatcttatttgtttttgtacccattaaccatccccacctccccctgcaaccgtcagtacccttaccagccactggtaaccattcttctactctgtatgcccatgaggtcaattgattttatttttagatcccataaataaatgagaacatgcagtcttnnncnnnnnnnnn

SEQ ID NO: 306996 - DNA, 3209 bp, Homo sapiens
  misc_feature (3197)..(3199): n is a, c, g, or t
  misc_feature (3201)..(3209): n is a, c, g, or t
gcaatcctcaaaccgtttattgacagcacaaggctcaacagcaggtgagccacgtgagggtggcgagcgcttgcaggcagtgtgggcaccaggcaggggatcccggaggaagccctctgccagggacatggtgagggcgtggcatcacccacgaagggagcataaaaaccaagatgacctactaaaagaaaaagaaactcttatacagcagctgaaagaagaattgcaagaaaaaaatgttactcttgatgttcaaatacagcatgtagttgaaggaaagagagcgctttcagaacttacacaaggtgttacttgctataaggcaaaaataaaggaacttgaaacaattttagagactcagaaagttgaacgtagtcattcagccaagttagaacaagacattttggaaaaggaatctatcatcttaaagctagaaagaaatttgaaggaatttcaagaacatcttcaggattctgtcaaaaacaccaaagatttaaatgtaaaggaactcaagctgaaagaagaaatcacacagttaacaaataatttgcaagatatgaaacatttacttcaattaaaagaagaagaagaagaaaccaacaggcaagaaacagaaaaattgaaagaggaactctctgcaagctctgctcgtacccagaatctgaaagcagatcttcagaggaaggaagaagattatgctgacctgaaagagaaactgactgatgccaaaaagcagattaagcaagtacagaaagaggtatctgtaatgcgtgatgaggataaattactgaggattaaaattaatgaactggagaaaaagaaaaaccagtgttctcaggaattagatatgaaacagcgaaccattcagcaactcaaggagcagttaaataatcagaaagtggaagaagctatacaacagtatgagagagcatgcaaagatctaaatgttaaagagaaaataattgaagacatgcgaatgacactagaagaacaggaacaaactcaggtagaacaggatcaagtgcttgaggctaaattagaggaagttgaaaggctggccacagaattggaaaaatggaaggaaaaatgcaatgatttggaaaccaaaaacaatcaaaggtcaaataaagaacatgagaacaacacagatgtgcttggaaagctcactaatcttcaagatgagttacaggagtctgaacagaaatataatgctgatagaaagaaatggttagaagaaaaaatgatgcttatcactcaagcgaaagaagcagagaatatacgaaataaagagatgaaaaaatatgctgaggacagggagcgtttttttaagcaacagaatgaaatggaaatactgacagcccagctgacagagaaagatagtgaccttcaaaagtggcgagaagaacgagatcaactggttgcagctttagaaatacagctaaaagcactgatatccagtaatgtacagaaagataatgaaattgaacaactaaaaaggatcatatcagagacttctaaaatagaaacacaaatcatggatatcaagcccaaacgtattagttcagcagatcctgacaaacttcaaactgaacctctatcgacaagttttgaaatttccagaaataaaatagaggatggatctgtagtccttgactcttgtgaagtgtcaacagaaaatgatcaaagcactcgatttccaaaacctgagttagagattcaatttacacctttacagccaaacaaaatggcagtgaaacaccctggttgtaccacaccagtgacagttaagattcccaaggctcggaagaggaagagtaatgaaatggaggaggacttggtgaaatgtgaaaataagaagaatgctacacccagaactaatttgaaatttcctatttcagatgatagaaattcttctgtcaaaaaggaacaaaaggttgccatacgtccatcatctaagaaaacatattctttacggagtcaggcatccataattggtgtaaacctggccactaagaaaaaagaaggaacactacagaaatttggagacttcttacaacattctccctcaattcttcaatcaaaagcaaagaagataattgaaacaatgagctcttcaaagctctcaaatgtagaagcaagtaaagaaaatgtgtctcaaccaaaacgagccaaacggaaattatacacaagtgaaatttcatctcctattgatatatcaggccaagtgattttaatggaccagaaaatgaaggagagtgatcaccagattatcaaacgacgacttcgaacaaaaacagccaaataaatcacttatggaaatgtttaatataaattttatagtcatagtcattggaacttgcatcctgtattgtaaatataaatgtatatattatgcattaaatcactctgcatatagattgctgttttatacatagtataattttaattcaataaatgagtcaaaatttgtatatttttataaggcttttttataatagcttctttcaaactgtatttccctattatctcagacattggatcagtgaagatcctaggaaagaggctgttattctcatttattttgctatacaggatgtaataggtcaggtatttggtttacttatatttaacaatgtcttatgaattttttttactttatctgttatacaactgattttacatatctgtttggattatagctaggatttggagaataagtgtgtacagatcacaaaacatgtatatacattatttagaaaagatctcaagtctttaattagaatgtctcacttattttgtaaacattttgtgggtacatagtacatgtatatatttacggggtatgtgagatgttttgacacaggcatgcaatgtgaaatacgtgtatcatggagaatgaggtatccatcccctcaagcatttttcctttgaattacagataatccaattacattctttagatcatttaaaaatatacaagtaagttattattgattatagtcactctattgtgctatcagatagtagatcattctttttatcttatttgtttttgtacccattaaccatccccacctccccctgcaaccgtcagtacccttaccagccactggtaaccattcttctactctgtatgcccatgaggtcaattgattttatttttagatcccataaataaatgagaacatgcagtcttnnncnnnnnnnnn

SEQ ID NO: 306997 - DNA, 2806 bp, Homo sapiens
cattgtttgaatttgaaaacggtaacatcgcagtgctgctcgcgggtctggctagtcaggcgaagtttgcagaatggaatctaattttaatcaagagggagtacctcgaccatcttatgtttttagtgctgacccaattgcaaggccttcagaaataaatttcgatggcattaagcttgatctgtctcatgaattttccttagttgctccaaatactgaggcaaacagtttcgaatctaaagattatctccaggtttgtcttcgaataagaccatttacacagtcagaaaaagaacttgagtctgagggctgtgtgcatattctggattcacagactgttgtgctgaaagagcctcaatgcatccttggtcggttaagtgaaaaaagctcagggcagatggcacagaaattcagtttttccaaggtttttggcccagcaactacacagaaggaattctttcagggttgcattatgcaaccagtaaaagacctcttgaaaggacagagtcgtctgatttttacttacgggctaaccaattcaggaaaaacatatacatttcaagggacagaagaaaatattggcattctgcctcgaactttgaatgtattatttgatagtcttcaagaaagactgtatacaaagatgaaccttaaaccacatagatccagagaatacttaaggttatcatcagaacaagagaaagaagaaattgctagcaaaagtgcattgcttcggcaaattaaagaggttactgtgcataatgatagtgatgatactctttatggaagtttaactaactctttgaatatctcagagtttgaagaatccataaaagattatgaacaagccaacttgaatatggctaatagtataaaattttctgtgtgggtttctttctttgaaatttacaatgaatatatttatgacttatttgttcctgtatcatctaaattccaaaagagaaagatgctgcgcctttcccaagacgtaaagggctattcttttataaaagatctacaatggattcaagtatctgattccaaagaagcctatagacttttaaaactaggaataaagcaccagagtgttgccttcacaaaattgaataatgcttccagtagaagtcacagcatattcactgttaaaatattacagattgaagattctgaaatgtctcgtgtaattcgagtcagtgaattatctttatgtgatcttgctggttcagaacgaactatgaagacacagaatgaaggtgaaaggttaagagagactgggaatatcaacacttctttattgactctgggaaagtgtattaacgtcttgaagaatagtgaaaagtcaaagtttcaacagcatgtgcctttccgggaaagtaaactgactcactattttcaaagtttttttaatggtaaagggaaaatttgtatgattgtcaatatcagccaatgttatttagcctatgatgaaacactcaatgtattgaagttctccgccattgcacaaaaagtttgtgtcccagacactttaaattcctctcaagagaaattatttggacctgtcaaatcttctcaagatgtatcactagacagtaattcaaacagtaaaatattaaatgtaaaaagagccaccatttcatgggaaaatagtctagaagatttgatggaagacgaggatttggttgaggagctagaaaacgctgaagaaactcaaaatgtggaaactaaacttcttgatgaagatctagataaaacattagaggaaaataaggctttcattagccacgaggagaaaagaaaactgttggacttaatagaagacttgaaaaaaaaactgataaatgaaaaaaaggaaaaattaaccttggaatttaaaattcgagaagaagttacacaggagtttactcagtattgggctcaacgggaagctgactttaaggagactctgcttcaagaacgagagatattagaagaaaatgctgaacgtcgtttggctatcttcaaggatttggttggtaaatgtgacactcgagaagaagcagcgaaagacatttgtgccacaaaagttgaaactgaagaagctactgcttgtttagaactaaagtttaatcaaattaaagctgaattagctaaaaccaaaggagaattaatcaaaaccaaagaagagttaaaaaagagagaaaatgaatcagattcattgattcaagagcttgagacatctaataagaaaataattacacagaatcaaagaattaaagaattgataaatataattgatcaaaaagaagatactatcaacgaatttcagaacctaaagtctcatatggaaaacacatttaaatgcaatgacaaggctgatacatcttctttaataataaacaataaattgatttgtaatgaaacagttgaagtacctaaggacagcaaatctaaaatctgttcagaaagaaaaagagtaaatgaaaatgaacttcagcaagatgaaccaccagcaaagaaaggtactacttcagctgccagcagcaggcgtttaagaaagctaatttctaaaccagtaaatagaacaaggcaaacagaggggcattcacttgtctaaggaaaaatcttgagaaaatctaaacgtcttgaatttttattctggaaagttatacattttctagggatgggcatagttaaagcttttatcttaataaatatgcttttagaaattgtgcttttattatttctttcgcagtctatgtaataatttctgtgcttataatagttaaaactcattactttgattttataaatatagtattttctgcct

SEQ ID NO: 306998 - DNA, 2276 bp, Homo sapiens
cattgtttgaatttgaaaacggtaacatcgcagtgctgctcgcgggtctggctagtcaggcgaagtttgcagaatggaatctaattttaatcaagagggagtacctcgaccatcttatgtttttagtgctgacccaattgcaaggccttcagaaataaatttcgatggcattaagcttgatctgtctcatgaattttccttagttgctccaaatactgaggcaaacagtttcgaatctaaagattatctccaggtttgtcttcgaataagaccatttacacagtcagaaaaagaacttgagtctgagggctgtgtgcatattctggattcacagactgttgtgctgaaagagcctcaatgcatccttggtcggttaagtgaaaaaagctcagggcagatggcacagaaattcagtttttccaaggtttttggcccagcaactacacagaaggaattctttcagggttgcattatgcaaccagtaaaagacctcttgaaaggacagagtcgtctgatttttacttacgggctaaccaattcaggaaaaacatatacatttcaagggacagaagaaaatattggcattctgcctcgaactttgaatgtattatttgatagtcttcaagaaagactgtatacaaagatgaaccttaaaccacatagatccagagaatacttaaggttatcatcagaacaagagaaagaagaaattgctagcaaaagtgcattgcttcggcaaattaaagaggttactgtgcataatgatagtgatgatactctttatggaagtttaactaactctttgaatatctcagagtttgaagaatccataaaagattatgaacaagccaacttgaatatggctaatagtataaaattttctgtgtgggtttctttctttgaaatttacaatgaatatatttatgacttatttgttcctgtatcatctaaattccaaaagagaaagatgctgcgcctttcccaagacgtaaagggctattcttttataaaagatctacaatggattcaagtatctgattccaaagaagcctatagacttttaaaactaggaataaagcaccagagtgttgccttcacaaaattgaataatgcttccagtagaagtcacagcatattcactgttaaaatattacagattgaagattctgaaatgtctcgtgtaattcgagtcagtgaattatctttatgtgatcttgctggttcagaacgaactatgaagacacagaatgaaggtgaaaggttaagagagactgggaatatcaacacttctttattgactctgggaaagtgtattaacgtcttgaagaatagtgaaaagtcaaagtttcaacagcatgtgcctttccgggaaagtaaactgactcactattttcaaagtttttttaatggtaaagggaaaatttgtatgattgtcaatatcagccaatgttatttagcctatgatgaaacactcaatgtattgaagttctccgccattgcacaaaaagtttgtgtcccagacactttaaattcctctcaagagaaattatttggacctgtcaaatcttctcaagatgtatcactagacagtaattcaaacagtaaaatattaaatgtaaaaagagccaccatttcatgggaaaatagtctagaagatttgatggaagacgaggatttggttgaggagctagaaaacgctgaagaaactcaaaatgtggaaactaaacttcttgatgaagatctagataaaacattagaggaaaataaggctttcattagccacgaggagaaaagaaaactgttggacttaatagaagacttgaaaaaaaaactgataaatgaaaaaaaggaaaaattaaccttggaatttaaaattcgagaagaagttacacaggagtttactcagtattgggctcaacgggaagctgactttaaggagactctgcttcaagaacgagagatattagaagaaaatgctgaacgtcgtttggctatcttcaaggatttggttggtaaatgtgacactcgagaagaagcagcgaaagacatttgtgccacaaaagttgaaactgaagaagctactgcttgtttagaactaaagtttaatcaaattaaagctgaattagctaaaaccaaaggagaattaatcaaaaccaaagaagagttaaaaaagagagaaaatgaatcagattcattgattcaagagcttgagacatctaataagaaaataattacacagaatcaaagaattaaagaattgataaatataattgatc

SEQ ID NO: 306999 - DNA, 2183 bp, Homo sapiens
cattgtttgaatttgaaaacggtaacatcgcagtgctgctcgcgggtctggctagtcaggcgaagtttgcagaatggaatctaattttaatcaagagggagtacctcgaccatcttatgtttttagtgctgacccaattgcaaggccttcagaaataaatttcgatggcattaagcttgatctgtctcatgaattttccttagttgctccaaatactgaggcaaacagtttcgaatctaaagattatctccaggtttgtcttcgaataagaccatttacacagtcagaaaaagaacttgagtctgagggctgtgtgcatattctggattcacagactgttgtgctgaaagagcctcaatgcatccttggtcggttaagtgaaaaaagctcagggcagatggcacagaaattcagtttttccaaggtttttggcccagcaactacacagaaggaattctttcagggttgcattatgcaaccagtaaaagacctcttgaaaggacagagtcgtctgatttttacttacgggctaaccaattcaggaaaaacatatacatttcaagggacagaagaaaatattggcattctgcctcgaactttgaatgtattatttgatagtcttcaagaaagactgtatacaaagatgaaccttaaaccacatagatccagagaatacttaaggttatcatcagaacaagagaaagaagaaattgctagcaaaagtgcattgcttcggcaaattaaagaggttactgtgcataatgatagtgatgatactctttatggaagtttaactaactctttgaatatctcagagtttgaagaatccataaaagattatgaacaagccaacttgaatatggctaatagtataaaattttctgtgtgggtttctttctttgaaatttacaatgaatatatttatgacttatttgttcctgtatcatctaaattccaaaagagaaagatgctgcgcctttcccaagacgtaaagggctattcttttataaaagatctacaatggattcaagtatctgattccaaagaagcctatagacttttaaaactaggaataaagcaccagagtgttgccttcacaaaattgaataatgcttccagtagaagtcacagcatattcactgttaaaatattacagattgaagattctgaaatgtctcgtgtaattcgagtcagtgaattatctttatgtgatcttgctggttcagaacgaactatgaagacacagaatgaaggtgaaaggttaagagagactgggaatatcaacacttctttattgactctgggaaagtgtattaacgtcttgaagaatagtgaaaagtcaaagtttcaacagcatgtgcctttccgggaaagtaaactgactcactattttcaaagtttttttaatggtaaagggaaaatttgtatgattgtcaatatcagccaatgttatttagcctatgatgaaacactcaatgtattgaagttctccgccattgcacaaaaagtttgtgtcccagacactttaaattcctctcaagagaaattatttggacctgtcaaatcttctcaagatgtatcactagacagtaattcaaacagtaaaatattaaatgtaaaaagagccaccatttcatgggaaaatagtctagaagatttgatggaagacgaggatttggttgaggagctagaaaacgctgaagaaactcaaaatgtggaaactaaacttcttgatgaagatctagataaaacattagaggaaaataaggctttcattagccacgaggagaaaagaaaactgttggacttaatagaagacttgaaaaaaaaactgataaatgaaaaaaaggaaaaattaaccttggaatttaaaattcgagaagaagttacacaggagtttactcagtattgggctcaacgggaagctgactttaaggagactctgcttcaagaacgagagatattagaagaaaatgctgaacgtcgtttggctatcttcaaggatttggttggtaaatgtgacactcgagaagaagcagcgaaagacatttgtgccacaaaagttgaaactgaagaagctactgcttgtttagaactaaagtttaatcaaattaaagctgaattagctaaaaccaaaggagaattaatcaaaaccaaagaagagttaaaaaagagagaaaatg

SEQ ID NO: 307000 - DNA, 1542 bp, Homo sapiens
cattgtttgaatttgaaaacggtaacatcgcagtgctgctcgcgggtctggctagtcaggcgaagtttgcagaatggaatctaattttaatcaagagggagtacctcgaccatcttatgtttttagtgctgacccaattgcaaggccttcagaaataaatttcgatggcattaagcttgatctgtctcatgaattttccttagttgctccaaatactgaggcaaacagtttcgaatctaaagattatctccaggtttgtcttcgaataagaccatttacacagtcagaaaaagaacttgagtctgagggctgtgtgcatattctggattcacagactgttgtgctgaaagagcctcaatgcatccttggtcggttaagtgaaaaaagctcagggcagatggcacagaaattcagtttttccaaggtttttggcccagcaactacacagaaggaattctttcagggttgcattatgcaaccagtaaaagacctcttgaaaggacagagtcgtctgatttttacttacgggctaaccaattcaggaaaaacatatacatttcaagggacagaagaaaatattggcattctgcctcgaactttgaatgtattatttgatagtcttcaagaaagactgtatacaaagatgaaccttaaaccacatagatccagagaatacttaaggttatcatcagaacaagagaaagaagaaattgctagcaaaagtgcattgcttcggcaaattaaagaggttactgtgcataatgatagtgatgatactctttatggaagtttaactaactctttgaatatctcagagtttgaagaatccataaaagattatgaacaagccaacttgaatatggctaatagtataaaattttctgtgtgggtttctttctttgaaatttacaatgaatatatttatgacttatttgttcctgtatcatctaaattccaaaagagaaagatgctgcgcctttcccaagacgtaaagggctattcttttataaaagatctacaatggattcaagtatctgattccaaagaagcctatagacttttaaaactaggaataaagcaccagagtgttgccttcacaaaattgaataatgcttccagtagaagtcacagcatattcactgttaaaatattacagattgaagattctgaaatgtctcgtgtaattcgagtcagtgaattatctttatgtgatcttgctggttcagaacgaactatgaagacacagaatgaaggtgaaaggttaagagagactgggaatatcaacacttctttattgactctgggaaagtgtattaacgtcttgaagaatagtgaaaagtcaaagtaagtgtttctgaaagtgttattagcatattaaatattacaatatttaaactttcaacttttttgtttttagaaagttcttttttgatttttaaactgcttcttatgtaatgactgtgtatagattgtgattcaagtacttaagagatcttggattaaagacaatgatagaaatgtcagttgatgccagtaactcat

SEQ ID NO: 307001 - DNA, 1143 bp, Homo sapiens
cattgtttgaatttgaaaacggtaacatcgcagtgctgctcgcgggtctggctagtcaggcgaagtttgcaggtgaggaggtgacccgcgggaatgtgtggggaaggagaatggaatctaattttaatcaagagggagtacctcgaccatcttatgtttttagtgctgacccaattgcaaggccttcagaaataaatttcgatggcattaagcttgatctgtctcatgaattttccttagttgctccaaatactgaggcaaacagtttcgaatctaaagattatctccaggtttgtcttcgaataagaccatttacacagtcagaaaaagaacttgagtctgagggctgtgtgcatattctggattcacagactgttgtgctgaaagagcctcaatgcatccttggtcggttaagtgaaaaaagctcagggcagatggcacagaaattcagtttttccaaggtttttggcccagcaactacacagaaggaattctttcagggttgcattatgcaaccagtaaaagacctcttgaaaggacagagtcgtctgatttttacttacgggctaaccaattcaggaaaaacatatacatttcaagggacagaagaaaatattggcattctgcctcgaactttgaatgtattatttgatagtcttcaagaaagactgtatacaaagatgaaccttaaaccacatagatccagagaatacttaaggttatcatcagaacaagagaaagaagaaattgctagcaaaagtgcattgcttcggcaaattaaagaggttactgtgcataatgatagtgatgatactctttatggaagtttaactaactctttgaatatctcagagtttgaagaatccataaaagattatgaacaagccaacttgaatatggctaatagtataaaattttctgtgtgggtttctttctttgaaatttacaatgaatatatttatgacttatttgttcctgtatcatctaaattccaaaaaaccaaaggagaattaatcaaaaccaaagaagagttaaaaaagagagaaaatgaatcagattcattgattcaagagcttgagacatctaataagaaaataattacacagaatcaaagaattaaagaattgataaatataattgatc

SEQ ID NO: 307002 - DNA, 277 bp, Homo sapiens
gagatttatcttcttaagattctccagttatccccaaatgttacttatttgctagagccatcagttattttaggacgaaacttaagaaataacttagaaaatgtctcaacaaatttgaaaataaaatttttatggtacaccattgaaagtaatttatgtgatttgtacattttttgtagctttctatatgtgaattatttttaacttattttgctttaggacaaggctgatacatcttctttaataataaacaataaattgatttgtaatgaaacag

SEQ ID NO: 307003 - DNA, 2377 bp, Homo sapiens
cctgagggagtcctggtggagaagacacacagctcattgctgtgcccaaaaggaaaggtggcatctgaatctgtctccctggagctcccagtggacattgttcctgactcgaccaaggcttatgttacggttctgggagacattatgggcacagccctgcagaacctggatggtctggtgcagatgcccagtggctgtggcgagcagaacatggtcttgtttgctcccatcatctatgtcttgcagtacctggagaaggcagggctgctgacggaggagatcaggtctcgggcagtgggtttcctggaaatagggtaccagaaggagctgatgtacaaacacagcaatggctcatacagtgcctttggggagcgagatggaaatggaaacacatggctgacagcgtttgtcacaaaatgctttggccaagctcagaaattcatcttcattgatcccaagaacatccaggatgctctcaagtggatggcaggaaaccagctccccagtggctgctatgccaacgtgggaaatctccttcacacagctatgaagggtggtgttgatgatgaggtctccttgactgcgtatgtcacagctgcattgctggagatgggaaaggatgtagatgacccaatggtgagtcagggtctacggtgtctcaagaattcggccacctccacgaccaacctctacacacaggccctgttggcttacattttctccctggctggggaaatggacatcagaaacattctccttaaacagttagatcaacaggctatcatctcaggagaatccatttactggagccagaaacctactccatcatcgaacgccagcccttggtctgagcctgcggctgtagatgtggaactcacagcatatgcattgttggcccagcttaccaagcccagcctgactcaaaaggagatagcgaaggccactagcatagtggcttggttggccaagcaacgcaatgcatatgggggcttctcttctactcaggatactgtagttgctctccaagctcttgccaaatatgccactaccgcctacgtgccatctgaggagatcaacctggttgtaaaatccactgagaatttccagcgcacattcaacatacagtcagttaacagattggtatttcagcaggataccctgcccaatgtccctggaatgtacacgttggaggcctcaggccagggctgtgtctatgtgcagacggtgttgagatacaatattctccctcccacaaatatgaagacctttagtcttagtgtggaaataggaaaagctagatgtgagcaaccgacttcacctcgatccttgactctcactattcacaccagttatgtggggagccgtagctcttccaatatggctattgtggaagtgaagatgctatctgggttcagtcccatggagggcaccaatcagttacttctccagcaacccctggtgaagaaggttgaatttggaactgacacacttaacatttacttggatgagctcattaagaacactcagacttacaccttcaccatcagccaaagtgtgctggtcaccaacttgaaaccagcaaccatcaaggtctatgactactacctaccagatgaacaggcaacaattcagtattctgatccctgtgaatgaggataggagctggaaactcaattagtcctctgtgacattactggagggtggaacattcttctgtcgcttgaagcagaactcattcaatcaaataatttaatttctctgactagtatatgggtaacaaatgaatatgtctgaacctcagctataatactttctactacctttgcaaggagatgggataggaacaatcactcagaggaggcgttgcatggacagggtcatagggggaagaaaggtggtttagctgttttatttagccattcagggggctctccagagaggagacggtggtagagggtgaactagagaagataagaatgtcttcctaggccggatgcggtggctcacgcctgtaatcccagcactttgggattgcgaggtgggcggatcacttgaggtcaggagttcaagaccagcctggccaacatggtaaaacccgtctctactaacaatacaaagattagcctggtgtggtggcacgggcctgtaatcgcagccccttggaaggccaaggcaggagaatcgcctcaacactggaggtggaggttgcagtgagctgagattgtgccactgcactccagcctgggcaatgaggcaagaccctgtctcaaaaaataataaataataataataataatgtttttctagagtttcagtctaagggaaaatgtgatttagggctttggaaattggctaaaaaaataaaaatggaaaagaa

SEQ ID NO: 307004 - DNA, 2213 bp, Homo sapiens
tatggggaaagcataactgtgatctgctgaggatgctggagtgatttgctcaaagggagcagatctgagcctgagactggtagatggagtcactgaatgttcaggaagattagaagtgagattccaaggggaatgggggacaatatgtgatgacggctgggacagctacgatgctgctgtggcatgcaagcaactgggatgtccaactgccgtcacagccattggtcgagttaacgccagtaagggatttggacacatctggcttgacagcgtttcttgccagggacatgaacctgctgtctggcaatgtaaacaccatgaatggggaaaccagctccccagtggctgctatgccaacgtgggaaatctccttcacacagctatgaagggtggtgttgatgatgaggtctccttgactgcgtatgtcacagctgcattgctggagatgggaaaggatgtagatgacccaatggtgagtcagggtctacggtgtctcaagaattcggccacctccacgaccaacctctacacacaggccctgttggcttacattttctccctggctggggaaatggacatcagaaacattctccttaaacagttagatcaacaggctatcatctcaggagaatccatttactggagccagaaacctactccatcatcgaacgccagcccttggtctgagcctgcggctgtagatgtggaactcacagcatatgcattgttggcccagcttaccaagcccagcctgactcaaaaggagatagcgaaggccactagcatagtggcttggttggccaagcaacgcaatgcatatgggggcttctcttctactcaggatactgtagttgctctccaagctcttgccaaatatgccactaccgcctacgtgccatctgaggagatcaacctggttgtaaaatccactgagaatttccagcgcacattcaacatacagtcagttaacagattggtatttcagcaggataccctgcccaatgtccctggaatgtacacgttggaggcctcaggccagggctgtgtctatgtgcagacggtgttgagatacaatattctccctcccacaaatatgaagacctttagtcttagtgtggaaataggaaaagctagatgtgagcaaccgacttcacctcgatccttgactctcactattcacaccagttatgtggggagccgtagctcttccaatatggctattgtggaagtgaagatgctatctgggttcagtcccatggagggcaccaatcagttacttctccagcaacccctggtgaagaaggttgaatttggaactgacacacttaacatttacttggatgagctcattaagaacactcagacttacaccttcaccatcagccaaagtgtgctggtcaccaacttgaaaccagcaaccatcaaggtctatgactactacctaccagatgaacaggcaacaattcagtattctgatccctgtgaatgaggataggagctggaaactcaattagtcctctgtgacattactggagggtggaacattcttctgtcgcttgaagcagaactcattcaatcaaataatttaatttctctgactagtatatgggtaacaaatgaatatgtctgaacctcagctataatactttctactacctttgcaaggagatgggataggaacaatcactcagaggaggcgttgcatggacagggtcatagggggaagaaaggtggtttagctgttttatttagccattcagggggctctccagagaggagacggtggtagagggtgaactagagaagataagaatgtcttcctaggccggatgcggtggctcacgcctgtaatcccagcactttgggattgcgaggtgggcggatcacttgaggtcaggagttcaagaccagcctggccaacatggtaaaacccgtctctactaacaatacaaagattagcctggtgtggtggcacgggcctgtaatcgcagccccttggaaggccaaggcaggagaatcgcctcaacactggaggtggaggttgcagtgagctgagattgtgccactgcactccagcctgggcaatgaggcaagaccctgtctcaaaaaataataaataataataataataatgtttttctagagtttcagtctaagggaaaatgtgatttagggctttggaaattggctaaaaaaataaaaatggaaaagaa

SEQ ID NO: 307005 - DNA, 1824 bp, Homo sapiens
cctgagggagtcctggtggagaagacacacagctcattgctgtgcccaaaaggaaaggtggcatctgaatctgtctccctggagctcccagtggacattgttcctgactcgaccaaggcttatgttacggttctgggagacattatgggcacagccctgcagaacctggatggtctggtgcagatgcccagtggctgtggcgagcagaacatggtcttgtttgctcccatcatctatgtcttgcagtacctggagaaggcagggctgctgacggaggagatcaggtctcgggcagtgggtttcctggaaatagggtaccagaaggagctgatgtacaaacacagcaatggctcatacagtgcctttggggagcgagatggaaatggaaacacatggctgacagcgtttgtcacaaaatgctttggccaagctcagaaattcatcttcattgatcccaagaacatccaggatgctctcaagtggatggcaggaaaccagctccccagtggctgctatgccaacgtgggaaatctccttcacacagctatgaagggtggtgttgatgatgaggtctccttgactgcgtatgtcacagctgcattgctggagatgggaaaggatgtagatgacccaatggtgagtcagggtctacggtgtctcaagaattcggccacctccacgaccaacctctacacacaggccctgttggcttacattttctccctggctggggaaatggacatcagaaacattctccttaaacagttagatcaacaggctatcatctcaggagaatccatttactggagccagaaacctactccatcatcgaacgccagcccttggtctgagcctgcggctgtagatgtggaactcacagcatatgcattgttggcccagcttaccaagcccagcctgactcaaaaggagatagcgaaggccactagcatagtggcttggttggccaagcaacgcaatgcatatgggggcttctcttctactcaggatactgtagttgctctccaagctcttgccaaatatgccactaccgcctacgtgccatctgaggagatcaacctggttgtaaaatccactgagaatttccagcgcacattcaacatacagtcagttaacagattggtatttcagcaggataccctgcccaatgtccctggaatgtacacgttggaggcctcaggccagggctgtgtctatgtgcagacggtgttgagatacaatattctccctcccacaaatatgaagacctttagtcttagtgtggaaataggaaaagctagatgtgagcaaccgacttcacctcgatccttgactctcactattcacaccagttatgtggggagccgtagctcttccaatatggctattgtggaagtgaagatgctatctgggttcagtcccatggagggcaccaatcagttacttctccagcaacccctggtgaagaaggttgaatttggaactgacacacttaacatttacttggatgagctcattaagaacactcagacttacaccttcaccatcagccaaagtgtgctggtcaccaacttgaaaccagcaaccatcaaggtctatgactactacctaccagatgaacaggcaacaattcagtattctgatccctgtgaatgaggataggagctggaaactcaattagtcctctgtgacattactggagggtggaacattcttctgtcgcttgaagcagaactcattcaatcaaataatttaatttctcttctgaactaagaggggttaccgaagcctcgaaattcgtaaattcatgggtcattagcctggttt

SEQ ID NO: 307006 - DNA, 676 bp, Homo sapiens
cctgagggagtcctggtggagaagacacacagctcattgctgtgcccaaaaggaaaggtggcatctgaatctgtctccctggagctcccagtggacattgttcctgactcgaccaaggcttatgttacggttctgggagacattatgggcacagccctgcagaacctggatggtctggtgcagatgcccagtggctgtggcgagcagaacatggtcttgtttgctcccatcatctatgtcttgcagtacctggagaaggcagggctgctgacggaggagatcaggtctcgggcagtgggtttcctggaaatagggtaccagaaggagctgatgtacaaacacagcaatggctcatacagtgcctttggggagcgagatggaaatggaaacacatggtaatatcacccaattcccaatgagttctgtactccagagcataattcctgagccctctggaactattccactacctctccccttaacccctttccttcttgcactcagtcttctacctctttaatactgtttatttcaccctcatggatggtcaagtccctcgatcttcctgagcttgtgcctcccctgttcttgtcctcattggtgcccattaatgcctctcttttctaggcctgctatggcatatgttccctcagctccccttctggaagtatacacc

SEQ ID NO: 307007 - DNA, 175 bp, Homo sapiens
catcatccaagccaactaacaacaaccagatgtgtgggttatagagttgttcaaggttaattccaatggctcacaaaatggtaagtatacgtttggttgtttccctcaggatactgtagttgctctccaagctcttgccaaatatgccactaccgcctacgtgccatctgaggag

SEQ ID NO: 307008 - DNA, 2720 bp, Homo sapiens
ttgcactctcccacacccttttcttttcgtccgctcttcgcttatttctcccgccgtgggaacgaaagatggcggcggaaacgctgctgtccagtttgttaggactgctgcttctgggactcctgttacccgcaagtctgaccggcggtgtcgggagcctgaacctggaggagctgagtgagatgcgttatgggatcgagatcctgccgttgcctgtcatgggagggcagagccaatcttcggacgtggtgattgtctcctctaagtacaaacagcgctatgagtgtcgcctgccagctggagctattcacttccagcgtgaaagggaggaggaaacacctgcttaccaagggcctgggatccctgagttgttgagcccaatgagagatgctccctgcttgctgaagacaaaggactggtggacatatgaattctgttatggacgccacatccagcaataccacatggaagattcagagatcaaaggtgaagtcctctatctcggctactaccaatcagccttcgactgggatgatgaaacagccaaggcctccaagcagcatcgtcttaaacgctaccacagccagacctatggcaatgggtccaagtgcgaccttaatgggaggccccgggaggccgaggttcggttcctctgtgacgagggtgcaggtatctctggggactacatcgatcgcgtggacgagcccttgtcctgctcttatgtgctgaccattcgcactcctcggctctgcccccaccctctcctccggcccccacccagtgctgcaccgcaggccatcctctgtcacccttccctacagcctgaggagtacatggcctacgttcagaggcaagccgactcaaagcagtatggagataaaatcatagaggagctgcaagatctaggcccccaagtgtggagtgagaccaagtctggggtggcaccccaaaagatggcaggtgcgagcccgaccaaggatgacagtaaggactcagatttctggaagatgcttaatgagccagaggaccaggccccaggaggggaggaggtgccggctgaggagcaggacccaagccctgaggcagcagattcagcttctggtgctcccaatgattttcagaacaacgtgcaggtcaaagtcattcgaagccctgcggatttgattcgattcatagaggagctgaaaggtggaacaaaaaaggggaagccaaatataggccaagagcagcctgtggatgatgctgcagaagtccctcagagggaaccagagaaggaaaggggtgatccagaacggcagagagagatggaagaagaggaggatgaggatgaggatgaggatgaagatgaggatgaacggcagttactgggagaatttgagaaggaactggaagggatcctgcttccgtcagaccgagaccggctccgttcggaggtgaaggctggcatggagcgggaactggaaaacatcatccaggagacagagaaagagctggacccagatgggctgaagaaggagtcagagcgggatcgggcaatgctggctctcacatccactctcaacaaactcatcaaaagactggaggaaaaacagagtccagagctggtgaagaagcacaagaaaaagagggttgtccccaaaaagcctcccccatcaccccaacctacagaggaggatcctgagcacagagtccgggtccgggtcaccaagctccgtctcggaggccctaatcaggatctgactgtcctcgagatgaaacgggaaaacccacagctgaaacaaatcgaggggctggtgaaggagctgctggagagggagggactcacagctgcagggaaaattgagatcaaaattgtccgcccatgggctgaagggactgaagagggtgcacgttggctgactgatgaggacacgagaaacctcaaggagatcttcttcaatatcttggtgccgggagctgaagaggcccagaaggaacgccagcggcagaaagagctggagagcaattaccgccgggtgtggggctctccaggtggggagggcacaggggacctggacgaatttgacttctgagaccaacactacacttgacccttcacggaatccagactcttcctggactggcttgcctcctccccacctccccaccctggaacccctgagggccaaacagcagagtggagctgagctgtggacctctcgggcaactctgtgggtgtgggggccctgggtgaatgctgctgcccctgctggcagccaccttgagacctcaccgggcctgtgatatttgctctcctgaactctcactcaatcctcttcctctcctctgtggcttttcctgttattgtcccctaatgataggatattccctgctgcctacctggagattcagtaggatcttttgagtggaggtgggtagagagagcaaggagggcaggacacttagcaggcactgagcaagcaggcccccacctgcccttagtgatgtttggagtcgttttaccctcttctattgaattgccttgggatttccttctccctttccctgcccaccctgtcccctacaatttgtgcttctgagttgaggagccttcacctctgttgctgaggaaatggtagaatgctgcctatcacctccagcacaatcccagtgaaaaaggtgtgaagcacccaccatgttcttgaacaatcaggtttctaaataaacaactggaccatcaa

SEQ ID NO: 307009 - DNA, 3971 bp, Homo sapiens
ggcacgaggggtttctctccgctcccgtgagtaacttggctccgggggctccgctcgcctgcccgcacgccgcccgccacccaggaccgcgccgccggcctccgccgctagcaaacccttccgacggccctcgctgcgcaagccgggacgcctctcccccctccgcccccgccgcggaaagttaagtttgaagaggggggaagaggggaacatggacatgaagaggaggatccacctggagctgaggaaccggaccccggcagctgttcgagaacttgtcttggacaattgcaaatcaaatgatggaaaaattgagggcttaacagctgaatttgtgaacttagagttcctcagtttaataaatgtaggcttgatctcagtttcaaatctccccaagctgcctaaattgaaaaagcttgaactcagtgaaaatagaatctttggaggtctggacatgttagctgaaaaacttccaaatctcacacatctaaacttaagtggaaataaactgaaagatatcagcaccttggaacctttgaaaaagttagaatgtctgaaaagcctggacctctttaactgtgaggttaccaacctgaatgactaccgagagagtgtcttcaagctcctgccccagcttacctacttggatggctatgaccgagaggaccaggaagcacctgactcagatgccgaggtggatggtgtggatgaagaggaggaggacgaagaaggagaagatgaggaagacgaggacgatgaggatggtgaagaagaggagtttgatgaagaagatgatgaagatgaagatgtagaaggggatgaggacgacgatgaagtcagtgaggaggaagaagaatttggacttgatgaagaagatgaagatgaggatgaggatgaagaggaggaagaaggtgggaaaggtgaaaagaggaagagagaaacagatgatgaaggagaagatgattaagaccccagatgacctgcagaaacagaactgttcagtattggttggactgctcatggattttgtagctgtttaaaaaaaaaaaaaaaaaaaaaactcgagttttttttttttttttttacagaaacagtttttagtttttaatgaacttgtaaacaaaaaagctcccatttcaaaataaaaacaaaatcccagatcatatagatgtttacagtgattacatttatctaagcaacatacatacatgttcagttgtaagatgttaactaaatttctgtgacaaatatgctttttttttaataccaagaacattatagagttaatgcagagtcctaaggataatctagtagtcactaagtttttcttaagtcttcactttagatgctgttatttctagcacaattaagcaggcagagtctttcatatgctcaaacactggaatctttggttgctaccatatcagctggcttgcagacaagaagccaaccattttaagaatgttttaagtgaacaacttgcaaaccccagggatggaaaaaccctaagaatgcacaattgtgagcatttaacaaccatcacaactgtggctgaagactgttcatgccgttcttctgaaatgagatctcaaagcagtatagttcaaaacaaaaggttttaacaaaaaattggcatatgcacaatttctccaccaatttttgtgtgtcaaccatttagttaacttttccacttgaaaaatgcaatagaaaaccggacaccatgtttcactatctcagttaatattcacaattacagaggctacaactcaggatacagcatcaccaatgctgcccagagtcagtttatactgaaattaagttctttacaccaagtaaatggttgtccacaaccactggctagtgtacatatgaactaaaatttctagatttggggagaaacaaatgctgctccgatcatctgctctgcttcttattcagagatcaaaggtgaagtcctctatctcggctactaccaatcagccttcgactgggatgatgaaacagccaaggcctccaagcagcatcgtcttaaacgctaccacagccagacctatggcaatgggtccaagtgcgaccttaatgggaggccccgggaggccgaggttcggttcctctgtgacgagggtgcaggtatctctggggactacatcgatcgcgtggacgagcccttgtcctgctcttatgtgctgaccattcgcactcctcggctctgcccccaccctctcctccggcccccacccagtgctgcaccgcaggccatcctctgtcacccttccctacagcctgaggagtacatggcctacgttcagaggcaagccgactcaaagcagtatggagataaaatcatagaggagctgcaagatctaggcccccaagtgtggagtgagaccaagtctggggtggcaccccaaaagatggcaggtgcgagcccgaccaaggatgacagtaaggactcagatttctggaagatgcttaatgagccagaggaccaggccccaggaggggaggaggtgccggctgaggagcaggacccaagccctgaggcagcagattcagcttctggtgctcccaatgattttcagaacaacgtgcaggtcaaagtcattcgaagccctgcggatttgattcgattcatagaggagctgaaaggtggaacaaaaaaggggaagccaaatataggccaagagcagcctgtggatgatgctgcagaagtccctcagagggaaccagagaaggaaaggggtgatccagaacggcagagagagatggaagaagaggaggatgaggatgaggatgaggatgaagatgaggatgaacggcagttactgggagaatttgagaaggaactggaagggatcctgcttccgtcagaccgagaccggctccgttcggagacagagaaagagctggacccagatgggctgaagaaggagtcagagcgggatcgggcaatgctggctctcacatccactctcaacaaactcatcaaaagactggaggaaaaacagagtccagagctggtgaagaagcacaagaaaaagagggttgtccccaaaaagcctcccccatcaccccaacctacagggaaaattgagatcaaaattgtccgcccatgggctgaagggactgaagagggtgcacgttggctgactgatgaggacacgagaaacctcaaggagatcttcttcaatatcttggtgccgggagctgaagaggcccagaaggaacgccagcggcagaaagagctggagagcaattaccgccgggtgtggggctctccaggtggggagggcacaggggacctggacgaatttgacttctgagaccaacactacacttgacccttcacggaatccagactcttcctggactggcttgcctcctccccacctccccaccctggaacccctgagggccaaacagcagagtggagctgagctgtggacctctcgggcaactctgtgggtgtgggggccctgggtgaatgctgctgcccctgctggcagccaccttgagacctcaccgggcctgtgatatttgctctcctgaactctcactcaatcctcttcctctcctctgtggcttttcctgttattgtcccctaatgataggatattccctgctgcctacctggagattcagtaggatcttttgagtggaggtgggtagagagagcaaggagggcaggacacttagcaggcactgagcaagcaggcccccacctgcccttagtgatgtttggagtcgttttaccctcttctattgaattgccttgggatttccttctccctttccctgcccaccctgtcccctacaatttgtgcttctgagttgaggagccttcacctctgttgctgaggaaatggtagaatgctgcctatcacctccagcacaatcccagtgaaaaaggtgtgaagcacccaccatgttcttgaacaatcaggtttctaaataaacaactggaccatcaa

SEQ ID NO: 307010 - DNA, 235 bp, Homo sapiens
cctggaaaaggggaaggagagtctgttggagaagaggctggtggcagaggaggaagaggacgaagaggaggcagaagcaggaagcggcagaagcaggaagcggtcagatttctggaagatgcttaatgagccagaggaccaggccccaggaggggaggaggtgccggctgaggagcaggacccaagacctcggggcagaagcaggaagcagaagcaggaagcggcagaagcgaag

SEQ ID NO: 307011 - DNA, 4036 bp, Homo sapiens
cttatctttatggagggcaaataaggatttaaaaaatcttttaaaagggaggaatggaaagaccacaagtggaaaacagactttagagatatctctccaagtcacagaaggaaagcagccctccctccttactgaaagtctggagaattgagagtggaagtgaagggaagagaattgagtgtgtaagtagatgagaggttatgtgtcttggagccaggagactctggttccaagaaaagatgtctgcactccatccccctgattgtttattttttaattgtcagacaaaggactggtggacatatgaattctgttatggacgccacatccagcaataccacatggaagattcagagatcaaaggtgaagtcctctatctcggctactaccaatcagccttcgactgggatgatgaaacagccaaggtggcaagagtgtgggattcaggaagaaagggttctggccaccggctgagagccctgacaagaaggggagggtcaagattagctgatctgtttcttggggcttggtggccattaggacaaagtttcctggggcctgggggcacaggccattcttttgtctctttggggacgcagtgccatccttcctctttgctatctttctcatgtcccccattcctgcctcatgtcttctccaggcctccaagcagcatcgtcttaaacgctaccacagccagacctatggcaatgggtccaagtgcgaccttaatgggaggccccgggaggccgaggttcggttcctctgtgacgagggtgcaggtatctctggggactacatcgatcgcgtggacgagcccttgtcctgctcttatgtgctgaccattcgcactcctcggctctgcccccaccctctcctccggcccccacccagtgctgcaccgcaggccatcctctgtcacccttccctacagcctgaggagtacatggcctacgttcagaggcaagccggtgagtaattagagaaggaggagaagacggggagatacgggggcagggggtggcaaaagatcaagtattgaatagctggaggaatgtgttcctggcctgcttgcatgctgtttctcagtagactcaaagcagtatggagataaaatcatagaggagctgcaagatctaggcccccaagtgtggagtgagaccaagtctggggtggcaccccaaaagatggcaggtgcgagcccgaccaaggatgacagtaaggactcagatttctggaagatgcttaatgagccagaggaccaggccccaggaggggaggaggtgccggctgaggagcaggacccaagccctgaggcagcagattcagcttctggtgctcccaatgattttcagaacaacgtgcaggtcaaagtcattcgaagccctgcggatttgattcgattcatagaggagctgaaaggtggaacaaaaaaggggaagccaaatataggccaagagcagcctgtggatgatgctgcagaagtccctcagagggaaccagagaaggaaaggggtgatccagaacggcagagagagatggaagaagaggaggatgaggatgaggatgaggatgaagatgaggatgaacggcagttactgggagaatttgagaaggaactggaagggatcctgcttccgtcagaccgagaccggctccgttcggaggtgaaggctggcatggagcgggaactggaaaacatcatccaggagacagagaaagagctggacccagatgggctgaagaaggagtcagagcgggatcgggcaatgctggctctcacatccactctcaacaaactcatcaaaagactggaggaaaaacagagtccagagctggtgaagaagcacaagaaaaagagggttgtccccaaaaagcctcccccatcaccccaacctacaggtgagagcagtcagacaagaaagagtagcccagtctgttgttttcatccctcagctggttctgttcccagaggggaccctgttccttcccttctgagggtgctcattctctccccactttctggaacactgtcctcacttgcgcctgcttcccaacaccgtcatccctttgcgtgtttacctcctattcatctctctgggaagcagcttttagagcatatctgctggttttctggtttgctcctgtacacccagtgcctagcactctgcctggcacacaatggatgatcagtagctagtaattgaatgcttgtgagtctatatgctgaaaaccactttaggactttgcaccaagagaggccccagctgtcagggcatgaataggagagcccagctgcacatgagccaatagcttggatagactttaaattatttcttcttcttgtatccccttgtgtccatttcatagtgtcctatgggtgtggacatcagatattctaaatggaatgttccagtttcaaaccttccattcccactctctctataaacattgaaatgtctttaaagtcccaacatatggaggaggagaccacacttttccaacctgcttcttcaaacagaactttgttggtgcaggtggcctgattttggctttagaaaacatttgttttcctataggtgacgggcagaattattgggtagggcgggaagatggaaggctgcaattggtggagggagctctacaggctgaactgggaggggcggggcacacatttttttgagccctggctcatatacatgttgagatggaagagctgccaaagccaactgatgttttagggggagatgacccccacacccctaaccctggagtcacgcctctgctttgtgtttccctgtgtgtctccccctctaagaggaggatcctgagcacagagtccgggtccgggtcaccaagctccgtctcggaggccctaatcaggatctgactgtcctcgagatgaaacgggaaaacccacagctgaaacaaatcgaggggctggtgaaggagctgctggagagggagggactcacagctgcagggaaaattgagatcaaaattgtccgcccatgggctgaagggactgaagagggtgcacgttggctgactgatgaggacacgagaaacctcaaggagatcttcttcaatatcttggtgccgggagctgaagaggcccagaaggaacgccagcggcagaaagagctggagagcaattaccgccgggtgtggggctctccaggtggggagggcacaggggacctggacgaatttgacttctgagaccaacactacacttgacccttcacggaatccagactcttcctggactggcttgcctcctccccacctccccaccctggaacccctgagggccaaacagcagagtggagctgagctgtggacctctcgggcaactctgtgggtgtgggggccctgggtgaatgctgctgcccctgctggcagccaccttgagacctcaccgggcctgtgatatttgctctcctgaactctcactcaatcctcttcctctcctctgtggcttttcctgttattgtcccctaatgataggatattccctgctgcctacctggagattcagtaggatcttttgagtggaggtgggtagagagagcaaggagggcaggacacttagcaggcactgagcaagcaggcccccacctgcccttagtgatgtttggagtcgttttaccctcttctattgaattgccttgggatttccttctccctttccctgcccaccctgtcccctacaatttgtgcttctgagttgaggagccttcacctctgttgctgaggaaatggtagaatgctgcctatcacctccagcacaatcccagtgaaaaaggtgtgaagcacccaccatgttcttgaacaatcaggtttctaaataaacaactggaccatcaaaaaaaaaaaagaaaaaaaatttgtggggcgctcgcccgaaaattttcacacctcgtggggcggcccaagggagagaaatgcccacgggtccaagaacacggcagaaaggtggttccccaaaaagccgggccgcgttggacaccagggctggggtcggccaaaggcg

SEQ ID NO: 307012 - DNA, 2711 bp, Homo sapiens
gaggccgctgcctggcttagggcggaaacagattctctgcataagaaggggaacgaaagatggcggcggaaacgctgctgtccagtttgttaggactgctgcttctgggactcctgttacccgcaagtctgaccggcggtgtcgggagcctgaacctggaggagctgagtgagatgcgttatgggatcgagatcctgccgttgcctgtcatgggagggcagagccaatcttcggacgtggtgattgtctcctctaagtacaaacagcgctatgagtgtcgcctgccagctggagctattcacttccagcgtgaaagggaggaggaaacacctgcttaccaagggcctgggatccctgagttgttgagcccaatgagagatgctccctgcttgctgaagacaaaggactggtggacatatgaattctgttatggacgccacatccagcaataccacatggaagattcagagatcaaaggtgaagtcctctatctcggctactaccaatcagccttcgactgggatgatgaaacagccaaggcctccaagcagcatcgtcttaaacgctaccacagccagacctatggcaatgggtccaagtgcgaccttaatgggaggccccgggaggccgaggttcggttcctctgtgacgagggtgcaggtatctctggggactacatcgatcgcgtggacgagcccttgtcctgctcttatgtgctgaccattcgcactcctcggctctgcccccaccctctcctccggcccccacccagtgctgcaccgcaggccatcctctgtcacccttccctacagcctgaggagtacatggcctacgttcagaggcaagccgactcaaagcagtatggagataaaatcatagaggagctgcaagatctaggcccccaagtgtggagtgagaccaagtctggggtggcaccccaaaagatggcaggtgcgagcccgaccaaggatgacagtaaggactcagatttctggaagatgcttaatgagccagaggaccaggccccaggaggggaggaggtgccggctgaggagcaggacccaagccctgaggcagcagattcagcttctggtgctcccaatgattttcagaacaacgtgcaggtcaaagtcattcgaagccctgcggatttgattcgattcatagaggagctgaaaggtggaacaaaaaaggggaagccaaatataggccaagagcagcctgtggatgatgctgcagaagtccctcagagggaaccagagaaggaaaggggtgatccagaacggcagagagagatggaagaagaggaggatgaggatgaggatgaggatgaagatgaggatgaacggcagttactgggagaatttgagaaggaactggaagggatcctgcttccgtcagaccgagaccggctccgttcggaggtgaaggctggcatggagcgggaactggaaaacatcatccaggagacagagaaagagctggacccagatgggctgaagaaggagtcagagcgggatcgggcaatgctggctctcacatccactctcaacaaactcatcaaaagactggaggaaaaacagagtccagagctggtgaagaagcacaagaaaaagagggttgtccccaaaaagcctcccccatcaccccaacctacagaggaggatcctgagcacagagtccgggtccgggtcaccaagctccgtctcggaggccctaatcaggatctgactgtcctcgagatgaaacgggaaaacccacagctgaaacaaatcgaggggctggtgaaggagctgctggagagggagggactcacagctgcagggaaaattgagatcaaaattgtccgcccatgggctgaagggactgaagagggtgcacgttggctgactgatgaggacacgagaaacctcaaggagatcttcttcaatatcttggtgccgggagctgaagaggcccagaaggaacgccagcggcagaaagagctggagagcaattaccgccgggtgtggggctctccaggtggggagggcacaggggacctggacgaatttgacttctgagaccaacactacacttgacccttcacggaatccagactcttcctggactggcttgcctcctccccacctccccaccctggaacccctgagggccaaacagcagagtggagctgagctgtggacctctcgggcaactctgtgggtgtgggggccctgggtgaatgctgctgcccctgctggcagccaccttgagacctcaccgggcctgtgatatttgctctcctgaactctcactcaatcctcttcctctcctctgtggcttttcctgttattgtcccctaatgataggatattccctgctgcctacctggagattcagtaggatcttttgagtggaggtgggtagagagagcaaggagggcaggacacttagcaggcactgagcaagcaggcccccacctgcccttagtgatgtttggagtcgttttaccctcttctattgaattgccttgggatttccttctccctttccctgcccaccctgtcccctacaatttgtgcttctgagttgaggagccttcacctctgttgctgaggaaatggtagaatgctgcctatcacctccagcacaatcccagtgaaaaaggtgtgaagcacccaccatgttcttgaacaatcaggtttctaaataaacaactggaccatcaa

SEQ ID NO: 307013 - DNA, 2704 bp, Homo sapiens
  misc_feature (14)..(14): n is a, c, g, or t
  misc_feature (16)..(16): n is a, c, g, or t
  misc_feature (25)..(25): n is a, c, g, or t
  misc_feature (34)..(34): n is a, c, g, or t
accgtgcagtactntnacggtttanggtagcgangctgggtgggaacgaaagatggcggcggaaacgctgctgtccagtttgttaggactgctgcttctgggactcctgttacccgcaagtctgaccggcggtgtcgggagcctgaacctggaggagctgagtgagatgcgttatgggatcgagatcctgccgttgcctgtcatgggagggcagagccaatcttcggacgtggtgattgtctcctctaagtacaaacagcgctatgagtgtcgcctgccagctggagctattcacttccagcgtgaaagggaggaggaaacacctgcttaccaagggcctgggatccctgagttgttgagcccaatgagagatgctccctgcttgctgaagacaaaggactggtggacatatgaattctgttatggacgccacatccagcaataccacatggaagattcagagatcaaaggtgaagtcctctatctcggctactaccaatcagccttcgactgggatgatgaaacagccaaggcctccaagcagcatcgtcttaaacgctaccacagccagacctatggcaatgggtccaagtgcgaccttaatgggaggccccgggaggccgaggttcggttcctctgtgacgagggtgcaggtatctctggggactacatcgatcgcgtggacgagcccttgtcctgctcttatgtgctgaccattcgcactcctcggctctgcccccaccctctcctccggcccccacccagtgctgcaccgcaggccatcctctgtcacccttccctacagcctgaggagtacatggcctacgttcagaggcaagccgactcaaagcagtatggagataaaatcatagaggagctgcaagatctaggcccccaagtgtggagtgagaccaagtctggggtggcaccccaaaagatggcaggtgcgagcccgaccaaggatgacagtaaggactcagatttctggaagatgcttaatgagccagaggaccaggccccaggaggggaggaggtgccggctgaggagcaggacccaagccctgaggcagcagattcagcttctggtgctcccaatgattttcagaacaacgtgcaggtcaaagtcattcgaagccctgcggatttgattcgattcatagaggagctgaaaggtggaacaaaaaaggggaagccaaatataggccaagagcagcctgtggatgatgctgcagaagtccctcagagggaaccagagaaggaaaggggtgatccagaacggcagagagagatggaagaagaggaggatgaggatgaggatgaggatgaagatgaggatgaacggcagttactgggagaatttgagaaggaactggaagggatcctgcttccgtcagaccgagaccggctccgttcggaggtgaaggctggcatggagcgggaactggaaaacatcatccaggagacagagaaagagctggacccagatgggctgaagaaggagtcagagcgggatcgggcaatgctggctctcacatccactctcaacaaactcatcaaaagactggaggaaaaacagagtccagagctggtgaagaagcacaagaaaaagagggttgtccccaaaaagcctcccccatcaccccaacctacagaggaggatcctgagcacagagtccgggtccgggtcaccaagctccgtctcggaggccctaatcaggatctgactgtcctcgagatgaaacgggaaaacccacagctgaaacaaatcgaggggctggtgaaggagctgctggagagggagggactcacagctgcagggaaaattgagatcaaaattgtccgcccatgggctgaagggactgaagagggtgcacgttggctgactgatgaggacacgagaaacctcaaggagatcttcttcaatatcttggtgccgggagctgaagaggcccagaaggaacgccagcggcagaaagagctggagagcaattaccgccgggtgtggggctctccaggtggggagggcacaggggacctggacgaatttgacttctgagaccaacactacacttgacccttcacggaatccagactcttcctggactggcttgcctcctccccacctccccaccctggaacccctgagggccaaacagcagagtggagctgagctgtggacctctcgggcaactctgtgggtgtgggggccctgggtgaatgctgctgcccctgctggcagccaccttgagacctcaccgggcctgtgatatttgctctcctgaactctcactcaatcctcttcctctcctctgtggcttttcctgttattgtcccctaatgataggatattccctgctgcctacctggagattcagtaggatcttttgagtggaggtgggtagagagagcaaggagggcaggacacttagcaggcactgagcaagcaggcccccacctgcccttagtgatgtttggagtcgttttaccctcttctattgaattgccttgggatttccttctccctttccctgcccaccctgtcccctacaatttgtgcttctgagttgaggagccttcacctctgttgctgaggaaatggtagaatgctgcctatcacctccagcacaatcccagtgaaaaaggtgtgaagcacccaccatgttcttgaacaatcaggtttctaaataaacaactggaccatcaa

SEQ ID NO: 307014 - DNA, 2748 bp, Homo sapiens
gttggcctactggaaaaataaaaaaaaaaggagaaaaaaaaaaaaaaaaaaaaaaaaaaaaaaaaaaaaaaaaaaaaaaaggagggggaacgaaagatggcggcggaaacgctgctgtccagtttgttaggactgctgcttctgggactcctgttacccgcaagtctgaccggcggtgtcgggagcctgaacctggaggagctgagtgagatgcgttatgggatcgagatcctgccgttgcctgtcatgggagggcagagccaatcttcggacgtggtgattgtctcctctaagtacaaacagcgctatgagtgtcgcctgccagctggagctattcacttccagcgtgaaagggaggaggaaacacctgcttaccaagggcctgggatccctgagttgttgagcccaatgagagatgctccctgcttgctgaagacaaaggactggtggacatatgaattctgttatggacgccacatccagcaataccacatggaagattcagagatcaaaggtgaagtcctctatctcggctactaccaatcagccttcgactgggatgatgaaacagccaaggcctccaagcagcatcgtcttaaacgctaccacagccagacctatggcaatgggtccaagtgcgaccttaatgggaggccccgggaggccgaggttcggttcctctgtgacgagggtgcaggtatctctggggactacatcgatcgcgtggacgagcccttgtcctgctcttatgtgctgaccattcgcactcctcggctctgcccccaccctctcctccggcccccacccagtgctgcaccgcaggccatcctctgtcacccttccctacagcctgaggagtacatggcctacgttcagaggcaagccgactcaaagcagtatggagataaaatcatagaggagctgcaagatctaggcccccaagtgtggagtgagaccaagtctggggtggcaccccaaaagatggcaggtgcgagcccgaccaaggatgacagtaaggactcagatttctggaagatgcttaatgagccagaggaccaggccccaggaggggaggaggtgccggctgaggagcaggacccaagccctgaggcagcagattcagcttctggtgctcccaatgattttcagaacaacgtgcaggtcaaagtcattcgaagccctgcggatttgattcgattcatagaggagctgaaaggtggaacaaaaaaggggaagccaaatataggccaagagcagcctgtggatgatgctgcagaagtccctcagagggaaccagagaaggaaaggggtgatccagaacggcagagagagatggaagaagaggaggatgaggatgaggatgaggatgaagatgaggatgaacggcagttactgggagaatttgagaaggaactggaagggatcctgcttccgtcagaccgagaccggctccgttcggaggtgaaggctggcatggagcgggaactggaaaacatcatccaggagacagagaaagagctggacccagatgggctgaagaaggagtcagagcgggatcgggcaatgctggctctcacatccactctcaacaaactcatcaaaagactggaggaaaaacagagtccagagctggtgaagaagcacaagaaaaagagggttgtccccaaaaagcctcccccatcaccccaacctacagaggaggatcctgagcacagagtccgggtccgggtcaccaagctccgtctcggaggccctaatcaggatctgactgtcctcgagatgaaacgggaaaacccacagctgaaacaaatcgaggggctggtgaaggagctgctggagagggagggactcacagctgcagggaaaattgagatcaaaattgtccgcccatgggctgaagggactgaagagggtgcacgttggctgactgatgaggacacgagaaacctcaaggagatcttcttcaatatcttggtgccgggagctgaagaggcccagaaggaacgccagcggcagaaagagctggagagcaattaccgccgggtgtggggctctccaggtggggagggcacaggggacctggacgaatttgacttctgagaccaacactacacttgacccttcacggaatccagactcttcctggactggcttgcctcctccccacctccccaccctggaacccctgagggccaaacagcagagtggagctgagctgtggacctctcgggcaactctgtgggtgtgggggccctgggtgaatgctgctgcccctgctggcagccaccttgagacctcaccgggcctgtgatatttgctctcctgaactctcactcaatcctcttcctctcctctgtggcttttcctgttattgtcccctaatgataggatattccctgctgcctacctggagattcagtaggatcttttgagtggaggtgggtagagagagcaaggagggcaggacacttagcaggcactgagcaagcaggcccccacctgcccttagtgatgtttggagtcgttttaccctcttctattgaattgccttgggatttccttctccctttccctgcccaccctgtcccctacaatttgtgcttctgagttgaggagccttcacctctgttgctgaggaaatggtagaatgctgcctatcacctccagcacaatcccagtgaaaaaggtgtgaagcacccaccatgttcttgaacaatcaggtttctaaataaacaactggaccatcaa

SEQ ID NO: 307015 - DNA, 2539 bp, Homo sapiens
  misc_feature (14)..(14): n is a, c, g, or t
  misc_feature (16)..(16): n is a, c, g, or t
  misc_feature (25)..(25): n is a, c, g, or t
  misc_feature (34)..(34): n is a, c, g, or t
accgtgcagtactntnacggtttanggtagcgangctgggtgggaacgaaagatggcggcggaaacgctgctgtccagtttgttaggactgctgcttctgggactcctgttacccgcaagtctgaccggcggtgtcgggagcctgaacctggaggagctgagtgagatgcgttatgggatcgagatcctgccgttgcctgtcatgggagggcagagccaatcttcggacgtggtgattgtctcctctaagtacaaacagcgctatgagtgtcgcctgccagctggagctattcacttccagcgtgaaagggaggaggaaacacctgcttaccaagggcctgggatccctgagttgttgagcccaatgagagatgctccctgcttgctgaagacaaaggactggtggacatatgaattctgttatggacgccacatccagcaataccacatggaagattcagagatcaaaggtgaagtcctctatctcggctactaccaatcagccttcgactgggatgatgaaacagccaaggcctccaagcagcatcgtcttaaacgctaccacagccagacctatggcaatgggtccaagtgcgaccttaatgggaggccccgggaggccgaggttcggttcctctgtgacgagggtgcaggtatctctggggactacatcgatcgcgtggacgagcccttgtcctgctcttatgtgctgaccattcgcactcctcggctctgcccccaccctctcctccggcccccacccagtgctgcaccgcaggccatcctctgtcacccttccctacagcctgaggagtacatggcctacgttcagaggcaagccgactcaaagcagtatggagataaaatcatagaggagctgcaagatctaggcccccaagtgtggagtgagaccaagtctggggtggcaccccaaaagatggcaggtgcgagcccgaccaaggatgacagtaaggactcagatttctggaagatgcttaatgagccagaggaccaggccccaggaggggaggaggtgccggctgaggagcaggacccaagccctgaggcagcagattcagcttctggtgctcccaatgattttcagaacaacgtgcaggtcaaagtcattcgaagccctgcggatttgattcgattcatagaggagctgaaaggtggaacaaaaaaggggaagccaaatataggccaagagcagcctgtggatgatgctgcagaagtccctcagagggaaccagagaaggaaaggggtgatccagaacggcagagagagatggaagaagaggaggatgaggatgaggatgaggatgaagatgaggatgaacggcagttactgggagaatttgagaaggaactggaagggatcctgcttccgtcagaccgagaccggctccgttcggaggtgaaggctggcatggagcgggaactggaaaacatcatccaggagacagagaaagagctggacccagatgggctgaagaaggagtcagagcgggatcgggcaatgctggctctcacatccactctcaacaaactcatcaaaagactggaggaaaaacagagtccagagctggtgaagaagcacaagaaaaagagggttgtccccaaaaagcctcccccatcaccccaacctacagggaaaattgagatcaaaattgtccgcccatgggctgaagggactgaagagggtgcacgttggctgactgatgaggacacgagaaacctcaaggagatcttcttcaatatcttggtgccgggagctgaagaggcccagaaggaacgccagcggcagaaagagctggagagcaattaccgccgggtgtggggctctccaggtggggagggcacaggggacctggacgaatttgacttctgagaccaacactacacttgacccttcacggaatccagactcttcctggactggcttgcctcctccccacctccccaccctggaacccctgagggccaaacagcagagtggagctgagctgtggacctctcgggcaactctgtgggtgtgggggccctgggtgaatgctgctgcccctgctggcagccaccttgagacctcaccgggcctgtgatatttgctctcctgaactctcactcaatcctcttcctctcctctgtggcttttcctgttattgtcccctaatgataggatattccctgctgcctacctggagattcagtaggatcttttgagtggaggtgggtagagagagcaaggagggcaggacacttagcaggcactgagcaagcaggcccccacctgcccttagtgatgtttggagtcgttttaccctcttctattgaattgccttgggatttccttctccctttccctgcccaccctgtcccctacaatttgtgcttctgagttgaggagccttcacctctgttgctgaggaaatggtagaatgctgcctatcacctccagcacaatcccagtgaaaaaggtgtgaagcacccaccatgttcttgaacaatcaggtttctaaataaacaactggaccatcaa

SEQ ID NO: 307016 - DNA, 3620 bp, Homo sapiens
  misc_feature (14)..(14): n is a, c, g, or t
  misc_feature (16)..(16): n is a, c, g, or t
  misc_feature (25)..(25): n is a, c, g, or t
  misc_feature (34)..(34): n is a, c, g, or t
accgtgcagtactntnacggtttanggtagcgangctgggtgggaacgaaagatggcggcggaaacgctgctgtccagtttgttaggactgctgcttctgggactcctgttacccgcaagtctgaccggcggtgtcgggagcctgaacctggaggagctgagtgagatgcgttatgggatcgagatcctgccgttgcctgtcatgggagggcagagccaatcttcggacgtggtgattgtctcctctaagtacaaacagcgctatgagtgtcgcctgccagctggagctattcacttccagcgtgaaagggaggaggaaacacctgcttaccaagggcctgggatccctgagttgttgagcccaatgagagatgctccctgcttgctgaagacaaaggactggtggacatatgaattctgttatggacgccacatccagcaataccacatggaagattcagagatcaaaggtgaagtcctctatctcggctactaccaatcagccttcgactgggatgatgaaacagccaaggcctccaagcagcatcgtcttaaacgctaccacagccagacctatggcaatgggtccaagtgcgaccttaatgggaggccccgggaggccgaggttcggttcctctgtgacgagggtgcaggtatctctggggactacatcgatcgcgtggacgagcccttgtcctgctcttatgtgctgaccattcgcactcctcggctctgcccccaccctctcctccggcccccacccagtgctgcaccgcaggccatcctctgtcacccttccctacagcctgaggagtacatggcctacgttcagaggcaagccgactcaaagcagtatggagataaaatcatagaggagctgcaagatctaggcccccaagtgtggagtgagaccaagtctggggtggcaccccaaaagatggcaggtgcgagcccgaccaaggatgacagtaaggactcagatttctggaagatgcttaatgagccagaggaccaggccccaggaggggaggaggtgccggctgaggagcaggacccaagccctgaggcagcagattcagcttctggtgctcccaatgattttcagaacaacgtgcaggtcaaagtcattcgaagccctgcggatttgattcgattcatagaggagctgaaaggtggaacaaaaaaggggaagccaaatataggccaagagcagcctgtggatgatgctgcagaagtccctcagagggaaccagagaaggaaaggggtgatccagaacggcagagagagatggaagaagaggaggatgaggatgaggatgaggatgaagatgaggatgaacggcagttactgggagaatttgagaaggaactggaagggatcctgcttccgtcagaccgagaccggctccgttcggaggtgaaggctggcatggagcgggaactggaaaacatcatccaggagacagagaaagagctggacccagatgggctgaagaaggagtcagagcgggatcgggcaatgctggctctcacatccactctcaacaaactcatcaaaagactggaggaaaaacagagtccagagctggtgaagaagcacaagaaaaagagggttgtccccaaaaagcctcccccatcaccccaacctacaggtgagagcagtcagacaagaaagagtagcccagtctgttgttttcatccctcagctggttctgttcccagaggggaccctgttccttcccttctgagggtgctcattctctccccactttctggaacactgtcctcacttgcgcctgcttcccaacaccgtcatccctttgcgtgtttacctcctattcatctctctgggaagcagcttttagagcatatctgctggttttctggtttgctcctgtacacccagtgcctagcactctgcctggcacacaatggatgatcagtagctagtaattgaatgcttgtgagtctatatgctgaaaaccactttaggactttgcaccaagagaggccccagctgtcagggcatgaataggagagcccagctgcacatgagccaatagcttggatagactttaaattatttcttcttcttgtatccccttgtgtccatttcatagtgtcctatgggtgtggacatcagatattctaaatggaatgttccagtttcaaaccttccattcccactctctctataaacattgaaatgtctttaaagtcccaacatatggaggaggagaccacacttttccaacctgcttcttcaaacagaactttgttggtgcaggtggcctgattttggctttagaaaacatttgttttcctataggtgacgggcagaattattgggtagggcgggaagatggaaggctgcaattggtggagggagctctacaggctgaactgggaggggcggggcacacatttttttgagccctggctcatatacatgttgagatggaagagctgccaaagccaactgatgttttagggggagatgacccccacacccctaaccctggagtcacgcctctgctttgtgtttccctgtgtgtctccccctctaagaggaggatcctgagcacagagtccgggtccgggtcaccaagctccgtctcggaggccctaatcaggatctgactgtcctcgagatgaaacgggaaaacccacagctgaaacaaatcgaggggctggtgaaggagctgctggagagggagggactcacagctgcagggaaaattgagatcaaaattgtccgcccatgggctgaagggactgaagagggtgcacgttggctgactgatgaggacacgagaaacctcaaggagatcttcttcaatatcttggtgccgggagctgaagaggcccagaaggaacgccagcggcagaaagagctggagagcaattaccgccgggtgtggggctctccaggtggggagggcacaggggacctggacgaatttgacttctgagaccaacactacacttgacccttcacggaatccagactcttcctggactggcttgcctcctccccacctccccaccctggaacccctgagggccaaacagcagagtggagctgagctgtggacctctcgggcaactctgtgggtgtgggggccctgggtgaatgctgctgcccctgctggcagccaccttgagacctcaccgggcctgtgatatttgctctcctgaactctcactcaatcctcttcctctcctctgtggcttttcctgttattgtcccctaatgataggatattccctgctgcctacctggagattcagtaggatcttttgagtggaggtgggtagagagagcaaggagggcaggacacttagcaggcactgagcaagcaggcccccacctgcccttagtgatgtttggagtcgttttaccctcttctattgaattgccttgggatttccttctccctttccctgcccaccctgtcccctacaatttgtgcttctgagttgaggagccttcacctctgttgctgaggaaatggtagaatgctgcctatcacctccagcacaatcccagtgaaaaaggtgtgaagcacccaccatgttcttgaacaatcaggtttctaaataaacaactggaccatcaa

SEQ ID NO: 307017 - DNA, 2659 bp, Homo sapiens
  misc_feature (14)..(14): n is a, c, g, or t
  misc_feature (16)..(16): n is a, c, g, or t
  misc_feature (25)..(25): n is a, c, g, or t
  misc_feature (34)..(34): n is a, c, g, or t
accgtgcagtactntnacggtttanggtagcgangctgggtgggaacgaaagatggcggcggaaacgctgctgtccagtttgttaggactgctgcttctgggactcctgttacccgcaagtctgaccggcggtgtcgggagcctgaacctggaggagctgagtgagatgcgttatgggatcgagatcctgccgttgcctgtcatgggagggcagagccaatcttcggacgtggtgattgtctcctctaagtacaaacagcgctatgagtgtcgcctgccagctggagctattcacttccagcgtgaaagggaggaggaaacacctgcttaccaagggcctgggatccctgagttgttgagcccaatgagagatgctccctgcttgctgaagacaaaggactggtggacatatgaattctgttatggacgccacatccagcaataccacatggaagattcagagatcaaaggtgaagtcctctatctcggctactaccaatcagccttcgactgggatgatgaaacagccaaggcctccaagcagcatcgtcttaaacgctaccacagccagacctatggcaatgggtccaagtgcgaccttaatgggaggccccgggaggccgaggttcggttcctctgtgacgagggtgcaggtatctctggggactacatcgatcgcgtggacgagcccttgtcctgctcttatgtgctgaccattcgcactcctcggctctgcccccaccctctcctccggcccccacccagtgctgcaccgcaggccatcctctgtcacccttccctacagcctgaggagtacatggcctacgttcagaggcaagccgactcaaagcagtatggagataaaatcatagaggagctgcaagatctaggcccccaagtgtggagtgagaccaagtctggggtggcaccccaaaagatggcaggtgcgagcccgaccaaggatgacagtaaggactcagatttctggaagatgcttaatgagccagaggaccaggccccaggaggggaggaggtgccggctgaggagcaggacccaagccctgaggcagcagattcagcttctggtgctcccaatgattttcagaacaacgtgcaggtcaaagtcattcgaagccctgcggatttgattcgattcatagaggagctgaaaggtggaacaaaaaaggggaagccaaatataggccaagagcagcctgtggatgatgctgcagaagtccctcagagggaaccagagaaggaaaggggtgatccagaacggcagagagagatggaagaagaggaggatgaggatgaggatgaggatgaagatgaggatgaacggcagttactgggagaatttgagaaggaactggaagggatcctgcttccgtcagaccgagaccggctccgttcggagacagagaaagagctggacccagatgggctgaagaaggagtcagagcgggatcgggcaatgctggctctcacatccactctcaacaaactcatcaaaagactggaggaaaaacagagtccagagctggtgaagaagcacaagaaaaagagggttgtccccaaaaagcctcccccatcaccccaacctacagaggaggatcctgagcacagagtccgggtccgggtcaccaagctccgtctcggaggccctaatcaggatctgactgtcctcgagatgaaacgggaaaacccacagctgaaacaaatcgaggggctggtgaaggagctgctggagagggagggactcacagctgcagggaaaattgagatcaaaattgtccgcccatgggctgaagggactgaagagggtgcacgttggctgactgatgaggacacgagaaacctcaaggagatcttcttcaatatcttggtgccgggagctgaagaggcccagaaggaacgccagcggcagaaagagctggagagcaattaccgccgggtgtggggctctccaggtggggagggcacaggggacctggacgaatttgacttctgagaccaacactacacttgacccttcacggaatccagactcttcctggactggcttgcctcctccccacctccccaccctggaacccctgagggccaaacagcagagtggagctgagctgtggacctctcgggcaactctgtgggtgtgggggccctgggtgaatgctgctgcccctgctggcagccaccttgagacctcaccgggcctgtgatatttgctctcctgaactctcactcaatcctcttcctctcctctgtggcttttcctgttattgtcccctaatgataggatattccctgctgcctacctggagattcagtaggatcttttgagtggaggtgggtagagagagcaaggagggcaggacacttagcaggcactgagcaagcaggcccccacctgcccttagtgatgtttggagtcgttttaccctcttctattgaattgccttgggatttccttctccctttccctgcccaccctgtcccctacaatttgtgcttctgagttgaggagccttcacctctgttgctgaggaaatggtagaatgctgcctatcacctccagcacaatcccagtgaaaaaggtgtgaagcacccaccatgttcttgaacaatcaggtttctaaataaacaactggaccatcaa

SEQ ID NO: 307018 - DNA, 2922 bp, Homo sapiens
  misc_feature (14)..(14): n is a, c, g, or t
  misc_feature (16)..(16): n is a, c, g, or t
  misc_feature (25)..(25): n is a, c, g, or t
  misc_feature (34)..(34): n is a, c, g, or t
accgtgcagtactntnacggtttanggtagcgangctgggtgggaacgaaagatggcggcggaaacgctgctgtccagtttgttaggactgctgcttctgggactcctgttacccgcaagtctgaccggcggtgtcgggagcctgaacctggaggagctgagtgagatgcgttatgggatcgagatcctgccgttgcctgtcatgggagggcagagccaatcttcggacgtggtgattgtctcctctaagtacaaacagcgctatgagtgtcgcctgccagctggagctattcacttccagcgtgaaagggaggaggaaacacctgcttaccaagggcctgggatccctgagttgttgagcccaatgagagatgctccctgcttgctgaagacaaaggactggtggacatatgaattctgttatggacgccacatccagcaataccacatggaagattcagagatcaaaggtgaagtcctctatctcggctactaccaatcagccttcgactgggatgatgaaacagccaaggcctccaagcagcatcgtcttaaacgctaccacagccagacctatggcaatgggtccaagtgcgaccttaatgggaggccccgggaggccgaggttcggttcctctgtgacgagggtgcaggtatctctggggactacatcgatcgcgtggacgagcccttgtcctgctcttatgtgctgaccattcgcactcctcggctctgcccccaccctctcctccggcccccacccagtgctgcaccgcaggccatcctctgtcacccttccctacagcctgaggagtacatggcctacgttcagaggcaagccgactcaaagcagtatggagataaaatcatagaggagctgcaagatctaggcccccaagtgtggagtgagaccaagtctggggtggcaccccaaaagatggcaggtaggaccttgtttcacctgttccgtgaaactcacttccatttcttcccttcccctgatcttactgtcctgactgactggtggggtgggggggggtggaaaagtaccatgggccctcctcccttggtgatagaggaggggaagggaccccatcctatttgctcccttctgtctcacccctcctgtcagatcagtctctccctgttctctgtaccctaggtgcgagcccgaccaaggatgacagtaaggactcagatttctggaagatgcttaatgagccagaggaccaggccccaggaggggaggaggtgccggctgaggagcaggacccaagccctgaggcagcagattcagcttctggtgctcccaatgattttcagaacaacgtgcaggtcaaagtcattcgaagccctgcggatttgattcgattcatagaggagctgaaaggtggaacaaaaaaggggaagccaaatataggccaagagcagcctgtggatgatgctgcagaagtccctcagagggaaccagagaaggaaaggggtgatccagaacggcagagagagatggaagaagaggaggatgaggatgaggatgaggatgaagatgaggatgaacggcagttactgggagaatttgagaaggaactggaagggatcctgcttccgtcagaccgagaccggctccgttcggaggtgaaggctggcatggagcgggaactggaaaacatcatccaggagacagagaaagagctggacccagatgggctgaagaaggagtcagagcgggatcgggcaatgctggctctcacatccactctcaacaaactcatcaaaagactggaggaaaaacagagtccagagctggtgaagaagcacaagaaaaagagggttgtccccaaaaagcctcccccatcaccccaacctacagaggaggatcctgagcacagagtccgggtccgggtcaccaagctccgtctcggaggccctaatcaggatctgactgtcctcgagatgaaacgggaaaacccacagctgaaacaaatcgaggggctggtgaaggagctgctggagagggagggactcacagctgcagggaaaattgagatcaaaattgtccgcccatgggctgaagggactgaagagggtgcacgttggctgactgatgaggacacgagaaacctcaaggagatcttcttcaatatcttggtgccgggagctgaagaggcccagaaggaacgccagcggcagaaagagctggagagcaattaccgccgggtgtggggctctccaggtggggagggcacaggggacctggacgaatttgacttctgagaccaacactacacttgacccttcacggaatccagactcttcctggactggcttgcctcctccccacctccccaccctggaacccctgagggccaaacagcagagtggagctgagctgtggacctctcgggcaactctgtgggtgtgggggccctgggtgaatgctgctgcccctgctggcagccaccttgagacctcaccgggcctgtgatatttgctctcctgaactctcactcaatcctcttcctctcctctgtggcttttcctgttattgtcccctaatgataggatattccctgctgcctacctggagattcagtaggatcttttgagtggaggtgggtagagagagcaaggagggcaggacacttagcaggcactgagcaagcaggcccccacctgcccttagtgatgtttggagtcgttttaccctcttctattgaattgccttgggatttccttctccctttccctgcccaccctgtcccctacaatttgtgcttctgagttgaggagccttcacctctgttgctgaggaaatggtagaatgctgcctatcacctccagcacaatcccagtgaaaaaggtgtgaagcacccaccatgttcttgaacaatcaggtttctaaataaacaactggaccatcaa

SEQ ID NO: 307019 - DNA, 2825 bp, Homo sapiens
  misc_feature (14)..(14): n is a, c, g, or t
  misc_feature (16)..(16): n is a, c, g, or t
  misc_feature (25)..(25): n is a, c, g, or t
  misc_feature (34)..(34): n is a, c, g, or t
accgtgcagtactntnacggtttanggtagcgangctgggtgggaacgaaagatggcggcggaaacgctgctgtccagtttgttaggactgctgcttctgggactcctgttacccgcaagtctgaccggcggtgtcgggagcctgaacctggaggagctgagtgagatgcgttatgggatcgagatcctgccgttgcctgtcatgggagggcagagccaatcttcggacgtggtgattgtctcctctaagtacaaacagcgctatgagtgtcgcctgccagctggagctattcacttccagcgtgaaagggaggaggaaacacctgcttaccaagggcctgggatccctgagttgttgagcccaatgagagatgctccctgcttgctgaagacaaaggactggtggacatatgaattctgttatggacgccacatccagcaataccacatggaagattcagagatcaaaggtgaagtcctctatctcggctactaccaatcagccttcgactgggatgatgaaacagccaaggcctccaagcagcatcgtcttaaacgctaccacagccagacctatggcaatgggtccaagtgcgaccttaatgggaggccccgggaggccgaggttcggttcctctgtgacgagggtgcaggtatctctggggactacatcgatcgcgtggacgagcccttgtcctgctcttatgtgctgaccattcgcactcctcggctctgcccccaccctctcctccggcccccacccagtgctgcaccgcaggccatcctctgtcacccttccctacagcctgaggagtacatggcctacgttcagaggcaagccggtgagtaattagagaaggaggagaagacggggagatacgggggcagggggtggcaaaagatcaagtattgaatagctggaggaatgtgttcctggcctgcttgcatgctgtttctcagtagactcaaagcagtatggagataaaatcatagaggagctgcaagatctaggcccccaagtgtggagtgagaccaagtctggggtggcaccccaaaagatggcaggtgcgagcccgaccaaggatgacagtaaggactcagatttctggaagatgcttaatgagccagaggaccaggccccaggaggggaggaggtgccggctgaggagcaggacccaagccctgaggcagcagattcagcttctggtgctcccaatgattttcagaacaacgtgcaggtcaaagtcattcgaagccctgcggatttgattcgattcatagaggagctgaaaggtggaacaaaaaaggggaagccaaatataggccaagagcagcctgtggatgatgctgcagaagtccctcagagggaaccagagaaggaaaggggtgatccagaacggcagagagagatggaagaagaggaggatgaggatgaggatgaggatgaagatgaggatgaacggcagttactgggagaatttgagaaggaactggaagggatcctgcttccgtcagaccgagaccggctccgttcggaggtgaaggctggcatggagcgggaactggaaaacatcatccaggagacagagaaagagctggacccagatgggctgaagaaggagtcagagcgggatcgggcaatgctggctctcacatccactctcaacaaactcatcaaaagactggaggaaaaacagagtccagagctggtgaagaagcacaagaaaaagagggttgtccccaaaaagcctcccccatcaccccaacctacagaggaggatcctgagcacagagtccgggtccgggtcaccaagctccgtctcggaggccctaatcaggatctgactgtcctcgagatgaaacgggaaaacccacagctgaaacaaatcgaggggctggtgaaggagctgctggagagggagggactcacagctgcagggaaaattgagatcaaaattgtccgcccatgggctgaagggactgaagagggtgcacgttggctgactgatgaggacacgagaaacctcaaggagatcttcttcaatatcttggtgccgggagctgaagaggcccagaaggaacgccagcggcagaaagagctggagagcaattaccgccgggtgtggggctctccaggtggggagggcacaggggacctggacgaatttgacttctgagaccaacactacacttgacccttcacggaatccagactcttcctggactggcttgcctcctccccacctccccaccctggaacccctgagggccaaacagcagagtggagctgagctgtggacctctcgggcaactctgtgggtgtgggggccctgggtgaatgctgctgcccctgctggcagccaccttgagacctcaccgggcctgtgatatttgctctcctgaactctcactcaatcctcttcctctcctctgtggcttttcctgttattgtcccctaatgataggatattccctgctgcctacctggagattcagtaggatcttttgagtggaggtgggtagagagagcaaggagggcaggacacttagcaggcactgagcaagcaggcccccacctgcccttagtgatgtttggagtcgttttaccctcttctattgaattgccttgggatttccttctccctttccctgcccaccctgtcccctacaatttgtgcttctgagttgaggagccttcacctctgttgctgaggaaatggtagaatgctgcctatcacctccagcacaatcccagtgaaaaaggtgtgaagcacccaccatgttcttgaacaatcaggtttctaaataaacaactggaccatcaa

SEQ ID NO: 307020 - DNA, 3762 bp, Homo sapiens
  misc_feature (14)..(14): n is a, c, g, or t
  misc_feature (16)..(16): n is a, c, g, or t
  misc_feature (25)..(25): n is a, c, g, or t
  misc_feature (34)..(34): n is a, c, g, or t
accgtgcagtactntnacggtttanggtagcgangctgggtgggaacgaaagatggcggcggaaacgctgctgtccagtttgttaggactgctgcttctgggactcctgttacccgcaagtctgaccggcggtgtcgggagcctgaacctggaggagctgagtgagatgcgttatgggatcgagatcctgccgttgcctgtcatgggagggcagagccaatcttcggacgtggtgattgtctcctctaagtacaaacagcgctatgagtgtcgcctgccagctggagctattcacttccagcgtgaaagggaggaggaaacacctgcttaccaagggcctgggatccctgagttgttgagcccaatgagagatgctccctgcttgctgaagacaaaggactggtggacatatgaattctgttatggacgccacatccagcaataccacatggaagattcagagatcaaaggtgaagtcctctatctcggctactaccaatcagccttcgactgggatgatgaaacagccaaggcctccaagcagcatcgtcttaaacgctaccacagccagacctatggcaatgggtccaagtgcgaccttaatgggaggccccgggaggccgaggttcggttcctctgtgacgagggtgcaggtatctctggggactacatcgatcgcgtggacgagcccttgtcctgctcttatgtgctgaccattcgcactcctcggctctgcccccaccctctcctccggcccccacccagtgctgcaccgcaggccatcctctgtcacccttccctacagcctgaggagtacatggcctacgttcagaggcaagccgactcaaagcagtatggagataaaatcatagaggagctgcaagatctaggcccccaagtgtggagtgagaccaagtctggggtggcaccccaaaagatggcaggtgcgagcccgaccaaggatgacagtaaggactcagatttctggaagatgcttaatgagccagaggaccaggccccaggaggggaggaggtgccggctgaggagcaggacccaagccctgaggcagcagattcagcttctggtgctcccaatgattttcagaacaacgtgcaggtcaaagtcattcgaagccctgcggatttgattcgattcatagaggagctgaaaggtggaacaaaaaaggggaagccaaatataggccaagagcagcctgtggatgatgctgcagaagtccctcagagggaaccagagaaggaaaggggtgatccagaacggcagagagagatggaagaagaggaggatgaggatgaggatgaggatgaagatgaggatgaacggcagttactgggagaatttgagaaggaactggaagggatcctgcttccgtcagaccgagaccggctccgttcggaggtgaaggctggcatggagcgggaactggaaaacatcatccaggagacagagaaagagctggacccagatgggctgaagaaggagtcagagcgggatcgggcaatgctggctctcacatccactctcaacaaactcatcaaaagactggaggaaaaacagagtccagagctggtgaagaagcacaagaaaaagagggttgtccccaaaaagcctcccccatcaccccaacctacaggtgagagcagtcagacaagaaagagtagcccagtctgttgttttcatccctcagctggttctgttcccagaggggaccctgttccttcccttctgagggtgctcattctctccccactttctggaacactgtcctcacttgcgcctgcttcccaacaccgtcatccctttgcgtgtttacctcctattcatctctctgggaagcagcttttagagcatatctgctggttttctggtttgctcctgtacacccagtgcctagcactctgcctggcacacaatggatgatcagtagctagtaattgaatgcttgtgagtctatatgctgaaaaccactttaggactttgcaccaagagaggccccagctgtcagggcatgaataggagagcccagctgcacatgagccaatagcttggatagactttaaattatttcttcttcttgtatccccttgtgtccatttcatagtgtcctatgggtgtggacatcagatattctaaatggaatgttccagtttcaaaccttccattcccactctctctataaacattgaaatgtctttaaagtcccaacatatggaggaggagaccacacttttccaacctgcttcttcaaacagaactttgttggtgcaggtggcctgattttggctttagaaaacatttgttttcctataggtgacgggcagaattattgggtagggcgggaagatggaaggctgcaattggtggagggagctctacaggctgaactgggaggggcggggcacacatttttttgagccctggctcatatacatgttgagatggaagagctgccaaagccaactgatgttttagggggagatgacccccacacccctaaccctggagtcacgcctctgctttgtgtttccctgtgtgtctccccctctaagaggaggatcctgagcacagagtccgggtccgggtcaccaagctccgtctcggaggccctaatcaggatctgactgtcctcgagatgaaacgggaaaacccacagctgaaacaaatcgaggggctggtgaaggagctgctggagagggagggactcacagctgcaggtgggccctggagggcggctggacccagtgctgtcggaagggcaagctgccggaagtggaggggctgggaccagtggggcagggggcctgccctgaggctcccaaccatcctctcctctcactgcatactgctcctttccagggaaaattgagatcaaaattgtccgcccatgggctgaagggactgaagagggtgcacgttggctgactgatgaggacacgagaaacctcaaggagatcttcttcaatatcttggtgccgggagctgaagaggcccagaaggaacgccagcggcagaaagagctggagagcaattaccgccgggtgtggggctctccaggtggggagggcacaggggacctggacgaatttgacttctgagaccaacactacacttgacccttcacggaatccagactcttcctggactggcttgcctcctccccacctccccaccctggaacccctgagggccaaacagcagagtggagctgagctgtggacctctcgggcaactctgtgggtgtgggggccctgggtgaatgctgctgcccctgctggcagccaccttgagacctcaccgggcctgtgatatttgctctcctgaactctcactcaatcctcttcctctcctctgtggcttttcctgttattgtcccctaatgataggatattccctgctgcctacctggagattcagtaggatcttttgagtggaggtgggtagagagagcaaggagggcaggacacttagcaggcactgagcaagcaggcccccacctgcccttagtgatgtttggagtcgttttaccctcttctattgaattgccttgggatttccttctccctttccctgcccaccctgtcccctacaatttgtgcttctgagttgaggagccttcacctctgttgctgaggaaatggtagaatgctgcctatcacctccagcacaatcccagtgaaaaaggtgtgaagcacccaccatgttcttgaacaatcaggtttctaaataaacaactggaccatcaa

SEQ ID NO: 307021 - DNA, 3043 bp, Homo sapiens
  misc_feature (14)..(14): n is a, c, g, or t
  misc_feature (16)..(16): n is a, c, g, or t
  misc_feature (25)..(25): n is a, c, g, or t
  misc_feature (34)..(34): n is a, c, g, or t
accgtgcagtactntnacggtttanggtagcgangctgggtgggaacgaaagatggcggcggaaacgctgctgtccagtttgttaggactgctgcttctgggactcctgttacccgcaagtctgaccggcggtgtcgggagcctgaacctggaggagctgagtgagatgcgttatgggatcgagatcctgccgttgcctgtcatgggagggcagagccaatcttcggacgtggtgattgtctcctctaagtacaaacagcgctatgagtgtcgcctgccagctggagctattcacttccagcgtgaaagggaggaggaaacacctgcttaccaagggcctgggatccctgagttgttgagcccaatgagagatgctccctgcttgctgaagacaaaggactggtggacatatgaattctgttatggacgccacatccagcaataccacatggaagattcagagatcaaaggtgaagtcctctatctcggctactaccaatcagccttcgactgggatgatgaaacagccaaggcctccaagcagcatcgtcttaaacgctaccacagccagacctatggcaatgggtccaagtgcgaccttaatgggaggccccgggaggccgaggttcggttcctctgtgacgagggtgcaggtatctctggggactacatcgatcgcgtggacgagcccttgtcctgctcttatgtgctgaccattcgcactcctcggctctgcccccaccctctcctccggcccccacccagtgctgcaccgcaggccatcctctgtcacccttccctacagcctgaggagtacatggcctacgttcagaggcaagccggtgagtaattagagaaggaggagaagacggggagatacgggggcagggggtggcaaaagatcaagtattgaatagctggaggaatgtgttcctggcctgcttgcatgctgtttctcagtagactcaaagcagtatggagataaaatcatagaggagctgcaagatctaggcccccaagtgtggagtgagaccaagtctggggtggcaccccaaaagatggcaggtaggaccttgtttcacctgttccgtgaaactcacttccatttcttcccttcccctgatcttactgtcctgactgactggtggggtgggggggggtggaaaagtaccatgggccctcctcccttggtgatagaggaggggaagggaccccatcctatttgctcccttctgtctcacccctcctgtcagatcagtctctccctgttctctgtaccctaggtgcgagcccgaccaaggatgacagtaaggactcagatttctggaagatgcttaatgagccagaggaccaggccccaggaggggaggaggtgccggctgaggagcaggacccaagccctgaggcagcagattcagcttctggtgctcccaatgattttcagaacaacgtgcaggtcaaagtcattcgaagccctgcggatttgattcgattcatagaggagctgaaaggtggaacaaaaaaggggaagccaaatataggccaagagcagcctgtggatgatgctgcagaagtccctcagagggaaccagagaaggaaaggggtgatccagaacggcagagagagatggaagaagaggaggatgaggatgaggatgaggatgaagatgaggatgaacggcagttactgggagaatttgagaaggaactggaagggatcctgcttccgtcagaccgagaccggctccgttcggaggtgaaggctggcatggagcgggaactggaaaacatcatccaggagacagagaaagagctggacccagatgggctgaagaaggagtcagagcgggatcgggcaatgctggctctcacatccactctcaacaaactcatcaaaagactggaggaaaaacagagtccagagctggtgaagaagcacaagaaaaagagggttgtccccaaaaagcctcccccatcaccccaacctacagaggaggatcctgagcacagagtccgggtccgggtcaccaagctccgtctcggaggccctaatcaggatctgactgtcctcgagatgaaacgggaaaacccacagctgaaacaaatcgaggggctggtgaaggagctgctggagagggagggactcacagctgcagggaaaattgagatcaaaattgtccgcccatgggctgaagggactgaagagggtgcacgttggctgactgatgaggacacgagaaacctcaaggagatcttcttcaatatcttggtgccgggagctgaagaggcccagaaggaacgccagcggcagaaagagctggagagcaattaccgccgggtgtggggctctccaggtggggagggcacaggggacctggacgaatttgacttctgagaccaacactacacttgacccttcacggaatccagactcttcctggactggcttgcctcctccccacctccccaccctggaacccctgagggccaaacagcagagtggagctgagctgtggacctctcgggcaactctgtgggtgtgggggccctgggtgaatgctgctgcccctgctggcagccaccttgagacctcaccgggcctgtgatatttgctctcctgaactctcactcaatcctcttcctctcctctgtggcttttcctgttattgtcccctaatgataggatattccctgctgcctacctggagattcagtaggatcttttgagtggaggtgggtagagagagcaaggagggcaggacacttagcaggcactgagcaagcaggcccccacctgcccttagtgatgtttggagtcgttttaccctcttctattgaattgccttgggatttccttctccctttccctgcccaccctgtcccctacaatttgtgcttctgagttgaggagccttcacctctgttgctgaggaaatggtagaatgctgcctatcacctccagcacaatcccagtgaaaaaggtgtgaagcacccaccatgttcttgaacaatcaggtttctaaataaacaactggaccatcaa

SEQ ID NO: 307022 - DNA, 2494 bp, Homo sapiens
  misc_feature (14)..(14): n is a, c, g, or t
  misc_feature (16)..(16): n is a, c, g, or t
  misc_feature (25)..(25): n is a, c, g, or t
  misc_feature (34)..(34): n is a, c, g, or t
accgtgcagtactntnacggtttanggtagcgangctgggtgggaacgaaagatggcggcggaaacgctgctgtccagtttgttaggactgctgcttctgggactcctgttacccgcaagtctgaccggcggtgtcgggagcctgaacctggaggagctgagtgagatgcgttatgggatcgagatcctgccgttgcctgtcatgggagggcagagccaatcttcggacgtggtgattgtctcctctaagtacaaacagcgctatgagtgtcgcctgccagctggagctattcacttccagcgtgaaagggaggaggaaacacctgcttaccaagggcctgggatccctgagttgttgagcccaatgagagatgctccctgcttgctgaagacaaaggactggtggacatatgaattctgttatggacgccacatccagcaataccacatggaagattcagagatcaaaggtgaagtcctctatctcggctactaccaatcagccttcgactgggatgatgaaacagccaaggcctccaagcagcatcgtcttaaacgctaccacagccagacctatggcaatgggtccaagtgcgaccttaatgggaggccccgggaggccgaggttcggttcctctgtgacgagggtgcaggtatctctggggactacatcgatcgcgtggacgagcccttgtcctgctcttatgtgctgaccattcgcactcctcggctctgcccccaccctctcctccggcccccacccagtgctgcaccgcaggccatcctctgtcacccttccctacagcctgaggagtacatggcctacgttcagaggcaagccgactcaaagcagtatggagataaaatcatagaggagctgcaagatctaggcccccaagtgtggagtgagaccaagtctggggtggcaccccaaaagatggcaggtgcgagcccgaccaaggatgacagtaaggactcagatttctggaagatgcttaatgagccagaggaccaggccccaggaggggaggaggtgccggctgaggagcaggacccaagccctgaggcagcagattcagcttctggtgctcccaatgattttcagaacaacgtgcaggtcaaagtcattcgaagccctgcggatttgattcgattcatagaggagctgaaaggtggaacaaaaaaggggaagccaaatataggccaagagcagcctgtggatgatgctgcagaagtccctcagagggaaccagagaaggaaaggggtgatccagaacggcagagagagatggaagaagaggaggatgaggatgaggatgaggatgaagatgaggatgaacggcagttactgggagaatttgagaaggaactggaagggatcctgcttccgtcagaccgagaccggctccgttcggagacagagaaagagctggacccagatgggctgaagaaggagtcagagcgggatcgggcaatgctggctctcacatccactctcaacaaactcatcaaaagactggaggaaaaacagagtccagagctggtgaagaagcacaagaaaaagagggttgtccccaaaaagcctcccccatcaccccaacctacagggaaaattgagatcaaaattgtccgcccatgggctgaagggactgaagagggtgcacgttggctgactgatgaggacacgagaaacctcaaggagatcttcttcaatatcttggtgccgggagctgaagaggcccagaaggaacgccagcggcagaaagagctggagagcaattaccgccgggtgtggggctctccaggtggggagggcacaggggacctggacgaatttgacttctgagaccaacactacacttgacccttcacggaatccagactcttcctggactggcttgcctcctccccacctccccaccctggaacccctgagggccaaacagcagagtggagctgagctgtggacctctcgggcaactctgtgggtgtgggggccctgggtgaatgctgctgcccctgctggcagccaccttgagacctcaccgggcctgtgatatttgctctcctgaactctcactcaatcctcttcctctcctctgtggcttttcctgttattgtcccctaatgataggatattccctgctgcctacctggagattcagtaggatcttttgagtggaggtgggtagagagagcaaggagggcaggacacttagcaggcactgagcaagcaggcccccacctgcccttagtgatgtttggagtcgttttaccctcttctattgaattgccttgggatttccttctccctttccctgcccaccctgtcccctacaatttgtgcttctgagttgaggagccttcacctctgttgctgaggaaatggtagaatgctgcctatcacctccagcacaatcccagtgaaaaaggtgtgaagcacccaccatgttcttgaacaatcaggtttctaaataaacaactggaccatcaa

SEQ ID NO: 307023 - DNA, 2432 bp, Homo sapiens
  misc_feature (14)..(14): n is a, c, g, or t
  misc_feature (16)..(16): n is a, c, g, or t
  misc_feature (25)..(25): n is a, c, g, or t
  misc_feature (34)..(34): n is a, c, g, or t
accgtgcagtactntnacggtttanggtagcgangctgggtgggaacgaaagatggcggcggaaacgctgctgtccagtttgttaggactgctgcttctgggactcctgttacccgcaagtctgaccggcggtgtcgggagcctgaacctggaggagctgagtgagatgcgttatgggatcgagatcctgccgttgcctgtcatgggagggcagagccaatcttcggacgtggtgattgtctcctctaagtacaaacagcgctatgagtgtcgcctgccagctggagctattcacttccagcgtgaaagggaggaggaaacacctgcttaccaagggcctgggatccctgagttgttgagcccaatgagagatgctccctgcttgctgaagacaaaggactggtggacatatgaattctgttatggacgccacatccagcaataccacatggaagattcagagatcaaaggtgaagtcctctatctcggctactaccaatcagccttcgactgggatgatgaaacagccaaggcctccaagcagcatcgtcttaaacgctaccacagccagacctatggcaatgggtccaagtgcgaccttaatgggaggccccgggaggccgaggttcggttcctctgtgacgagggtgcaggtatctctggggactacatcgatcgcgtggacgagcccttgtcctgctcttatgtgctgaccattcgcactcctcggctctgcccccaccctctcctccggcccccacccagtgctgcaccgcaggccatcctctgtcacccttccctacagcctgaggagtacatggcctacgttcagaggcaagccgactcaaagcagtatggagataaaatcatagaggagctgcaagatctaggcccccaagtgtggagtgagaccaagtctggggtggcaccccaaaagatggcaggtgcgagcccgaccaaggatgacagtaaggactcagatttctggaagatgcttaatgagccagaggaccaggccccaggaggggaggaggtgccggctgaggagcaggacccaagccctgaggcagcagattcagcttctggtgctcccaatgattttcagaacaacgtgcaggtcaaagtcattcgaagccctgcggatttgattcgattcatagaggagctgaaaggtggaacaaaaaaggggaagccaaatataggccaagagcagcctgtggatgatgctgcagaagtccctcagagggaaccagagaaggaaaggggtgatccagaacggcagagagagatggaagaagaggaggatgaggatgaggatgaggatgaagatgaggatgaacggcagttactgggagaatttgagaaggaactggaagggatcctgcttccgtcagaccgagaccggctccgttcggaggtgaaggctggcatggagcgggaactggaaaacatcatccaggagacagagaaagagctggacccagatgggctgaagaaggagtcagagcgggatcgggcaatgctggctctcacatccactctcaacaaactcatcaaaagactggaggaaaaacagagtccagagctgtgaagagggtgcacgttggctgactgatgaggacacgagaaacctcaaggagatcttcttcaatatcttggtgccgggagctgaagaggcccagaaggaacgccagcggcagaaagagctggagagcaattaccgccgggtgtggggctctccaggtggggagggcacaggggacctggacgaatttgacttctgagaccaacactacacttgacccttcacggaatccagactcttcctggactggcttgcctcctccccacctccccaccctggaacccctgagggccaaacagcagagtggagctgagctgtggacctctcgggcaactctgtgggtgtgggggccctgggtgaatgctgctgcccctgctggcagccaccttgagacctcaccgggcctgtgatatttgctctcctgaactctcactcaatcctcttcctctcctctgtggcttttcctgttattgtcccctaatgataggatattccctgctgcctacctggagattcagtaggatcttttgagtggaggtgggtagagagagcaaggagggcaggacacttagcaggcactgagcaagcaggcccccacctgcccttagtgatgtttggagtcgttttaccctcttctattgaattgccttgggatttccttctccctttccctgcccaccctgtcccctacaatttgtgcttctgagttgaggagccttcacctctgttgctgaggaaatggtagaatgctgcctatcacctccagcacaatcccagtgaaaaaggtgtgaagcacccaccatgttcttgaacaatcaggtttctaaataaacaactggaccatcaa

SEQ ID NO: 307024 - DNA, 2870 bp, Homo sapiens
  misc_feature (14)..(14): n is a, c, g, or t
  misc_feature (16)..(16): n is a, c, g, or t
  misc_feature (25)..(25): n is a, c, g, or t
  misc_feature (34)..(34): n is a, c, g, or t
accgtgcagtactntnacggtttanggtagcgangctgggtgggaacgaaagatggcggcggaaacgctgctgtccagtttgttaggactgctgcttctgggactcctgttacccgcaagtctgaccggcggtgtcgggagcctgaacctggaggagctgagtgagatgcgttatgggatcgagatcctgccgttgcctgtcatgggagggcagagccaatcttcggacgtggtgattgtctcctctaagtacaaacagcgctatgagtgtcgcctgccagctggagctattcacttccagcgtgaaagggaggaggaaacacctgcttaccaagggcctgggatccctgagttgttgagcccaatgagagatgctccctgcttgctgaagacaaaggactggtggacatatgaattctgttatggacgccacatccagcaataccacatggaagattcagagatcaaaggtgaagtcctctatctcggctactaccaatcagccttcgactgggatgatgaaacagccaaggcctccaagcagcatcgtcttaaacgctaccacagccagacctatggcaatgggtccaagtgcgaccttaatgggaggccccgggaggccgaggttcggttcctctgtgacgagggtgcaggtatctctggggactacatcgatcgcgtggacgagcccttgtcctgctcttatgtgctgaccattcgcactcctcggctctgcccccaccctctcctccggcccccacccagtgctgcaccgcaggccatcctctgtcacccttccctacagcctgaggagtacatggcctacgttcagaggcaagccgactcaaagcagtatggagataaaatcatagaggagctgcaagatctaggcccccaagtgtggagtgagaccaagtctggggtggcaccccaaaagatggcaggtgcgagcccgaccaaggatgacagtaaggactcagatttctggaagatgcttaatgagccagaggaccaggccccaggaggggaggaggtgccggctgaggagcaggacccaagccctgaggcagcagattcagcttctggtgctcccaatgattttcagaacaacgtgcaggtcaaagtcattcgaagccctgcggatttgattcgattcatagaggagctgaaaggtggaacaaaaaaggggaagccaaatataggccaagagcagcctgtggatgatgctgcagaagtccctcagagggaaccagagaaggaaaggggtgatccagaacggcagagagagatggaagaagaggaggatgaggatgaggatgaggatgaagatgaggatgaacggcagttactgggagaatttgagaaggaactggaagggatcctgcttccgtcagaccgagaccggctccgttcggaggtgaaggctggcatggagcgggaactggaaaacatcatccaggagacagagaaagagctggacccagatgggctgaagaaggagtcagagcgggatcgggcaatgctggctctcacatccactctcaacaaactcatcaaaagactggaggaaaaacagagtccagagctggtgaagaagcacaagaaaaagagggttgtccccaaaaagcctcccccatcaccccaacctacagaggaggatcctgagcacagagtccgggtccgggtcaccaagctccgtctcggaggccctaatcaggatctgactgtcctcgagatgaaacgggaaaacccacagctgaaacaaatcgaggggctggtgaaggagctgctggagagggagggactcacagctgcagggaaaattgagatcaaaattgtccgcccatgggctgaagggactgaagagggtgcacgttggctgactgatgaggacacgagaaacctcaaggagatcttcttcaatatcttggtgccgggagctgaagaggcccagaaggaacgccagcggcagaaagagctggagagcaattaccgccgggtgtggggctctccaggtggggagggcacaggggacctggacgaatttgacttctgagaccaacactacacttgacccttcacggaatccagactcttcctggactggcttgcctcctccccacctccccaccctggaacccctgagggccaaacagcagagtggagctgagctgtggacctctcgggcaactctgtgggtgtgggggccctgggtgaatgctgctgcccctgctggcagccaccttgagacctcaccgggcctgtgatatttgctctcctgaactctcactcaatcctcttcctctcctctgtggcttttcctgttattgtcccctaatgataggatattccctgctgcctacctggagattcagtaggatcttttgagtggaggtgggtagagagagcaaggagggcaggacacttagcaggcactgagcaagcaggcccccacctgcccttagtgatgtttggagtcgttttaccctcttctattgaattgccttgggatttccttctccctttccctgcccaccctgtcccctacaatttgtgcttctgagttgaggagccttcacctctgttgctgaggaaatggtagaatgctgcctatcacctccagcacaatcccagtgaaaaaggtgtgaagcacccaccatgttcttgaacaatcaggtttctaaataaacaactggaccatcaaaaaaaaaaaagaaaaaaaatttgtggggcgctcgcccgaaaattttcacacctcgtggggcggcccaagggagagaaatgcccacgggtccaagaacacggcagaaaggtggttccccaaaaagccgggccgcgttggacaccagggctggggtcggccaaaggcg

SEQ ID NO: 307025 - DNA, 2747 bp, Homo sapiens
  misc_feature (14)..(14): n is a, c, g, or t
  misc_feature (16)..(16): n is a, c, g, or t
  misc_feature (25)..(25): n is a, c, g, or t
  misc_feature (34)..(34): n is a, c, g, or t
  misc_feature (2712)..(2712): n is a, c, g, or t
  misc_feature (2715)..(2715): n is a, c, g, or t
accgtgcagtactntnacggtttanggtagcgangctgggtgggaacgaaagatggcggcggaaacgctgctgtccagtttgttaggactgctgcttctgggactcctgttacccgcaagtctgaccggcggtgtcgggagcctgaacctggaggagctgagtgagatgcgttatgggatcgagatcctgccgttgcctgtcatgggagggcagagccaatcttcggacgtggtgattgtctcctctaagtacaaacagcgctatgagtgtcgcctgccagctggagctattcacttccagcgtgaaagggaggaggaaacacctgcttaccaagggcctgggatccctgagttgttgagcccaatgagagatgctccctgcttgctgaagacaaaggactggtggacatatgaattctgttatggacgccacatccagcaataccacatggaagattcagagatcaaaggtgaagtcctctatctcggctactaccaatcagccttcgactgggatgatgaaacagccaaggcctccaagcagcatcgtcttaaacgctaccacagccagacctatggcaatgggtccaagtgcgaccttaatgggaggccccgggaggccgaggttcggttcctctgtgacgagggtgcaggtatctctggggactacatcgatcgcgtggacgagcccttgtcctgctcttatgtgctgaccattcgcactcctcggctctgcccccaccctctcctccggcccccacccagtgctgcaccgcaggccatcctctgtcacccttccctacagcctgaggagtacatggcctacgttcagaggcaagccgactcaaagcagtatggagataaaatcatagaggagctgcaagatctaggcccccaagtgtggagtgagaccaagtctggggtggcaccccaaaagatggcaggtgcgagcccgaccaaggatgacagtaaggactcagatttctggaagatgcttaatgagccagaggaccaggccccaggaggggaggaggtgccggctgaggagcaggacccaagccctgaggcagcagattcagcttctggtgctcccaatgattttcagaacaacgtgcaggtcaaagtcattcgaagccctgcggatttgattcgattcatagaggagctgaaaggtggaacaaaaaaggggaagccaaatataggccaagagcagcctgtggatgatgctgcagaagtccctcagagggaaccagagaaggaaaggggtgatccagaacggcagagagagatggaagaagaggaggatgaggatgaggatgaggatgaagatgaggatgaacggcagttactgggagaatttgagaaggaactggaagggatcctgcttccgtcagaccgagaccggctccgttcggaggtgaaggctggcatggagcgggaactggaaaacatcatccaggagacagagaaagagctggacccagatgggctgaagaaggagtcagagcgggatcgggcaatgctggctctcacatccactctcaacaaactcatcaaaagactggaggaaaaacagagtccagagctggtgaagaagcacaagaaaaagagggttgtccccaaaaagcctcccccatcaccccaacctacagaggaggatcctgagcacagagtccgggtccgggtcaccaagctccgtctcggaggccctaatcaggatctgactgtcctcgagatgaaacgggaaaacccacagctgaaacaaatcgaggggctggtgaaggagctgctggagagggagggactcacagctgcagggaaaattgagatcaaaattgtccgcccatgggctgaagggactgaagagggtgcacgttggctgactgatgaggacacgagaaacctcaaggagatcttcttcaatatcttggtgccgggagctgaagaggcccagaaggaacgccagcggcagaaagagctggagagcaattaccgccgggtgtggggctctccaggtggggagggcacaggggacctggacgaatttgacttctgagaccaacactacacttgacccttcacggaatccagactcttcctggactggcttgcctcctccccacctccccaccctggaacccctgagggccaaacagcagagtggagctgagctgtggacctctcgggcaactctgtgggtgtgggggccctgggtgaatgctgctgcccctgctggcagccaccttgagacctcaccgggcctgtgatatttgctctcctgaactctcactcaatcctcttcctctcctctgtggcttttcctgttattgtcccctaatgataggatattccctgctgcctacctggagattcagtaggatcttttgagtggaggtgggtagagagagcaaggagggcaggacacttagcaggcactgagcaagcaggcccccacctgcccttagtgatgtttggagtcgttttaccctcttctattgaattgccttgggatttccttctccctttccctgcccaccctgtcccctacaatttgtgcttctgagttgaggagccttcacctctgttgctgaggaaatggtagaatgctgcctatcacctccagcacaatcccagtgaaaaaggtgtgaagcacccaccatgttcttgaacaatcaggtttctaaataaacaactggaccatcaaaaaaaaanagncgacgcggccgcgaatttagtagtagtaggcg

SEQ ID NO: 307026 - DNA, 2673 bp, Homo sapiens
  misc_feature (33)..(33): n is a, c, g, or t
  misc_feature (47)..(47): n is a, c, g, or t
  misc_feature (81)..(81): n is a, c, g, or t
  misc_feature (125)..(125): n is a, c, g, or t
tgtgaggtatctagaggatcccggctcccactnggttgctagatctngcagctcctctatgatttatctccatactggttngagtcggcttgctctgaacgtaggccatgtactcctcaggctgnagggaagggtgacagaggatggctgcggtgcagcactgggtgggggccggaggagaggagacaatcaccacgtccgaagattgtctcctctaagtacaaacagcgctatgagtgtcgcctgccagctggagctattcacttccagcgtgaaagggaggaggaaacacctgcttaccaagggcctgggatccctgagttgttgagcccaatgagagatgctccctgcttgctgaagacaaaggactggtggacatatgaattctgttatggacgccacatccagcaataccacatggaagattcagagatcaaaggtgaagtcctctatctcggctactaccaatcagccttcgactgggatgatgaaacagccaaggcctccaagcagcatcgtcttaaacgctaccacagccagacctatggcaatgggtccaagtgcgaccttaatgggaggccccgggaggccgaggttcggttcctctgtgacgagggtgcaggtatctctggggactacatcgatcgcgtggacgagcccttgtcctgctcttatgtgctgaccattcgcactcctcggctctgcccccaccctctcctccggcccccacccagtgctgcaccgcaggccatcctctgtcacccttccctacagcctgaggagtacatggcctacgttcagaggcaagccgactcaaagcagtatggagataaaatcatagaggagctgcaagatctaggcccccaagtgtggagtgagaccaagtctggggtggcaccccaaaagatggcaggtgcgagcccgaccaaggatgacagtaaggactcagatttctggaagatgcttaatgagccagaggaccaggccccaggaggggaggaggtgccggctgaggagcaggacccaagccctgaggcagcagattcagcttctggtgctcccaatgattttcagaacaacgtgcaggtcaaagtcattcgaagccctgcggatttgattcgattcatagaggagctgaaaggtggaacaaaaaaggggaagccaaatataggccaagagcagcctgtggatgatgctgcagaagtccctcagagggaaccagagaaggaaaggggtgatccagaacggcagagagagatggaagaagaggaggatgaggatgaggatgaggatgaagatgaggatgaacggcagttactgggagaatttgagaaggaactggaagggatcctgcttccgtcagaccgagaccggctccgttcggaggtgaaggctggcatggagcgggaactggaaaacatcatccaggagacagagaaagagctggacccagatgggctgaagaaggagtcagagcgggatcgggcaatgctggctctcacatccactctcaacaaactcatcaaaagactggaggaaaaacagagtccagagctggtgaagaagcacaagaaaaagagggttgtccccaaaaagcctcccccatcaccccaacctacagaggaggatcctgagcacagagtccgggtccgggtcaccaagctccgtctcggaggccctaatcaggatctgactgtcctcgagatgaaacgggaaaacccacagctgaaacaaatcgaggggctggtgaaggagctgctggagagggagggactcacagctgcagggaaaattgagatcaaaattgtccgcccatgggctgaagggactgaagagggtgcacgttggctgactgatgaggacacgagaaacctcaaggagatcttcttcaatatcttggtgccgggagctgaagaggcccagaaggaacgccagcggcagaaagagctggagagcaattaccgccgggtgtggggctctccaggtggggagggcacaggggacctggacgaatttgacttctgagaccaacactacacttgacccttcacggaatccagactcttcctggactggcttgcctcctccccacctccccaccctggaacccctgagggccaaacagcagagtggagctgagctgtggacctctcgggcaactctgtgggtgtgggggccctgggtgaatgctgctgcccctgctggcagccaccttgagacctcaccgggcctgtgatatttgctctcctgaactctcactcaatcctcttcctctcctctgtggcttttcctgttattgtcccctaatgataggatattccctgctgcctacctggagattcagtaggatcttttgagtggaggtgggtagagagagcaaggagggcaggacacttagcaggcactgagcaagcaggcccccacctgcccttagtgatgtttggagtcgttttaccctcttctattgaattgccttgggatttccttctccctttccctgcccaccctgtcccctacaatttgtgcttctgagttgaggagccttcacctctgttgctgaggaaatggtagaatgctgcctatcacctccagcacaatcccagtgaaaaaggtgtgaagcacccaccatgttcttgaacaatcaggtttctaaataaacaactggaccatcaa

SEQ ID NO: 307027 - DNA, 2940 bp, Homo sapiens
  misc_feature (14)..(14): n is a, c, g, or t
  misc_feature (16)..(16): n is a, c, g, or t
  misc_feature (25)..(25): n is a, c, g, or t
  misc_feature (34)..(34): n is a, c, g, or t
accgtgcagtactntnacggtttanggtagcgangctgggtgggaacgaaagatggcggcggaaacgctgctgtccagtttgttaggactgctgcttctgggactcctgttacccgcaagtctgaccggcggtgtcgggagcctgaacctggaggagctgagtgagatgcgttatgggatcgagatcctgccgttgcctgtcatgggagggcagagccaatcttcggacgtggtgattgtctcctctaagtacaaacagcgctatgagtgtcgcctgccagctggagctattcacttccagcgtgaaagggaggaggaaacacctgcttaccaagggcctgggatccctgagttgttgagcccaatgagagatgctccctgcttgctgaagacaaaggactggtggacatatgaattctgttatggacgccacatccagcaataccacatggaagattcagagatcaaaggtgaagtcctctatctcggctactaccaatcagccttcgactgggatgatgaaacagccaaggtggcaagagtgtgggattcaggaagaaagggttctggccaccggctgagagccctgacaagaaggggagggtcaagattagctgatctgtttcttggggcttggtggccattaggacaaagtttcctggggcctgggggcacaggccattcttttgtctctttggggacgcagtgccatccttcctctttgctatctttctcatgtcccccattcctgcctcatgtcttctccaggcctccaagcagcatcgtcttaaacgctaccacagccagacctatggcaatgggtccaagtgcgaccttaatgggaggccccgggaggccgaggttcggttcctctgtgacgagggtgcaggtatctctggggactacatcgatcgcgtggacgagcccttgtcctgctcttatgtgctgaccattcgcactcctcggctctgcccccaccctctcctccggcccccacccagtgctgcaccgcaggccatcctctgtcacccttccctacagcctgaggagtacatggcctacgttcagaggcaagccgactcaaagcagtatggagataaaatcatagaggagctgcaagatctaggcccccaagtgtggagtgagaccaagtctggggtggcaccccaaaagatggcaggtgcgagcccgaccaaggatgacagtaaggactcagatttctggaagatgcttaatgagccagaggaccaggccccaggaggggaggaggtgccggctgaggagcaggacccaagccctgaggcagcagattcagcttctggtgctcccaatgattttcagaacaacgtgcaggtcaaagtcattcgaagccctgcggatttgattcgattcatagaggagctgaaaggtggaacaaaaaaggggaagccaaatataggccaagagcagcctgtggatgatgctgcagaagtccctcagagggaaccagagaaggaaaggggtgatccagaacggcagagagagatggaagaagaggaggatgaggatgaggatgaggatgaagatgaggatgaacggcagttactgggagaatttgagaaggaactggaagggatcctgcttccgtcagaccgagaccggctccgttcggaggtgaaggctggcatggagcgggaactggaaaacatcatccaggagacagagaaagagctggacccagatgggctgaagaaggagtcagagcgggatcgggcaatgctggctctcacatccactctcaacaaactcatcaaaagactggaggaaaaacagagtccagagctggtgaagaagcacaagaaaaagagggttgtccccaaaaagcctcccccatcaccccaacctacagaggaggatcctgagcacagagtccgggtccgggtcaccaagctccgtctcggaggccctaatcaggatctgactgtcctcgagatgaaacgggaaaacccacagctgaaacaaatcgaggggctggtgaaggagctgctggagagggagggactcacagctgcagggaaaattgagatcaaaattgtccgcccatgggctgaagggactgaagagggtgcacgttggctgactgatgaggacacgagaaacctcaaggagatcttcttcaatatcttggtgccgggagctgaagaggcccagaaggaacgccagcggcagaaagagctggagagcaattaccgccgggtgtggggctctccaggtggggagggcacaggggacctggacgaatttgacttctgagaccaacactacacttgacccttcacggaatccagactcttcctggactggcttgcctcctccccacctccccaccctggaacccctgagggccaaacagcagagtggagctgagctgtggacctctcgggcaactctgtgggtgtgggggccctgggtgaatgctgctgcccctgctggcagccaccttgagacctcaccgggcctgtgatatttgctctcctgaactctcactcaatcctcttcctctcctctgtggcttttcctgttattgtcccctaatgataggatattccctgctgcctacctggagattcagtaggatcttttgagtggaggtgggtagagagagcaaggagggcaggacacttagcaggcactgagcaagcaggcccccacctgcccttagtgatgtttggagtcgttttaccctcttctattgaattgccttgggatttccttctccctttccctgcccaccctgtcccctacaatttgtgcttctgagttgaggagccttcacctctgttgctgaggaaatggtagaatgctgcctatcacctccagcacaatcccagtgaaaaaggtgtgaagcacccaccatgttcttgaacaatcaggtttctaaataaacaactggaccatcaa

SEQ ID NO: 307028 - DNA, 2605 bp, Homo sapiens
  misc_feature (14)..(14): n is a, c, g, or t
  misc_feature (16)..(16): n is a, c, g, or t
  misc_feature (25)..(25): n is a, c, g, or t
  misc_feature (34)..(34): n is a, c, g, or t
accgtgcagtactntnacggtttanggtagcgangctgggtgggaacgaaagatggcggcggaaacgctgctgtccagtttgttaggactgctgcttctgggactcctgttacccgcaagtctgaccggcggtgtcgggagcctgaacctggaggagctgagtgagatgcgttatgggatcgagatcctgccgttgcctgtcatgggagggcagagccaatcttcggacgtggtgattgtctcctctaagtacaaacagcgctatgagtgtcgcctgccagctggagctattcacttccagcgtgaaagggaggaggaaacacctgcttaccaagggcctgggatccctgagttgttgagcccaatgagagatgctccctgcttgctgaagacaaaggactggtggacatatgaattctgttatggacgccacatccagcaataccacatggaagattcagagatcaaaggtgaagtcctctatctcggctactaccaatcagccttcgactgggatgatgaaacagccaagttcctctgtgacgagggtgcaggtatctctggggactacatcgatcgcgtggacgagcccttgtcctgctcttatgtgctgaccattcgcactcctcggctctgcccccaccctctcctccggcccccacccagtgctgcaccgcaggccatcctctgtcacccttccctacagcctgaggagtacatggcctacgttcagaggcaagccgactcaaagcagtatggagataaaatcatagaggagctgcaagatctaggcccccaagtgtggagtgagaccaagtctggggtggcaccccaaaagatggcaggtgcgagcccgaccaaggatgacagtaaggactcagatttctggaagatgcttaatgagccagaggaccaggccccaggaggggaggaggtgccggctgaggagcaggacccaagccctgaggcagcagattcagcttctggtgctcccaatgattttcagaacaacgtgcaggtcaaagtcattcgaagccctgcggatttgattcgattcatagaggagctgaaaggtggaacaaaaaaggggaagccaaatataggccaagagcagcctgtggatgatgctgcagaagtccctcagagggaaccagagaaggaaaggggtgatccagaacggcagagagagatggaagaagaggaggatgaggatgaggatgaggatgaagatgaggatgaacggcagttactgggagaatttgagaaggaactggaagggatcctgcttccgtcagaccgagaccggctccgttcggaggtgaaggctggcatggagcgggaactggaaaacatcatccaggagacagagaaagagctggacccagatgggctgaagaaggagtcagagcgggatcgggcaatgctggctctcacatccactctcaacaaactcatcaaaagactggaggaaaaacagagtccagagctggtgaagaagcacaagaaaaagagggttgtccccaaaaagcctcccccatcaccccaacctacagaggaggatcctgagcacagagtccgggtccgggtcaccaagctccgtctcggaggccctaatcaggatctgactgtcctcgagatgaaacgggaaaacccacagctgaaacaaatcgaggggctggtgaaggagctgctggagagggagggactcacagctgcagggaaaattgagatcaaaattgtccgcccatgggctgaagggactgaagagggtgcacgttggctgactgatgaggacacgagaaacctcaaggagatcttcttcaatatcttggtgccgggagctgaagaggcccagaaggaacgccagcggcagaaagagctggagagcaattaccgccgggtgtggggctctccaggtggggagggcacaggggacctggacgaatttgacttctgagaccaacactacacttgacccttcacggaatccagactcttcctggactggcttgcctcctccccacctccccaccctggaacccctgagggccaaacagcagagtggagctgagctgtggacctctcgggcaactctgtgggtgtgggggccctgggtgaatgctgctgcccctgctggcagccaccttgagacctcaccgggcctgtgatatttgctctcctgaactctcactcaatcctcttcctctcctctgtggcttttcctgttattgtcccctaatgataggatattccctgctgcctacctggagattcagtaggatcttttgagtggaggtgggtagagagagcaaggagggcaggacacttagcaggcactgagcaagcaggcccccacctgcccttagtgatgtttggagtcgttttaccctcttctattgaattgccttgggatttccttctccctttccctgcccaccctgtcccctacaatttgtgcttctgagttgaggagccttcacctctgttgctgaggaaatggtagaatgctgcctatcacctccagcacaatcccagtgaaaaaggtgtgaagcacccaccatgttcttgaacaatcaggtttctaaataaacaactggaccatcaa

SEQ ID NO: 307029 - DNA, 2572 bp, Homo sapiens
gttggcctactggaaaaataaaaaaaaaaggagaaaaaaaaaaaaaaaaaaaaaaaaaaaaaaaaaaaaaaaaaaaaaaaggagggggaacgaaagatggcggcggaaacgctgctgtccagtttgttaggactgctgcttctgggactcctgttacccgcaagtctgaccggcggtgtcgggagcctgaacctggaggagctgagtgagatgcgttatgggatcgagatcctgccgttgcctgtcatgggagggcagagccaatcttcggacgtggtgattgtctcctctaagtacaaacagcgctatgagtgtcgcctgccagctggagctattcacttccagcgtgaaagggaggaggaaacacctgcttaccaagggcctgggatccctgagttgttgagcccaatgagagatgctccctgcttgctgaagacaaaggactggtggacatatgaattctgttatggacgccacatccagcaataccacatggaagttcctctgtgacgagggtgcaggtatctctggggactacatcgatcgcgtggacgagcccttgtcctgctcttatgtgctgaccattcgcactcctcggctctgcccccaccctctcctccggcccccacccagtgctgcaccgcaggccatcctctgtcacccttccctacagcctgaggagtacatggcctacgttcagaggcaagccgactcaaagcagtatggagataaaatcatagaggagctgcaagatctaggcccccaagtgtggagtgagaccaagtctggggtggcaccccaaaagatggcaggtgcgagcccgaccaaggatgacagtaaggactcagatttctggaagatgcttaatgagccagaggaccaggccccaggaggggaggaggtgccggctgaggagcaggacccaagccctgaggcagcagattcagcttctggtgctcccaatgattttcagaacaacgtgcaggtcaaagtcattcgaagccctgcggatttgattcgattcatagaggagctgaaaggtggaacaaaaaaggggaagccaaatataggccaagagcagcctgtggatgatgctgcagaagtccctcagagggaaccagagaaggaaaggggtgatccagaacggcagagagagatggaagaagaggaggatgaggatgaggatgaggatgaagatgaggatgaacggcagttactgggagaatttgagaaggaactggaagggatcctgcttccgtcagaccgagaccggctccgttcggaggtgaaggctggcatggagcgggaactggaaaacatcatccaggagacagagaaagagctggacccagatgggctgaagaaggagtcagagcgggatcgggcaatgctggctctcacatccactctcaacaaactcatcaaaagactggaggaaaaacagagtccagagctggtgaagaagcacaagaaaaagagggttgtccccaaaaagcctcccccatcaccccaacctacagaggaggatcctgagcacagagtccgggtccgggtcaccaagctccgtctcggaggccctaatcaggatctgactgtcctcgagatgaaacgggaaaacccacagctgaaacaaatcgaggggctggtgaaggagctgctggagagggagggactcacagctgcagggaaaattgagatcaaaattgtccgcccatgggctgaagggactgaagagggtgcacgttggctgactgatgaggacacgagaaacctcaaggagatcttcttcaatatcttggtgccgggagctgaagaggcccagaaggaacgccagcggcagaaagagctggagagcaattaccgccgggtgtggggctctccaggtggggagggcacaggggacctggacgaatttgacttctgagaccaacactacacttgacccttcacggaatccagactcttcctggactggcttgcctcctccccacctccccaccctggaacccctgagggccaaacagcagagtggagctgagctgtggacctctcgggcaactctgtgggtgtgggggccctgggtgaatgctgctgcccctgctggcagccaccttgagacctcaccgggcctgtgatatttgctctcctgaactctcactcaatcctcttcctctcctctgtggcttttcctgttattgtcccctaatgataggatattccctgctgcctacctggagattcagtaggatcttttgagtggaggtgggtagagagagcaaggagggcaggacacttagcaggcactgagcaagcaggcccccacctgcccttagtgatgtttggagtcgttttaccctcttctattgaattgccttgggatttccttctccctttccctgcccaccctgtcccctacaatttgtgcttctgagttgaggagccttcacctctgttgctgaggaaatggtagaatgctgcctatcacctccagcacaatcccagtgaaaaaggtgtgaagcacccaccatgttcttgaacaatcaggtttctaaataaacaactggaccatcaa

SEQ ID NO: 307030 - DNA, 2283 bp, Homo sapiens
gttggcctactggaaaaataaaaaaaaaaggagaaaaaaaaaaaaaaaaaaaaaaaaaaaaaaaaaaaaaaaaaaaaaaaggagggggaacgaaagatggcggcggaaacgctgctgtccagtttgttaggactgctgcttctgggactcctgttacccgcaagtctgaccggcggtgtcgggagcctgaacctggaggagctgagtgagatgcgttatgggatcgagatcctgccgttgcctgtcatgggagggcagagccaatcttcggacgtggtgattgtctcctctaagtacaaacagcgctatgagtgcccccaccctctcctccggcccccacccagtgctgcaccgcaggccatcctctgtcacccttccctacagcctgaggagtacatggcctacgttcagaggcaagccgactcaaagcagtatggagataaaatcatagaggagctgcaagatctaggcccccaagtgtggagtgagaccaagtctggggtggcaccccaaaagatggcaggtgcgagcccgaccaaggatgacagtaaggactcagatttctggaagatgcttaatgagccagaggaccaggccccaggaggggaggaggtgccggctgaggagcaggacccaagccctgaggcagcagattcagcttctggtgctcccaatgattttcagaacaacgtgcaggtcaaagtcattcgaagccctgcggatttgattcgattcatagaggagctgaaaggtggaacaaaaaaggggaagccaaatataggccaagagcagcctgtggatgatgctgcagaagtccctcagagggaaccagagaaggaaaggggtgatccagaacggcagagagagatggaagaagaggaggatgaggatgaggatgaggatgaagatgaggatgaacggcagttactgggagaatttgagaaggaactggaagggatcctgcttccgtcagaccgagaccggctccgttcggaggtgaaggctggcatggagcgggaactggaaaacatcatccaggagacagagaaagagctggacccagatgggctgaagaaggagtcagagcgggatcgggcaatgctggctctcacatccactctcaacaaactcatcaaaagactggaggaaaaacagagtccagagctggtgaagaagcacaagaaaaagagggttgtccccaaaaagcctcccccatcaccccaacctacagaggaggatcctgagcacagagtccgggtccgggtcaccaagctccgtctcggaggccctaatcaggatctgactgtcctcgagatgaaacgggaaaacccacagctgaaacaaatcgaggggctggtgaaggagctgctggagagggagggactcacagctgcagggaaaattgagatcaaaattgtccgcccatgggctgaagggactgaagagggtgcacgttggctgactgatgaggacacgagaaacctcaaggagatcttcttcaatatcttggtgccgggagctgaagaggcccagaaggaacgccagcggcagaaagagctggagagcaattaccgccgggtgtggggctctccaggtggggagggcacaggggacctggacgaatttgacttctgagaccaacactacacttgacccttcacggaatccagactcttcctggactggcttgcctcctccccacctccccaccctggaacccctgagggccaaacagcagagtggagctgagctgtggacctctcgggcaactctgtgggtgtgggggccctgggtgaatgctgctgcccctgctggcagccaccttgagacctcaccgggcctgtgatatttgctctcctgaactctcactcaatcctcttcctctcctctgtggcttttcctgttattgtcccctaatgataggatattccctgctgcctacctggagattcagtaggatcttttgagtggaggtgggtagagagagcaaggagggcaggacacttagcaggcactgagcaagcaggcccccacctgcccttagtgatgtttggagtcgttttaccctcttctattgaattgccttgggatttccttctccctttccctgcccaccctgtcccctacaatttgtgcttctgagttgaggagccttcacctctgttgctgaggaaatggtagaatgctgcctatcacctccagcacaatcccagtgaaaaaggtgtgaagcacccaccatgttcttgaacaatcaggtttctaaataaacaactggaccatcaa

SEQ ID NO: 307031 - DNA, 3298 bp, Homo sapiens
  misc_feature (14)..(14): n is a, c, g, or t
  misc_feature (16)..(16): n is a, c, g, or t
  misc_feature (25)..(25): n is a, c, g, or t
  misc_feature (34)..(34): n is a, c, g, or t
accgtgcagtactntnacggtttanggtagcgangctgggtgggaacgaaagatggcggcggaaacgctgctgtccagtttgttaggactgctgcttctgggactcctgttacccgcaagtctgaccggcggtgtcgggagcctgaacctggaggagctgagtgagatgcgttatgggatcgagatcctgccgttgcctgtcatgggagggcagagccaatcttcggacgtggtgattgtctcctctaagtacaaacagcgctatgagtgtcgcctgccagctggagctattcacttccagcgtgaaagggaggaggaaacacctgcttaccaagggcctgggatccctgagttgttgagcccaatgagagatgctccctgcttgctgaagggaggaatggaaagaccacaagtggaaaacagactttagagatatctctccaagtcacagaaggaaagcagccctccctccttactgaaagtctggagaattgagagtggaagtgaagggaagagaattgagtgtgtaagtagatgagaggttatgtgtcttggagccaggagactctggttccaagaaaagatgtctgcactccatccccctgattgtttattttttaattgtcagacaaaggactggtggacatatgaattctgttatggacgccacatccagcaataccacatggaagattcagagatcaaaggtgaagtcctctatctcggctactaccaatcagccttcgactgggatgatgaaacagccaaggtggcaagagtgtgggattcaggaagaaagggttctggccaccggctgagagccctgacaagaaggggagggtcaagattagctgatctgtttcttggggcttggtggccattaggacaaagtttcctggggcctgggggcacaggccattcttttgtctctttggggacgcagtgccatccttcctctttgctatctttctcatgtcccccattcctgcctcatgtcttctccaggcctccaagcagcatcgtcttaaacgctaccacagccagacctatggcaatgggtccaagtgcgaccttaatgggaggccccgggaggccgaggttcggttcctctgtgacgagggtgcaggtatctctggggactacatcgatcgcgtggacgagcccttgtcctgctcttatgtgctgaccattcgcactcctcggctctgcccccaccctctcctccggcccccacccagtgctgcaccgcaggccatcctctgtcacccttccctacagcctgaggagtacatggcctacgttcagaggcaagccggtgagtaattagagaaggaggagaagacggggagatacgggggcagggggtggcaaaagatcaagtattgaatagctggaggaatgtgttcctggcctgcttgcatgctgtttctcagtagactcaaagcagtatggagataaaatcatagaggagctgcaagatctaggcccccaagtgtggagtgagaccaagtctggggtggcaccccaaaagatggcaggtgcgagcccgaccaaggatgacagtaaggactcagatttctggaagatgcttaatgagccagaggaccaggccccaggaggggaggaggtgccggctgaggagcaggacccaagccctgaggcagcagattcagcttctggtgctcccaatgattttcagaacaacgtgcaggtcaaagtcattcgaagccctgcggatttgattcgattcatagaggagctgaaaggtggaacaaaaaaggggaagccaaatataggccaagagcagcctgtggatgatgctgcagaagtccctcagagggaaccagagaaggaaaggggtgatccagaacggcagagagagatggaagaagaggaggatgaggatgaggatgaggatgaagatgaggatgaacggcagttactgggagaatttgagaaggaactggaagggatcctgcttccgtcagaccgagaccggctccgttcggaggtgaaggctggcatggagcgggaactggaaaacatcatccaggagacagagaaagagctggacccagatgggctgaagaaggagtcagagcgggatcgggcaatgctggctctcacatccactctcaacaaactcatcaaaagactggaggaaaaacagagtccagagctggtgaagaagcacaagaaaaagagggttgtccccaaaaagcctcccccatcaccccaacctacagaggaggatcctgagcacagagtccgggtccgggtcaccaagctccgtctcggaggccctaatcaggatctgactgtcctcgagatgaaacgggaaaacccacagctgaaacaaatcgaggggctggtgaaggagctgctggagagggagggactcacagctgcagggaaaattgagatcaaaattgtccgcccatgggctgaagggactgaagagggtgcacgttggctgactgatgaggacacgagaaacctcaaggagatcttcttcaatatcttggtgccgggagctgaagaggcccagaaggaacgccagcggcagaaagagctggagagcaattaccgccgggtgtggggctctccaggtggggagggcacaggggacctggacgaatttgacttctgagaccaacactacacttgacccttcacggaatccagactcttcctggactggcttgcctcctccccacctccccaccctggaacccctgagggccaaacagcagagtggagctgagctgtggacctctcgggcaactctgtgggtgtgggggccctgggtgaatgctgctgcccctgctggcagccaccttgagacctcaccgggcctgtgatatttgctctcctgaactctcactcaatcctcttcctctcctctgtggcttttcctgttattgtcccctaatgataggatattccctgctgcctacctggagattcagtaggatcttttgagtggaggtgggtagagagagcaaggagggcaggacacttagcaggcactgagcaagcaggcccccacctgcccttagtgatgtttggagtcgttttaccctcttctattgaattgccttgggatttccttctccctttccctgcccaccctgtcccctacaatttgtgcttctgagttgaggagccttcacctctgttgctgaggaaatggtagaatgctgcctatcacctccagcacaatcccagtgaaaaaggtgtgaagcacccaccatgttcttgaacaatcaggtttctaaataaacaactggaccatcaa

SEQ ID NO: 307032 - DNA, 2135 bp, Homo sapiens
  misc_feature (14)..(14): n is a, c, g, or t
  misc_feature (16)..(16): n is a, c, g, or t
  misc_feature (25)..(25): n is a, c, g, or t
  misc_feature (34)..(34): n is a, c, g, or t
accgtgcagtactntnacggtttanggtagcgangctgggtgggaacgaaagatggcggcggaaacgctgctgtccagtttgttaggactgctgcttctgggactcctgttacccgcaagtctgaccggcggtgtcgggagcctgaacctggaggagctgagtgagatgcgttatgggatcgagatcctgccgttgcctgtcatgggagggcagagccaatcttcggacgtggtgattgtctcctctaagtacaaacagcgctatgagtgtcgcctgccagctggagctattcacttccagcgtgaaagggaggaggaaacacctgcttaccaagggcctgggatccctgagttgttgagcccaatgagagatgctccctgcttgctgaagacaaaggactggtggacatatgaattctgttatggacgccacatccagcaataccacatggaagattcagagatcaaaggtgaagtcctctatctcggctactaccaatcagccttcgactgggatgatgaaacagccaaggcctccaagcagcatcgtcttaaacgctaccacagccagacctatggcaatgggtccaagtgcgaccttaatgggaggccccgggaggccgaggttcggttcctctgtgacgagggtgcaggtatctctggggactacatcgatcgcgtggacgagcccttgtcctgctcttatgtgctgaccattcgcactcctcggctctgcccccaccctctcctccggcccccacccagtgctgcaccgcaggccatcctctgtcacccttccctacagcctgaggagtacatggcctacgttcagaggcaagccgactcaaagcagtatggagataaaatcatagaggagctgcaagatctaggcccccaagtgtggagtgagaccaagtctggggtggcaccccaaaagatggcaggtgcgagcccgaccaaggatgacagtaaggactcagatttctggaagatgcttaatgagccagaggaccaggccccaggaggggaggaggtgccggctgaggagcaggacccaagccctgaggcagcagattcagcttctggtgctcccaatgattttcagaacaacgtgcaggtcaaagtcattcgaagccctgcggatttgattcgattcatagaggagctgaaaggtggaacaaaaaaggggaagccaaatataggccaagagcagcctgtggatgatgctgcagaagtccctcagagggaaccagagaaggaaaggggtgatccagaacggcagagagagatggaagaagaggaggatgaggatgaggatgaggatgaagatgaggatgaacggcagttactgggagaatttgagaaggaactggaagggatcctgcttccgtcagaccgagaccggctccgttcggaggtgaaggctggcatggagcgggaactggaaaacatcatccaggagacagagaaagagctggacccagatgggctgaagaaggagtcagagcgggatcgggcaatgctggctctcacatccactctcaacaaactcatcaaaagactggaggaaaaacagagtccagagctggtgaagaagcacaagaaaaagagggttgtccccaaaaagcctcccccatcaccccaacctacagaggaggatcctgagcacagagtccgggtccgggtcaccaagctccgtctcggaggccctaatcaggatctgactgtcctcgagatgaaacgggaaaacccacagctgaaacaaatcgaggggctggtgaaggagctgctggagagggagggactcacagctgcagggaaaattgagatcaaaattgtccgcccatgggctgaagggactgaagagggtgcacgttggctgactgatgaggacacgagaaacctcaaggagatcttcttcaatatcttggtgccgggagctgaagaggcccagaaggaacgccagcggcagaaagagctggagagcaattaccgccgggtgtggggctctccaggtggggagggcacaggggacctggacgaatttgacttctgagaccaacactacacttgaccctccgtcactcgcgataccatatttccacgttcggggtttcctacagagaccagtatac

SEQ ID NO: 307033 - DNA, 2077 bp, Homo sapiens
  misc_feature (14)..(14): n is a, c, g, or t
  misc_feature (16)..(16): n is a, c, g, or t
  misc_feature (25)..(25): n is a, c, g, or t
  misc_feature (34)..(34): n is a, c, g, or t
accgtgcagtactntnacggtttanggtagcgangctgggtgggaacgaaagatggcggcggaaacgctgctgtccagtttgttaggactgctgcttctgggactcctgttacccgcaagtctgaccggcggtgtcgggagcctgaacctggaggagctgagtgagatgcgttatgggatcgagatcctgccgttgcctgtcatgggagggcagagccaatcttcggacgtggtgattgtctcctctaagtacaaacagcgctatgagtgtcgcctgccagctggagctattcacttccagcgtgaaagggaggaggaaacacctgcttaccaagggcctgggatccctgagttgttgagcccaatgagagatgctccctgcttgctgaagacaaaggactggtggacatatgaattctgttatggacgccacatccagcaataccacatggaagattcagagatcaaaggtgaagtcctctatctcggctactaccaatcagccttcgactgggatgatgaaacagccaaggcctccaagcagcatcgtcttaaacgctaccacagccagacctatggcaatgggtccaagtgcgaccttaatgggaggccccgggaggccgaggttcggttcctctgtgacgagggtgcaggtatctctggggactacatcgatcgcgtggacgagcccttgtcctgctcttatgtgctgaccattcgcactcctcggctctgcccccaccctctcctccggcccccacccagtgctgcaccgcaggccatcctctgtcacccttccctacagcctgaggagtacatggcctacgttcagaggcaagccgactcaaagcagtatggagataaaatcatagaggagctgcaagatctaggcccccaagtgtggagtgagaccaagtctggggtggcaccccaaaagatggcaggtgcgagcccgaccaaggatgacagtaaggactcagatttctggaagatgcttaatgagccagaggaccaggccccaggaggggaggaggtgccggctgaggagcaggacccaagccctgaggcagcagattcagcttctggtgctcccaatgattttcagaacaacgtgcaggtcaaagtcattcgaagccctgcggatttgattcgattcatagaggagctgaaaggtggaacaaaaaaggggaagccaaatataggccaagagcagcctgtggatgatgctgcagaagtccctcagagggaaccagagaaggaaaggggtgatccagaacggcagagagagatggaagaagaggaggatgaggatgaggatgaggatgaagatgaggatgaacggcagttactgggagaatttgagaaggaactggaagggatcctgcttccgtcagaccgagaccggctccgttcggaggtgaaggctggcatggagcgggaactggaaaacatcatccaggagacagagaaagagctggacccagatgggctgaagaaggagtcagagcgggatcgggcaatgctggctctcacatccactctcaacaaactcatcaaaagactggaggaaaaacagagtccagagctggtgaagaagcacaagaaaaagagggttgtccccaaaaagcctcccccatcaccccaacctacagaggaggatcctgagcacagagtccgggtccgggtcaccaagctccgtctcggaggccctaatcaggatctgactgtcctcgagatgaaacgggaaaacccacagctgaaacaaatcgaggggctggtgaaggagctgctggagagggagggactcacagctgcagggaaaattgagatcaaaattgtccgcccatgggctgaagggactgaagaggtgatcttctagaagatcacctcatcgtgctggagagggtgtgggttgaaatgttaaatataatgatcagggtaaacttcattgagaaggtgataatcaaggaaagatctggagttggtaagagaatggccttgtggatttctgagaaaagaaatagcaaggatgccagtgtggttggatatgggcaggggtcaagtagaaggagggagg

SEQ ID NO: 307034 - DNA, 1774 bp, Homo sapiens
  misc_feature (14)..(14): n is a, c, g, or t
  misc_feature (16)..(16): n is a, c, g, or t
  misc_feature (25)..(25): n is a, c, g, or t
  misc_feature (34)..(34): n is a, c, g, or t
  misc_feature (1753)..(1753): n is a, c, g, or t
  misc_feature (1760)..(1760): n is a, c, g, or t
accgtgcagtactntnacggtttanggtagcgangctgggtgggaacgaaagatggcggcggaaacgctgctgtccagtttgttaggactgctgcttctgggactcctgttacccgcaagtctgaccggcggtgtcgggagcctgaacctggaggagctgagtgagatgcgttatgggatcgagatcctgccgttgcctgtcatgggagggcagagccaatcttcggacgtggtgattgtctcctctaagtacaaacagcgctatgagtgtcgcctgccagctggagctattcacttccagcgtgaaagggaggaggaaacacctgcttaccaagggcctgggatccctgagttgttgagcccaatgagagatgctccctgcttgctgaagacaaaggactggtggacatatgaattctgttatggacgccacatccagcaataccacatggaagattcagagatcaaaggtgaagtcctctatctcggctactaccaatcagccttcgactgggatgatgaaacagccaaggcctccaagcagcatcgtcttaaacgctaccacagccagacctatggcaatgggtccaagtgcgaccttaatgggaggccccgggaggccgaggttcggttcctctgtgacgagggtgcaggtatctctggggactacatcgatcgcgtggacgagcccttgtcctgctcttatgtgctgaccattcgcactcctcggctctgcccccaccctctcctccggcccccacccagtgctgcaccgcaggccatcctctgtcacccttccctacagcctgaggagtacatggcctacgttcagaggcaagccgactcaaagcagtatggagataaaatcatagaggagctgcaagatctaggcccccaagtgtggagtgagaccaagtctggggtggcaccccaaaagatggcaggtgcgagcccgaccaaggatgacagtaaggactcagatttctggaagatgcttaatgagccagaggaccaggccccaggaggggaggaggtgccggctgaggagcaggacccaagccctgaggcagcagattcagcttctggtgctcccaatgattttcagaacaacgtgcaggtcaaagtcattcgaagccctgcggatttgattcgattcatagaggagctgaaaggtggaacaaaaaaggggaagccaaatataggccaagagcagcctgtggatgatgctgcagaagtccctcagagggaaccagagaaggaaaggggtgatccagaacggcagagagagatggaagaagaggaggatgaggatgaggatgaggatgaagatgaggatgaacggcagttactgggagaatttgagaaggaactggaagggatcctgcttccgtcagaccgagaccggctccgttcggaggtgaaggctggcatggagcgggaactggaaaacatcatccaggagacagagaaagagctggacccagatgggctgaagaaggagtcagagcgggatcgggcaatgctggctctcacatccactctcaacaaactcatcaaaagactggaggaaaaacagagtccagagctggtgaagaagcacaagaaaaagagggttgtccccaaaaagcctcccccatcaccccaacctacagaggaggatcctgagcacagagtccgggtccgggtcaccaagctccgtctcggaggccctaatcaggatctgactgtcctcgagatgaaacgggtgacggtnccgagtnagggatcctctaga

SEQ ID NO: 307035 - DNA, 1870 bp, Homo sapiens
  misc_feature (14)..(14): n is a, c, g, or t
  misc_feature (16)..(16): n is a, c, g, or t
  misc_feature (25)..(25): n is a, c, g, or t
  misc_feature (34)..(34): n is a, c, g, or t
accgtgcagtactntnacggtttanggtagcgangctgggtgggaacgaaagatggcggcggaaacgctgctgtccagtttgttaggactgctgcttctgggactcctgttacccgcaagtctgaccggcggtgtcgggagcctgaacctggaggagctgagtgagatgcgttatgggatcgagatcctgccgttgcctgtcatgggagggcagagccaatcttcggacgtggtgattgtctcctctaagtacaaacagcgctatgagtgtcgcctgccagctggagctattcacttccagcgtgaaagggaggaggaaacacctgcttaccaagggcctgggatccctgagttgttgagcccaatgagagatgctccctgcttgctgaagacaaaggactggtggacatatgaattctgttatggacgccacatccagcaataccacatggaagattcagagatcaaaggtgaagtcctctatctcggctactaccaatcagccttcgactgggatgatgaaacagccaaggcctccaagcagcatcgtcttaaacgctaccacagccagacctatggcaatgggtccaagtgcgaccttaatgggaggccccgggaggccgaggttcggttcctctgtgacgagggtgcaggtatctctggggactacatcgatcgcgtggacgagcccttgtcctgctcttatgtgctgaccattcgcactcctcggctctgcccccaccctctcctccggcccccacccagtgctgcaccgcaggccatcctctgtcacccttccctacagcctgaggagtacatggcctacgttcagaggcaagccgactcaaagcagtatggagataaaatcatagaggagctgcaagatctaggcccccaagtgtggagtgagaccaagtctggggtggcaccccaaaagatggcaggtgcgagcccgaccaaggatgacagtaaggactcagatttctggaagatgcttaatgagccagaggaccaggccccaggaggggaggaggtgccggctgaggagcaggacccaagccctgaggcagcagattcagcttctggtgctcccaatgattttcagaacaacgtgcaggtcaaagtcattcgaagccctgcggatttgattcgattcatagaggagctgaaaggtggaacaaaaaaggggaagccaaatataggccaagagcagcctgtggatgatgctgcagaagtccctcagagggaaccagagaaggaaaggggtgatccagaacggcagagagagatggaagaagaggaggatgaggatgaggatgaggatgaagatgaggatgaacggcagttactgggagaatttgagaaggaactggaagggatcctgcttccgtcagaccgagaccggctccgttcggaggtgaaggctggcatggagcgggaactggaaaacatcatccaggagacagagaaagagctggacccagatgggctgaagaaggagtcagagcgggatcgggcaatgctggctctcacatccactctcaacaaactcatcaaaagactggaggaaaaacagagtccagagctggtgaagaagcacaagaaaaagagggttgtccccaaaaagcttaggccagaaaagagccatctcaaatagaagagtgaatggaagatataaaggaggttaaatttctgtacaattataatgaccttcatgatgactgcaatccaacatgtaagaataagtattaactaataaacatggttgtatgcaggggaatgcatagtgtgagggggttatgtacccaggcccatatatgttatgcgttacagttagaaggaatgacatatgtccacttaaacaaggggg

SEQ ID NO: 307036 - DNA, 1429 bp, Homo sapiens
cgcgcggccccctccagcaaaggtaagttcacatcctggaaacagtaaatgtgaccttacttaggaaaaggacttttgcagatataattaaattaaagatctcaagatgggagagcatcctggattatccaggtggagtgaggtgaaggctggcatggagcgggaactggaaaacatcatccaggagacagagaaagagctggacccagatgggctgaagaaggagtcagagcgggatcgggcaatgctggctctcacatccactctcaacaaactcatcaaaagactggaggaaaaacagagtccagagctggtgaagaagcacaagaaaaagagggttgtccccaaaaagcctcccccatcaccccaacctacagaggaggatcctgagcacagagtccgggtccgggtcaccaagctccgtctcggaggccctaatcaggatctgactgtcctcgagatgaaacgggaaaacccacagctgaaacaaatcgaggggctggtgaaggagctgctggagagggagggactcacagctgcagggaaaattgagatcaaaattgtccgcccatgggctgaagggactgaagagggtgcacgttggctgactgatgaggacacgagaaacctcaaggagatcttcttcaatatcttggtgccgggagctgaagaggcccagaaggaacgccagcggcagaaagagctggagagcaattaccgccgggtgtggggctctccaggtggggagggcacaggggacctggacgaatttgacttctgagaccaacactacacttgacccttcacggaatccagactcttcctggactggcttgcctcctccccacctccccaccctggaacccctgagggccaaacagcagagtggagctgagctgtggacctctcgggcaactctgtgggtgtgggggccctgggtgaatgctgctgcccctgctggcagccaccttgagacctcaccgggcctgtgatatttgctctcctgaactctcactcaatcctcttcctctcctctgtggcttttcctgttattgtcccctaatgataggatattccctgctgcctacctggagattcagtaggatcttttgagtggaggtgggtagagagagcaaggagggcaggacacttagcaggcactgagcaagcaggcccccacctgcccttagtgatgtttggagtcgttttaccctcttctattgaattgccttgggatttccttctccctttccctgcccaccctgtcccctacaatttgtgcttctgagttgaggagccttcacctctgttgctgaggaaatggtagaatgctgcctatcacctccagcacaatcccagtgaaaaaggtgtgaagcacccaccatgttcttgaacaatcaggtttctaaataaacaactggaccatcaa

SEQ ID NO: 307037 - DNA, 1576 bp, Homo sapiens
  misc_feature (14)..(14): n is a, c, g, or t
  misc_feature (16)..(16): n is a, c, g, or t
  misc_feature (25)..(25): n is a, c, g, or t
  misc_feature (34)..(34): n is a, c, g, or t
accgtgcagtactntnacggtttanggtagcgangctgggtgggaacgaaagatggcggcggaaacgctgctgtccagtttgttaggactgctgcttctgggactcctgttacccgcaagtctgaccggcggtgtcgggagcctgaacctggaggagctgagtgagatgcgttatgggatcgagatcctgccgttgcctgtcatgggagggcagagccaatcttcggacgtggtgattgtctcctctaagtacaaacagcgctatgagtgtcgcctgccagctggagctattcacttccagcgtgaaagggaggaggaaacacctgcttaccaagggcctgggatccctgagttgttgagcccaatgagagatgctccctgcttgctgaagacaaaggactggtggacatatgaattctgttatggacgccacatccagcaataccacatggaagattcagagatcaaaggtgaagtcctctatctcggctactaccaatcagccttcgactgggatgatgaaacagccaaggcctccaagcagcatcgtcttaaacgctaccacagccagacctatggcaatgggtccaagtgcgaccttaatgggaggccccgggaggccgaggttcggttcctctgtgacgagggtgcaggtatctctggggactacatcgatcgcgtggacgagcccttgtcctgctcttatgtgctgaccattcgcactcctcggctctgcccccaccctctcctccggcccccacccagtgctgcaccgcaggccatcctctgtcacccttccctacagcctgaggagtacatggcctacgttcagaggcaagccgactcaaagcagtatggagataaaatcatagaggagctgcaagatctaggcccccaagtgtggagtgagaccaagtctggggtggcaccccaaaagatggcaggtgcgagcccgaccaaggatgacagtaaggactcagatttctggaagatgcttaatgagccagaggaccaggccccaggaggggaggaggtgccggctgaggagcaggacccaagccctgaggcagcagattcagcttctggtgctcccaatgattttcagaacaacgtgcaggtcaaagtcattcgaagccctgcggatttgattcgattcatagaggagctgaaaggtggaacaaaaaaggggaagccaaatataggccaagagcagcctgtggatgatgctgcagaagtccctcagagggaaccagagaaggaaaggggtgatccagaacggcagagagagatggaagaagaggaggatgaggatgaggatgaggatgaagatgaggatgaacggcagttactgggagaatttgagaaggaactggaagggatcctgcttccgtcagaccgagaccggctccgttcggaggtgaaggctggcatggagcgggaactggaaaacatcatccaggagacagagaaagagctggacataaggcaggttgtctggccaatcttgctcccattcacctcgattgctttagcccactggattgcggcttaagaccttggggatcctctaatgcag

SEQ ID NO: 307038 - DNA, 1454 bp, Homo sapiens
  misc_feature (14)..(14): n is a, c, g, or t
  misc_feature (16)..(16): n is a, c, g, or t
  misc_feature (25)..(25): n is a, c, g, or t
  misc_feature (34)..(34): n is a, c, g, or t
accgtgcagtactntnacggtttanggtagcgangctgggtgggaacgaaagatggcggcggaaacgctgctgtccagtttgttaggactgctgcttctgggactcctgttacccgcaagtctgaccggcggtgtcgggagcctgaacctggaggagctgagtgagatgcgttatgggatcgagatcctgccgttgcctgtcatgggagggcagagccaatcttcggacgtggtgattgtctcctctaagtacaaacagcgctatgagtgtcgcctgccagctggagctattcacttccagcgtgaaagggaggaggaaacacctgcttaccaagggcctgggatccctgagttgttgagcccaatgagagatgctccctgcttgctgaagacaaaggactggtggacatatgaattctgttatggacgccacatccagcaataccacatggaagattcagagatcaaaggtgaagtcctctatctcggctactaccaatcagccttcgactgggatgatgaaacagccaaggcctccaagcagcatcgtcttaaacgctaccacagccagacctatggcaatgggtccaagtgcgaccttaatgggaggccccgggaggccgaggttcggttcctctgtgacgagggtgcaggtatctctggggactacatcgatcgcgtggacgagcccttgtcctgctcttatgtgctgaccattcgcactcctcggctctgcccccaccctctcctccggcccccacccagtgctgcaccgcaggccatcctctgtcacccttccctacagcctgaggagtacatggcctacgttcagaggcaagccgactcaaagcagtatggagataaaatcatagaggagctgcaagatctaggcccccaagtgtggagtgagaccaagtctggggtggcaccccaaaagatggcaggtgcgagcccgaccaaggatgacagtaaggactcagatttctggaagatgcttaatgagccagaggaccaggccccaggaggggaggaggtgccggctgaggagcaggacccaagccctgaggcagcagattcagcttctggtgctcccaatgattttcagaacaacgtgcaggtcaaagtcattcgaagccctgcggatttgattcgattcatagaggagctgaaaggtggaacaaaaaaggggaagccaaatataggccaagagcagcctgtggatgatgctgcagaagtccctcagagggaaccagagaaggaaaggggtgatccagaacggcagagagagatggaagaagaggaggatgaggatgaggatgaggatgaagatgaggatgaactgaaacggattgccagagaattggcagaagatgacagcatattaaagtgagtgaccctgcgacccactctttggaccagcagcggatgaataaagcttcctgtgttgtgtgata

SEQ ID NO: 307039 - DNA, 1196 bp, Homo sapiens
gacttgctgccgagcgaccatctacctggagcgctacagcgcttcctgcgtgaggccagagccccgatgagcctaccccatgtctgtgctctggtgtgcaaagtccaacggtgagagccaagaagggttgtccccagtcccccagtaccactaaagaggatcctgaccatccggtcgtcaccaagctccgtctcggaggccctaatcaggatctgactgtcctcgagatgaaacgggaaaacccacagctgaaacaaatcgaggggctggtgaaggagctgctggagagggagggactcacagctgcagggaaaattgagatcaaaattgtccgcccatgggctgaagggactgaagagggtgcacgttggctgactgatgaggacacgagaaacctcaaggagatcttcttcaatatcttggtgccgggagctgaagaggcccagaaggaacgccagcggcagaaagagctggagagcaattaccgccgggtgtggggctctccaggtggggagggcacaggggacctggacgaatttgacttctgagaccaacactacacttgacccttcacggaatccagactcttcctggactggcttgcctcctccccacctccccaccctggaacccctgagggccaaacagcagagtggagctgagctgtggacctctcgggcaactctgtgggtgtgggggccctgggtgaatgctgctgcccctgctggcagccaccttgagacctcaccgggcctgtgatatttgctctcctgaactctcactcaatcctcttcctctcctctgtggcttttcctgttattgtcccctaatgataggatattccctgctgcctacctggagattcagtaggatcttttgagtggaggtgggtagagagagcaaggagggcaggacacttagcaggcactgagcaagcaggcccccacctgcccttagtgatgtttggagtcgttttaccctcttctattgaattgccttgggatttccttctccctttccctgcccaccctgtcccctacaatttgtgcttctgagttgaggagccttcacctctgttgctgaggaaatggtagaatgctgcctatcacctccagcacaatcccagtgaaaaaggtgtgaagcacccaccatgttcttgaacaatcaggtttctaaataaacaactggaccatcaa

SEQ ID NO: 307040 - DNA, 1194 bp, Homo sapiens
  misc_feature (14)..(14): n is a, c, g, or t
  misc_feature (16)..(16): n is a, c, g, or t
  misc_feature (25)..(25): n is a, c, g, or t
  misc_feature (34)..(34): n is a, c, g, or t
accgtgcagtactntnacggtttanggtagcgangctgggtgggaacgaaagatggcggcggaaacgctgctgtccagtttgttaggactgctgcttctgggactcctgttacccgcaagtctgaccggcggtgtcgggagcctgaacctggaggagctgagtgagatgcgttatgggatcgagatcctgccgttgcctgtcatgggagggcagagccaatcttcggacgtggtgattgtctcctctaagtacaaacagcgctatgagtgtcgcctgccagctggagctattcacttccagcgtgaaagggaggaggaaacacctgcttaccaagggcctgggatccctgagttgttgagcccaatgagagatgctccctgcttgctgaagacaaaggactggtggacatatgaattctgttatggacgccacatccagcaataccacatggaagattcagagatcaaaggtgaagtcctctatctcggctactaccaatcagccttcgactgggatgatgaaacagccaaggcctccaagcagcatcgtcttaaacgctaccacagccagacctatggcaatgggtccaagtgcgaccttaatgggaggccccgggaggccgaggttcggttcctctgtgacgagggtgcaggtatctctggggactacatcgatcgcgtggacgagcccttgtcctgctcttatgtgctgaccattcgcactcctcggctctgcccccaccctctcctccggcccccacccagtgctgcaccgcaggccatcctctgtcacccttccctacagcctgaggagtacatggcctacgttcagaggcaagccgactcaaagcagtatggagataaaatcatagaggagctgcaagatctaggcccccaagtgtggagtgagaccaagtctggggtggcaccccaaaagatggcaggtgcgagcccgaccaaggatgacagtaaggactcagatttctggaagatgcttaatgagccagaggaccaggccccaggaggggaggaggtgccggctgagttttgtcaattattcgataatggcccatctggccataacgctatatatgtggtaccgctcgaccagcgttcaagatgcgctttgtcaattcgtccacctctcccagccaccacacccaacacagctctgttgcctgaggagatactact

SEQ ID NO: 307041 - DNA, 1161 bp, Homo sapiens
  misc_feature (14)..(14): n is a, c, g, or t
  misc_feature (16)..(16): n is a, c, g, or t
  misc_feature (25)..(25): n is a, c, g, or t
  misc_feature (34)..(34): n is a, c, g, or t
accgtgcagtactntnacggtttanggtagcgangctgggtgggaacgaaagatggcggcggaaacgctgctgtccagtttgttaggactgctgcttctgggactcctgttacccgcaagtctgaccggcggtgtcgggagcctgaacctggaggagctgagtgagatgcgttatgggatcgagatcctgccgttgcctgtcatgggagggcagagccaatcttcggacgtggtgattgtctcctctaagtacaaacagcgctatgagtgtcgcctgccagctggagctattcacttccagcgtgaaagggaggaggaaacacctgcttaccaagggcctgggatccctgagttgttgagcccaatgagagatgctccctgcttgctgaagacaaaggactggtggacatatgaattctgttatggacgccacatccagcaataccacatggaagattcagagatcaaaggtgaagtcctctatctcggctactaccaatcagccttcgactgggatgatgaaacagccaaggcctccaagcagcatcgtcttaaacgctaccacagccagacctatggcaatgggtccaagtgcgaccttaatgggaggccccgggaggccgaggttcggttcctctgtgacgagggtgcaggtatctctggggactacatcgatcgcgtggacgagcccttgtcctgctcttatgtgctgaccattcgcactcctcggctctgcccccaccctctcctccggcccccacccagtgctgcaccgcaggccatcctctgtcacccttccctacagcctgaggagtacatggcctacgttcagaggcaagccgactcaaagcagtatggagataaaatcatagaggagctgcaagatctaggcccccaagtgtggagtgagaccaagtctggggtggcaccccaaaagatggcaggtgcgagcccgaccaaggatgacagtaaggactccctttccctgcccaccctgtcccctacaatttgtgcttctgagttgaggagccttcacctctgttgctgaggaaatggtagaatgctgcctatcacctccagcacaatcccagtgaaaaaggtgtgaagcacccaccatgttcttgaacaatcaggtttctaaataaacaactggaccatcaa

SEQ ID NO: 307042 - DNA, 739 bp, Homo sapiens
gttggcctactggaaaaataaaaaaaaaaggagaaaaaaaaaaaaaaaaaaaaaaaaaaaaaaaaaaaaaaaaaaaaaaaggagggggaacgaaagatggcggcggaaacgctgctgtccagtttgttaggactgctgcttctgggactcctgttacccgcaagtctgaccggcggtgtcgggagcctgaacctggaggagctgagctgtggacctctcgggcaactctgtgggtgtgggggccctgggtgaatgctgctgcccctgctggcagccaccttgagacctcaccgggcctgtgatatttgctctcctgaactctcactcaatcctcttcctctcctctgtggcttttcctgttattgtcccctaatgataggatattccctgctgcctacctggagattcagtaggatcttttgagtggaggtgggtagagagagcaaggagggcaggacacttagcaggcactgagcaagcaggcccccacctgcccttagtgatgtttggagtcgttttaccctcttctattgaattgccttgggatttccttctccctttccctgcccaccctgtcccctacaatttgtgcttctgagttgaggagccttcacctctgttgctgaggaaatggtagaatgctgcctatcacctccagcacaatcccagtgaaaaaggtgtgaagcacccaccatgttcttgaacaatcaggtttctaaataaacaactggaccatcaa

SEQ ID NO: 307043 - DNA, 847 bp, Homo sapiens
  misc_feature (14)..(14): n is a, c, g, or t
  misc_feature (16)..(16): n is a, c, g, or t
  misc_feature (25)..(25): n is a, c, g, or t
  misc_feature (34)..(34): n is a, c, g, or t
accgtgcagtactntnacggtttanggtagcgangctgggtgggaacgaaagatggcggcggaaacgctgctgtccagtttgttaggactgctgcttctgggactcctgttacccgcaagtctgaccggcggtgtcgggagcctgaacctggaggagctgagtgagatgcgttatgggatcgagatcctgccgttgcctgtcatgggagggcagagccaatcttcggacgtggtgattgtctcctctaagtacaaacagcgctatgagtgtcgcctgccagctggagctattcacttccagcgtgaaagggaggaggaaacacctgcttaccaagggcctgggatccctgagttgttgagcccaatgagagatgctccctgcttgctgaagacaaaggactggtggacatatgaattctgttatggacgccacatccagcaataccacatggaagattcagagatcaaaggtgaagtcctctatctcggctactaccaatcagccttcgactgggatgatgaaacagccaaggcctccaagcagcatcgtcttaaacgctaccacagccagacctatggcaatgggtccaagtgcgaccttaatgggaggccccgggaggccgaggttcggttcctctgtgacgagggtgcaggtatctctggggactacatcgatcgcgtggacgagcccttgtcctgctcttatgtgctgaccattcgcactcctcggctctgcccccaccctctcctccggcccccccgggttccggggccctcggaccttcctaggcggggagaaggccagaagggagagcgaaatatgagggaagagagggagggaaaaacc

SEQ ID NO: 307044 - DNA, 816 bp, Homo sapiens
  misc_feature (14)..(14): n is a, c, g, or t
  misc_feature (16)..(16): n is a, c, g, or t
  misc_feature (25)..(25): n is a, c, g, or t
  misc_feature (34)..(34): n is a, c, g, or t
accgtgcagtactntnacggtttanggtagcgangctgggtgggaacgaaagatggcggcggaaacgctgctgtccagtttgttaggactgctgcttctgggactcctgttacccgcaagtctgaccggcggtgtcgggagcctgaacctggaggagctgagtgagatgcgttatgggatcgagatcctgccgttgcctgtcatgggagggcagagccaatcttcggacgtggtgattgtctcctctaagtacaaacagcgctatgagtgtcgcctgccagctggagctattcacttccagcgtgaaagggaggaggaaacacctgcttaccaagggcctgggatccctgagttgttgagcccaatgagagatgctccctgcttgctgaagacaaaggactggtggacatatgaattctgttatggacgccacatccagcaataccacatggaagattcagagatcaaaggtgaagtcctctatctcggctactaccaatcagccttcgactgggatgatgaaacagccaaggcctccaagcagcatcgtcttaaacgctaccacagccagacctatggcaatgggtccaagtgcgaccttaatgggaggccccgggaggccgaggttcggtccctttccctgcccaccctgtcccctacaatttgtgcttctgagttgaggagccttcacctctgttgctgaggaaatggtagaatgctgcctatcacctccagcacaatcccagtgaaaaaggtgtgaagcacccaccatgttcttgaacaatcaggtttctaaataaacaactggaccatcaa

SEQ ID NO: 307045 - DNA, 319 bp, Homo sapiens
tggctgactgatgaggacacgagaaacctcaaggagatcttcttcaatatcttggtaagaggcttctacccccgagtcctggcccccagccctcctggagtggaggtgcgggcttgccccagccacgccattgctgagcttccatttcctgatctgtaagacaaggctggggttccagtggctcagagtgctgccatgcaggaagagcccctcaggacatgggtgtcctcattccctgccttcccccagctgcctggcccaggacttccctgggctcaacggccagtagctccagcccacctctaccctctcccaccag

SEQ ID NO: 307046 - DNA, 395 bp, Homo sapiens
cctgggggtcgcagactgagaccaattctctgggggccaggaattgggagaggtggggcttcccgctgtcaaccttcaggtctcagtttatgatcgaaacacccggactccgcccccgtggagaaatgggagcgccctctcctctcacccactaaatacagctggagggcttatggcttattctgtcttcgactgatctcttccccagggtttgaagagggatttcgttgttctccctgatcccagcctttctttgcttccttgccccccgaccctcccttctttcccagagccaatcttcggacgtggtgattgtctcctctaagtacaaacagcgctatgagtgtcgcctgccagctggagctattcacttccagcgtgaaagggaggaggaa

SEQ ID NO: 307047 - DNA, 422 bp, Homo sapiens
tatgtgtcttggagccaggagactctggttccaagaaaagatgtctgcactccatccccctgattgtttattttttaattgtcagacaaaggactggtggacatatgaattctgttatggacgccacatccagcaataccacatggaaggtaactcactcctatattttccttaagcccttagtgtcatatcatggaagttccccagttccctcctcctcctcctcctcttaagagtaacagtgcttcactgtggcttcccttgcagattcagagatcaaaggtgaagtcctctatctcggctactaccaatcagccttcgactgggatgatgaaacagccaaggtggcaagagtgtgggattcaggaagaaagggttctggccaccggctgagagccctgacaagaaggggagggtcaaga

SEQ ID NO: 307048 - DNA, 970 bp, Homo sapiens
aacatactgagttaacacattttcctagtagtgatagaattttcagggaagcaagaaaccaagaaaattctggctgctacctaattttaatgaagtggcgattatctgcccacaaggtatgagaagtatagatgtgcattgctctacaaatatacaacgcaataaggcccactcgaaattcatgaaaggcttgccaagccacatggcttgattggtcgtaggtagatgcatgatgtccctcttagaatgaggcccatgtttaaaatccacatttacaaaaggagtaggtacaattgtgatgttttgaggtaaccaaagtgtgtcatgaaaaagaacgtcaagaagaaaggcagaggaactcatgagtttgaatggttaaactgaaggcaagaaaaagtcctaagaataaaactgaaaaatattttaatatgcctatgtatctttcacagagtggattcaactgcacataagaagaacataatgttgaagtcatttcagagtgcaaatatcattgaattgcttcattatcaccagtgtgactctcgatcatcaacaaaagcagaaattctgaaatgtttgctaaacctgcaaattcagcatattgatgccaggtttgctgtcctcctaacaggtaattcacaggcgcattttactcagttaatgccaaaattggtcagctctaggaatgtcaaagttagatacctgatgaagagtatcaggtatctaaatggcttggcatcccatggataccagaatcacccaaatctgctgaagctgaagcccttatataaaatgtagtatttgcaggtaactacacaatcctcctatgtatgtaagtcagttctagattacttataatactcaatacagtataagtagttataccgtattattttttaaatcaatactggggctgggtgcagtggctcacacctgtaatcccagcactttgggaggccgaggcgggcgg

SEQ ID NO: 307049 - DNA, 151 bp, Homo sapiens
tatgatgtcataaaaaatttatacaggaaaaagtgaaaggaaattaattcatgatgttaagagtgattatcactagggttatgggaatgggtgtgatttgggttttctccaacaagcatgagaatgtaagtgatgaaaactagagagacgg

SEQ ID NO: 307050 - DNA, 5199 bp, Homo sapiens
gtatatccctcagtgtcagaagaaccagtagaaaataaggagagaaagggggataatttacaaccagttactttaatactttctaaagaaaattgcacccttgagattgcagaggaaattaatgtgacctctgattttccctttgattctgtaattgaagaagtatcaccagcgtctagtcctgaacctccagtaccagttaaagagacacgaccatatcaggctgtgactccatgcattttaaaacttcatggtacacagtgtgagaagagcaaccaaatctcccaatgtgagtcagaagacttaggcataacagaaaaagaaaatgtttttgttggtcctacccatccagtggggcaagataactttacccaggtacaacaaatgcaggtctctgccgaaatgcctctaatattaactgatcatccaggaagaacaggtagaccaacccttcctggtaaagtaactgaggaaattgtctcaagtgagcatgatgagggtttatctttctcaggaaaggtgcagtgctatggtagggagttaaaccagcctgcctcagctgccaaatgcacaggtgacttcagtccttctcctgaaaaactggtaaaatcaggaaatccattgcagccagttagtatagagaatagaaatttggacttaaaacatcttgtcttggagtccagtgaacctccatttggtcctagaaatgttattgaaaataagtctttgtctgacacattggtttccacaactgcaccaagtggtatagtgaatgtgtcagtaaaacagcagactagccctaaaagcagtcagaaccatctctttcccggtgatttgaaaacagatgaaggcatttatctgcaggtgaagtccttgacagctgcctcggttgatggagcttattctacacagggatgcatgtgctcagtggtccccacgctttgttcttcctcagacaatgctacattaacccattatgtaagaccaataaatgcagagccagcgtttcaagcacaggaaataccagcaggcagaatggccagtttgcttaagaatggtgagcctgaagctgagttacataaagaaaccacaggtccaggcactgctggccctcagtccaacaccacatcttctctaaaaggtgaacgcaaagccatccacacgctgcaagatgtgtcaacatgtgaaacaaaggagctattgaatgtcggggtttcctccctttgtgctggtccctaccaaaatacagcagacaccaaggaaaacctcagtaaagagcctttggcctcctttgtttcagaatcctttgatacttctgtttgtggaatagccacagagcacgtagaaattgagaacagtggggaggggctcagggctgaggctggttctgaaaccctaggcagagatggagaggtcggtgtgaattccgacatgcactatgaactctctggagattctgatctagacctgcttggtgattgtagaaatcccagactggatttggaggattcttatactttaagaggtagttacaccaggaaaaaagatgttcccacagatggctatgagtcgtcgttgaacttccacaacaacaaccaagaggactggggctgctctagctgggttccaggcatggagacgagcctccctcccgggcactggactgctgcggtaaagaaagaagagaagtgtgtgccgccttacgtccaaatccgagatctccacgggatcctcaggacttacgccaacttctctataacaaaagaactcaaagataccatgagaacttcacacggcctgaggaggcacccgagtttcagtgcaaactgtggcctgcccagctcctggacaagcacttggcaggtggcagacgacctcacccagaacactttagacctggagtatctgcgttttgcacataaactaaaacagaccataaagaatggggattctcagcattctgcctcctctgccaatgtctttccaaaggagtcaccaacccagatctccattggtgctttcccttcgacaaaaatctctgaggccccatttctgcatcctgcacctaggagcagaagcccccttctggtaacagttgtggagtcagatcccagaccacaggggcagcccaggagaggctacacagccagcagtctggacagctcttcctcttggagagagagatgtagtcataatagagatcttagaaattctcaaagaaatcacactgtttcattccacctcaacaaactgaaatacaacagtactgtgaaggaatctcggaatgatatttcacttattctcaatgagtatgctgaattcaacaaggtgatgaagaatagcaaccaattcattttccaagacaaagagctaaatgatgtttctggagaagccactgctcaagagatgtatctgcctttcccaggacggtcagcctcctatgaagacataatcatagacgtgtgcaccaatttgcacgtcaaactaagaagtgttgtgaaagaggcttgtaaaagtaccttcctgttctaccttgtcgaaacagaagacaaatcattctttgtaagaacaaagaaccttctgaggaaaggaggccatacagaaattgaacctcagcacttctgtcaagctttccacagagagaatgatacactaatcatcatcatcagaaatgaagatatatcatcacatttgcatcagattccttctttgctgaagctgaagcatttccccagtgtcatctttgctggagtagacagccctggagatgttcttgatcacacctaccaagaactgtttcgtgcaggaggctttgtgatatcagatgacaagatactagaagctgtaacattagttcaactgaaggaaattatcaaaatcctggaaaaactaaatggaaatggaagatggaagtggttgcttcactacagggaaaataaaaagctaaaagaagatgaaagagtggattcaactgcacataagaagaacataatgttgaagtcatttcagagtgcaaatatcattgaattgcttcattatcaccagtgtgactctcgatcatcaacaaaagcagaaattctgaaatgtttgctaaacctgcaaattcagcatattgatgccaggtttgctgtcctcctaacagacaagcctactatccccagagaagtctttgaaaataatggaatccttgttacagatgtaaataactttatagaaaacatagaaaaaatagcagctccatttaggagtagctattggtgactcaactacagcctgcctggatatggatgatgccaataaaaaattagtattttccctttggaaaacttgtgaacatgtgaatacacatgtgaacagtcttacatttgaaaaaccaatgttctacaacttggaaagttttcattttttatattttgctgaaatatgtcacagtggcattgcagttgtctgttagctttgggttgcagtgctagatattgttttaaattattttcattttaaacaagatgccttctaagctattgagcttattaaaaataattttacatgtttacttagttggagcaaaaataagtctattttaacaaatagctttgtttttgcatgctaatgtcagaaaggcatacgatgcacattatgctctgttttaaaggttttaccacccttgtaaaaactataatcttaaatggttttatttgctgttacacaaacaacactacataaaacattttttcctaaatggtacaaatttataaactatcatttttcacttacggtatttgtaaatactacactacaaaaatcagctttctgagaaagaaataatcatttatttatgatattgaaaatttctacagtaaacactcaaaaccaagcaaaaaacatttgtaagatacacggtatctatttggagcaacggtttttgtaactaatgtgtttcattttttaaataaagacaactaaaaataaatctctttctgcaatgatttttatagcagaaattgacttatctggagtgttctagcaatttttaggtcatttagcagaacagtaagcttccagaggaaacctacacttctatcctttgggcctggcctgttctgtttctgggttctttccgcagtcaagtacaccgagtaacaggttaaagaatggcagtttcacctggcctttacagggacacttacttctttcagaagtcattaagtcggcttttattattcctaaacaaaagagctttattttctcatgagtaggttttagagttttaattgttgacaatttttcagttactaatagaaccccagtcatttcattttatttttccaaggacaagagtctattaagggaaccattaactattcagtacagtgaattactttcagattactaaggaaaaggaaagtgagcagttataagatgccaaacacctatctatctgcctgaaatatgcacctttcaggttggacctaataacattcacctccccttgctgaaaagccttccaacacccacgaggccatctcagtttccatgctaccttttctgtaactctactaataaccaaaccacatcatgtgttcaccaaactgagttatcccagtaactaccattatcatctttgtctccactggcctggcacacaaggtattcagtaaatacgttgaatgaagaatatgaagatgcgtggtttttcttttttcacttattactaacccagcttgggcctttgcatgggaagagaaaaaggcttgctgggacttcagataattttatcatacaggtaaagcagtggttctcaacatctggagacatttttggttgtcattccaagatggtgctgttgccatctagtgtgtggaggccagggatgctgctacaatcaaccctatcaacagagaatgatccagcccaaaacatcaactgaagtcgagaagctccatcattttggcaatatgaataacaatctaaatcaccaccctagttcctttaacacatcatctaccttagtctgtctccttcatactctgaagagtcagtgtttatctgtggtaaacaacagcatctgccgtgaggctcatcactgtcaggggaaagggccttatatgtaaacactttatcatttcaactacacaaaaattatttactaaagcacctactctacctgacagttcacttactcccttataactgctgcta

SEQ ID NO: 307051 - DNA, 4777 bp, Homo sapiens
gtatatccctcagtgtcagaagaaccagtagaaaataaggagagaaagggggataatttacaaccagttactttaatactttctaaagaaaattgcacccttgagattgcagaggaaattaatgtgacctctgattttccctttgattctgtaattgaagaagtatcaccagcgtctagtcctgaacctccagtaccagttaaagagacacgaccatatcaggctgtgactccatgcattttaaaacttcatggtacacagtgtgagaagagcaaccaaatctcccaatgtgagtcagaagacttaggcataacagaaaaagaaaatgtttttgttggtcctacccatccagtggggcaagataactttacccaggtacaacaaatgcaggtctctgccgaaatgcctctaatattaactgatcatccaggaagaacaggtagaccaacccttcctggtaaagtaactgaggaaattgtctcaagtgagcatgatgagggtttatctttctcaggaaaggtgcagtgctatggtagggagttaaaccagcctgcctcagctgccaaatgcacaggtgacttcagtccttctcctgaaaaactggtaaaatcaggaaatccattgcagccagttagtatagagaatagaaatttggacttaaaacatcttgtcttggagtccagtgaacctccatttggtcctagaaatgttattgaaaataagtctttgtctgacacattggtttccacaactgcaccaagtggtatagtgaatgtgtcagtaaaacagcagactagccctaaaagcagtcagaaccatctctttcccggtgatttgaaaacagatgaaggcatttatctgcaggtgaagtccttgacagctgcctcggttgatggagcttattctacacagggatgcatgtgctcagtggtccccacgctttgttcttcctcagacaatgctacattaacccattatgtaagaccaataaatgcagagccagcgtttcaagcacaggaaataccagcaggcagaatggccagtttgcttaagaatggtgagcctgaagctgagttacataaagaaaccacaggtccaggcactgctggccctcagtccaacaccacatcttctctaaaaggtgaacgcaaagccatccacacgctgcaagatgtgtcaacatgtgaaacaaaggagctattgaatgtcggggtttcctccctttgtgctggtccctaccaaaatacagcagacaccaaggaaaacctcagtaaagagcctttggcctcctttgtttcagaatcctttgatacttctgtttgtggaatagccacagagcacgtagaaattgagaacagtggggaggggctcagggctgaggctggttctgaaaccctaggcagagatggagaggtcggtgtgaattccgacatgcactatgaactctctggagattctgatctagacctgcttggtgattgtagaaatcccagactggatttggaggattcttatactttaagaggtagttacaccaggaaaaaagatgttcccacagatggctatgagtcgtcgttgaacttccacaacaacaaccaagaggactggggctgctctagctgggttccaggcatggagacgagcctccctcccgggcactggactgctgcggtaaagaaagaagagaagtgtgtgccgccttacgtccaaatccgagatctccacgggatcctcaggacttacgccaacttctctataacaaaagaactcaaagataccatgagaacttcacacggcctgaggaggcacccgagtttcagtgcaaactgtggcctgcccagctcctggacaagcacttggcaggtggcagacgacctcacccagaacactttagacctggagtatctgcgttttgcacataaactaaaacagaccataaagaatggggattctcagcattctgcctcctctgccaatgtctttccaaaggagtcaccaacccagatctccattggtgctttcccttcgacaaaaatctctgaggccccatttctgcatcctgcacctaggagcagaagcccccttctggtaacagttgtggagtcagatcccagaccacaggggcagcccaggagaggctacacagccagcagtctggacagctcttcctcttggagagagagatgtagtcataatagagatcttagaaattctcaaagaaatcacactgtttcattccacctcaacaaactgaaatacaacagtactgtgaaggaatctcggaatgatatttcacttattctcaatgagtatgctgaattcaacaaggtgatgaagaatagcaaccaattcattttccaagacaaagagctaaatgatgtttctggagaagccactgctcaagagatgtatctgcctttcccaggacggtcagcctcctatgaagacataatcatagacgtgtgcaccaatttgcacgtcaaactaagaagtgttgtgaaagaggcttgtaaaagtaccttcctgttctaccttgtcgaaacagaagacaaatcattctttgtaagaacaaagaaccttctgaggaaaggaggccatacagaaattgaacctcagcacttctgtcaagctttccacagagagaatgatacactaatcatcatcatcagaaatgaagatatatcatcacatttgcatcagattccttctttgctgaagctgaagcatttccccagtgtcatctttgctggagtagacagccctggagatgttcttgatcacacctaccaagaactgtttcgtgcaggaggctttgtgatatcagatgacaagatactagaagctgtaacattagttcaactgaaggaaattatcaaaatcctggaaaaactaaatggaaatggaagatggaagtggttgcttcactacagggaaaataaaaagctaaaagaagatgaaagagtggattcaactgcacataagaagaacataatgttgaagtcatttcagagtgcaaatatcattgaattgcttcattatcaccagtgtgactctcgatcatcaacaaaagcagaaattctgaaatgtttgctaaacctgcaaattcagcatattgatgccaggtttgctgtcctcctaacagacaagcctactatccccagagaagtctttgaaaataatggaatccttgttacagatgtaaataactttatagaaaacatagaaaaaatagcagctccatttaggagtagctattggtgactcaactacagcctgcctggatatggatgatgccaataaaaaattagtattttccctttggaaaacttgtgaacatgtgaatacacatgtgaacagtcttacatttgaaaaaccaatgttctacaacttggaaagttttcattttttatattttgctgaaatatgtcacagtggcattgcagttgtctgttagctttgggttgcagtgctagatattgttttaaattattttcattttaaacaagatgccttctaagctattgagcttattaaaaataattttacatgtttacttagttggagcaaaaataagtctattttaacaaatagctttgtttttgcatgctaatgtcagaaaggcatacgatgcacattatgctctgttttaaaggttttaccacccttgtaaaaactataatcttaaatggttttatttgctgttacacaaacaacactacataaaacattttttcctaaatggtacaaatttataaactatcatttttcacttacggtatttgtaaatactacactacaaaaatcagctttctgagaaagaaataatcatttatttatgatattgaaaatttctacagtaaacactcaaaaccaagcaaaaaacatttgtaagatacacggtatctatttggagcaacggtttttgtaactaatgtgtttcattttttaaataaagacaactaaaaataaatctctttctgcaatgatttttatagcagaaattgacttatctggagtgttctagcaatttttaggtcatttagcagaacagtaagcttccagaggaaacctacacttctatcctttgggcctggcctgttctgtttctgggttctttccgcagtcaagtacaccgagtaacaggttaaagaatggcagtttcacctggcctttacagggacacttacttctttcagaagtcattaagtcggcttttattattcctaaacaaaagagctttattttctcatgagtaggttttagagttttaattgttgacaatttttcagttactaatagaaccccagtcatttcattttatttttccaaggacaagagtctattaagggaaccattaactattcagtacagtgaattactttcagattactaaggaaaaggaaagtgagcagttataagatgccaaacacctatctatctgcctgaaatatgcacctttcaggttggacctaataacattcacctccccttgctgaaaagccttccaacacccacgaggccatctcagtttccatgctaccttttctgtaactctactaataaccaaaccacatcatgtgttcaccaaactgagttatcccagtaactaccattatcatctttgtctccactggcctggcacacaaggtattcagtaaatacgttgaatgaagaatatgaagatgcgtggtttttcttttttcacttattactaacccagcaagcctttttctcttcccatgcaaaggcccaagctgggttagtaataagtgaaaaa

SEQ ID NO: 307052 - DNA, 5145 bp, Homo sapiens
gtatatccctcagtgtcagaagaaccagtagaaaataaggagagaaagggggataatttacaaccagttactttaatactttctaaagaaaattgcacccttgagattgcagaggaaattaatgtgacctctgattttccctttgattctgtaattgaagaagtatcaccagcgtctagtcctgaacctccagtaccagttaaagagacacgaccatatcaggctgtgactccatgcattttaaaacttcatggtacacagtgtgagaagagcaaccaaatctcccaatgtgagtcagaagacttaggcataacagaaaaagaaaatgtttttgttggtcctacccatccagtggggcaagataactttacccaggtacaacaaatgcaggtctctgccgaaatgcctctaatattaactgatcatccaggaagaacaggtagaccaacccttcctggtaaagtaactgaggaaattgtctcaagtgagcatgatgagggtttatctttctcaggaaaggtgcagtgctatggtagggagttaaaccagcctgcctcagctgccaaatgcacaggtgacttcagtccttctcctgaaaaactggtaaaatcaggaaatccattgcagccagttagtatagagaatagaaatttggacttaaaacatcttgtcttggagtccagtgaacctccatttggtcctagaaatgttattgaaaataagtctttgtctgacacattggtttccacaactgcaccaagtggtatagtgaatgtgtcagtaaaacagcagactagccctaaaagcagtcagaaccatctctttcccggtgatttgaaaacagatgaaggcatttatctgcaggtgaagtccttgacagctgcctcggttgatggagcttattctacacagggatgcatgtgctcagtggtccccacgctttgttcttcctcagacaatgctacattaacccattatgtaagaccaataaatgcagagccagcgtttcaagcacaggaaataccagcaggcagaatggccagtttgcttaagaatggtgagcctgaagctgagttacataaagaaaccacaggtccaggcactgctggccctcagtccaacaccacatcttctctaaaaggtgaacgcaaagccatccacacgctgcaagatgtgtcaacatgtgaaacaaaggagctattgaatgtcggggtttcctccctttgtgctggtccctaccaaaatacagcagacaccaaggaaaacctcagtaaagagcctttggcctcctttgtttcagaatcctttgatacttctgtttgtggaatagccacagagcacgtagaaattgagaacagtggggaggggctcagggctgaggctggttctgaaaccctaggcagagatggagaggtcggtgtgaattccgacatgcactatgaactctctggagattctgatctagacctgcttggtgattgtagaaatcccagactggatttggaggattcttatactttaagaggtagttacaccaggaaaaaagatgttcccacagatggctatgagtcgtcgttgaacttccacaacaacaaccaagaggactggggctgctctagctgggttccaggcatggagacgagcctccctcccgggcactggactgctgcggtaaagaaagaagagaagtgtgtgccgccttacgtccaaatccgagatctccacgggatcctcaggacttacgccaacttctctataactttcagtgcaaactgtggcctgcccagctcctggacaagcacttggcaggtggcagacgacctcacccagaacactttagacctggagtatctgcgttttgcacataaactaaaacagaccataaagaatggggattctcagcattctgcctcctctgccaatgtctttccaaaggagtcaccaacccagatctccattggtgctttcccttcgacaaaaatctctgaggccccatttctgcatcctgcacctaggagcagaagcccccttctggtaacagttgtggagtcagatcccagaccacaggggcagcccaggagaggctacacagccagcagtctggacagctcttcctcttggagagagagatgtagtcataatagagatcttagaaattctcaaagaaatcacactgtttcattccacctcaacaaactgaaatacaacagtactgtgaaggaatctcggaatgatatttcacttattctcaatgagtatgctgaattcaacaaggtgatgaagaatagcaaccaattcattttccaagacaaagagctaaatgatgtttctggagaagccactgctcaagagatgtatctgcctttcccaggacggtcagcctcctatgaagacataatcatagacgtgtgcaccaatttgcacgtcaaactaagaagtgttgtgaaagaggcttgtaaaagtaccttcctgttctaccttgtcgaaacagaagacaaatcattctttgtaagaacaaagaaccttctgaggaaaggaggccatacagaaattgaacctcagcacttctgtcaagctttccacagagagaatgatacactaatcatcatcatcagaaatgaagatatatcatcacatttgcatcagattccttctttgctgaagctgaagcatttccccagtgtcatctttgctggagtagacagccctggagatgttcttgatcacacctaccaagaactgtttcgtgcaggaggctttgtgatatcagatgacaagatactagaagctgtaacattagttcaactgaaggaaattatcaaaatcctggaaaaactaaatggaaatggaagatggaagtggttgcttcactacagggaaaataaaaagctaaaagaagatgaaagagtggattcaactgcacataagaagaacataatgttgaagtcatttcagagtgcaaatatcattgaattgcttcattatcaccagtgtgactctcgatcatcaacaaaagcagaaattctgaaatgtttgctaaacctgcaaattcagcatattgatgccaggtttgctgtcctcctaacagacaagcctactatccccagagaagtctttgaaaataatggaatccttgttacagatgtaaataactttatagaaaacatagaaaaaatagcagctccatttaggagtagctattggtgactcaactacagcctgcctggatatggatgatgccaataaaaaattagtattttccctttggaaaacttgtgaacatgtgaatacacatgtgaacagtcttacatttgaaaaaccaatgttctacaacttggaaagttttcattttttatattttgctgaaatatgtcacagtggcattgcagttgtctgttagctttgggttgcagtgctagatattgttttaaattattttcattttaaacaagatgccttctaagctattgagcttattaaaaataattttacatgtttacttagttggagcaaaaataagtctattttaacaaatagctttgtttttgcatgctaatgtcagaaaggcatacgatgcacattatgctctgttttaaaggttttaccacccttgtaaaaactataatcttaaatggttttatttgctgttacacaaacaacactacataaaacattttttcctaaatggtacaaatttataaactatcatttttcacttacggtatttgtaaatactacactacaaaaatcagctttctgagaaagaaataatcatttatttatgatattgaaaatttctacagtaaacactcaaaaccaagcaaaaaacatttgtaagatacacggtatctatttggagcaacggtttttgtaactaatgtgtttcattttttaaataaagacaactaaaaataaatctctttctgcaatgatttttatagcagaaattgacttatctggagtgttctagcaatttttaggtcatttagcagaacagtaagcttccagaggaaacctacacttctatcctttgggcctggcctgttctgtttctgggttctttccgcagtcaagtacaccgagtaacaggttaaagaatggcagtttcacctggcctttacagggacacttacttctttcagaagtcattaagtcggcttttattattcctaaacaaaagagctttattttctcatgagtaggttttagagttttaattgttgacaatttttcagttactaatagaaccccagtcatttcattttatttttccaaggacaagagtctattaagggaaccattaactattcagtacagtgaattactttcagattactaaggaaaaggaaagtgagcagttataagatgccaaacacctatctatctgcctgaaatatgcacctttcaggttggacctaataacattcacctccccttgctgaaaagccttccaacacccacgaggccatctcagtttccatgctaccttttctgtaactctactaataaccaaaccacatcatgtgttcaccaaactgagttatcccagtaactaccattatcatctttgtctccactggcctggcacacaaggtattcagtaaatacgttgaatgaagaatatgaagatgcgtggtttttcttttttcacttattactaacccagcttgggcctttgcatgggaagagaaaaaggcttgctgggacttcagataattttatcatacaggtaaagcagtggttctcaacatctggagacatttttggttgtcattccaagatggtgctgttgccatctagtgtgtggaggccagggatgctgctacaatcaaccctatcaacagagaatgatccagcccaaaacatcaactgaagtcgagaagctccatcattttggcaatatgaataacaatctaaatcaccaccctagttcctttaacacatcatctaccttagtctgtctccttcatactctgaagagtcagtgtttatctgtggtaaacaacagcatctgccgtgaggctcatcactgtcaggggaaagggccttatatgtaaacactttatcatttcaactacacaaaaattatttactaaagcacctactctacctgacagttcacttactcccttataactgctgcta

SEQ ID NO: 307053 - DNA, 5581 bp, Homo sapiens
gtatatccctcagtgtcagaagaaccagtagaaaataaggagagaaagggggataatttacaaccagttactttaatactttctaaagaaaattgcacccttgagattgcagaggaaattaatgtgacctctgattttccctttgattctgtaattgaagaagtatcaccagcgtctagtcctgaacctccagtaccagttaaagagacacgaccatatcaggctgtgactccatgcattttaaaacttcatggtacacagtgtgagaagagcaaccaaatctcccaatgtgagtcagaagacttaggcataacagaaaaagaaaatgtttttgttggtcctacccatccagtggggcaagataactttacccaggtacaacaaatgcaggtctctgccgaaatgcctctaatattaactgatcatccaggaagaacaggtagaccaacccttcctggtaaagtaactgaggaaattgtctcaagtgagcatgatgagggtttatctttctcaggaaaggtgcagtgctatggtagggagttaaaccagcctgcctcagctgccaaatgcacaggtgacttcagtccttctcctgaaaaactggtaaaatcaggaaatccattgcagccagttagtatagagaatagaaatttggacttaaaacatcttgtcttggagtccagtgaacctccatttggtcctagaaatgttattgaaaataagtctttgtctgacacattggtttccacaactgcaccaagtggtatagtgaatgtgtcagtaaaacagcagactagccctaaaagcagtcagaaccatctctttcccggtgatttgaaaacagatgaaggcatttatctgcaggtgaagtccttgacagctgcctcggttgatggagcttattctacacagggatgcatgtgctcagtggtccccacgctttgttcttcctcagacaatgctacattaacccattatgtaagaccaataaatgcagagccagcgtttcaagcacaggaaataccagcaggcagaatggccagtttgcttaagaatggtgagcctgaagctgagttacataaagaaaccacaggtccaggcactgctggccctcagtccaacaccacatcttctctaaaaggtgaacgcaaagccatccacacgctgcaagatgtgtcaacatgtgaaacaaaggagctattgaatgtcggggtttcctccctttgtgctggtccctaccaaaatacagcagacaccaaggaaaacctcagtaaagagcctttggcctcctttgtttcagaatcctttgatacttctgtttgtggaatagccacagagcacgtagaaattgagaacagtggggaggggctcagggctgaggctggttctgaaaccctaggcagagatggagaggtcggtgtgaattccgacatgcactatgaactctctggagattctgatctagacctgcttggtgattgtagaaatcccagactggatttggaggattcttatactttaagaggtagttacaccaggaaaaaagatgttcccacagatggctatgagtcgtcgttgaacttccacaacaacaaccaagaggactggggctgctctagctgggttccaggcatggagacgagcctccctcccgggcactggactgctgcggtaaagaaagaagagaagtgtgtgccgccttacgtccaaatccgagatctccacgggatcctcaggacttacgccaacttctctataacaaaagaactcaaagataccatgagaacttcacacggcctgaggaggcacccgagtttcagtgcaaactgtggcctgcccagctcctggacaagcacttggcaggtggcagacgacctcacccagaacactttagacctggagtatctgcgttttgcacataaactaaaacagaccataaagaatggggattctcagcattctgcctcctctgccaatgtctttccaaaggagtcaccaacccagatctccattggtgctttcccttcgacaaaaatctctgaggccccatttctgcatcctgcacctaggagcagaagcccccttctggtaacagttgtggagtcagatcccagaccacaggggcagcccaggagaggctacacagccagcagtctggacagctcttcctcttggagagagagatgtagtcataatagagatcttagaaattctcaaagaaatcacactgtttcattccacctcaacaaactgaaatacaacagtactgtgaaggaatctcggaatgatatttcacttattctcaatgagtatgctgaattcaacaaggtgatgaagaatagcaaccaattcattttccaagacaaagagctaaatgatgtttctggagaagccactgctcaagagatgtatctgcctttcccaggacggtcagcctcctatgaagacataatcatagacgtgtgcaccaatttgcacgtcaaactaagaagtgttgtgaaagaggcttgtaaaagtaccttcctgttctaccttgtcgaaacagaagacaaatcattctttgtaagaacaaagaaccttctgaggaaaggaggccatacagaaattgaacctcagcacttctgtcaagctttccacagagagaatgatacactaatcatcatcatcagaaatgaagatatatcatcacatttgcatcagattccttctttgctgaagctgaagcatttccccagtgtcatctttgctggagtagacagccctggagatgttcttgatcacacctaccaagaactgtttcgtgcaggaggctttgtgatatcagatgacaagatactagaagctgtaacattagttcaactgaaggaaattatcaaaatcctggaaaaactaaatggaaatggaagatggaagtggttgcttcactacagggaaaataaaaagctaaaagaagatgaaagagtggattcaactgcacataagaagaacataatgttgaagtcatttcagagtgcaaatatcattgaattgcttcattatcaccagtgtgactctcgatcatcaacaaaagcagaaattctgaaatgtttgctaaacctgcaaattcagcatattgatgccaggtttgctgtcctcctaacagacaagcctactatccccagagaagtctttgaaaataatggaatccttgttacagatgtaaataactttatagaaaacatagaaaaaatagcagctccatttaggagtagctattggtaagaacactttttatgtaactttcccatgtgagttggagttgttgatggcaaatattgacatttgtgtctaagggaaacagttgggaaactgttgtttacatacttcatgctataaatttaaagtgtttgtttaggggtggaattgctatttggcataaataggaattcctaaattatcactaaatgaagtaaccatctactaaaattacctattttatctaatgtgcattttcacttgctgttaacttggatcgtcagtacagaacataatgtaaccttagaatgcataggcgttttccccattagagcatcccgcttataaaatatttcttgttcgtattattttaagaagttctttatcaattttgtgtttcttcaggtgactcaactacagcctgcctggatatggatgatgccaataaaaaattagtattttccctttggaaaacttgtgaacatgtgaatacacatgtgaacagtcttacatttgaaaaaccaatgttctacaacttggaaagttttcattttttatattttgctgaaatatgtcacagtggcattgcagttgtctgttagctttgggttgcagtgctagatattgttttaaattattttcattttaaacaagatgccttctaagctattgagcttattaaaaataattttacatgtttacttagttggagcaaaaataagtctattttaacaaatagctttgtttttgcatgctaatgtcagaaaggcatacgatgcacattatgctctgttttaaaggttttaccacccttgtaaaaactataatcttaaatggttttatttgctgttacacaaacaacactacataaaacattttttcctaaatggtacaaatttataaactatcatttttcacttacggtatttgtaaatactacactacaaaaatcagctttctgagaaagaaataatcatttatttatgatattgaaaatttctacagtaaacactcaaaaccaagcaaaaaacatttgtaagatacacggtatctatttggagcaacggtttttgtaactaatgtgtttcattttttaaataaagacaactaaaaataaatctctttctgcaatgatttttatagcagaaattgacttatctggagtgttctagcaatttttaggtcatttagcagaacagtaagcttccagaggaaacctacacttctatcctttgggcctggcctgttctgtttctgggttctttccgcagtcaagtacaccgagtaacaggttaaagaatggcagtttcacctggcctttacagggacacttacttctttcagaagtcattaagtcggcttttattattcctaaacaaaagagctttattttctcatgagtaggttttagagttttaattgttgacaatttttcagttactaatagaaccccagtcatttcattttatttttccaaggacaagagtctattaagggaaccattaactattcagtacagtgaattactttcagattactaaggaaaaggaaagtgagcagttataagatgccaaacacctatctatctgcctgaaatatgcacctttcaggttggacctaataacattcacctccccttgctgaaaagccttccaacacccacgaggccatctcagtttccatgctaccttttctgtaactctactaataaccaaaccacatcatgtgttcaccaaactgagttatcccagtaactaccattatcatctttgtctccactggcctggcacacaaggtattcagtaaatacgttgaatgaagaatatgaagatgcgtggtttttcttttttcacttattactaacccagcttgggcctttgcatgggaagagaaaaaggcttgctgggacttcagataattttatcatacaggtaaagcagtggttctcaacatctggagacatttttggttgtcattccaagatggtgctgttgccatctagtgtgtggaggccagggatgctgctacaatcaaccctatcaacagagaatgatccagcccaaaacatcaactgaagtcgagaagctccatcattttggcaatatgaataacaatctaaatcaccaccctagttcctttaacacatcatctaccttagtctgtctccttcatactctgaagagtcagtgtttatctgtggtaaacaacagcatctgccgtgaggctcatcactgtcaggggaaagggccttatatgtaaacactttatcatttcaactacacaaaaattatttactaaagcacctactctacctgacagttcacttactcccttataactgctgcta

SEQ ID NO: 307054 - DNA, 2688 bp, Homo sapiens
aacatactgagttaacacattttcctagtagtgatagaattttcagggaagcaagaaaccaagaaaattctggctgctacctaattttaatgaagtggcgattatctgcccacaaggtatgagaagtatagatgtgcattgctctacaaatatacaacgcaataaggcccactcgaaattcatgaaaggcttgccaagccacatggcttgattggtcgtaggtagatgcatgatgtccctcttagaatgaggcccatgtttaaaatccacatttacaaaaggagtaggtacaattgtgatgttttgaggtaaccaaagtgtgtcatgaaaaagaacgtcaagaagaaaggcagaggaactcatgagtttgaatggttaaactgaaggcaagaaaaagtcctaagaataaaactgaaaaatattttaatatgcctatgtatctttcacagagtggattcaactgcacataagaagaacataatgttgaagtcatttcagagtgcaaatatcattgaattgcttcattatcaccagtgtgactctcgatcatcaacaaaagcagaaattctgaaatgtttgctaaacctgcaaattcagcatattgatgccaggtttgctgtcctcctaacagacaagcctactatccccagagaagtctttgaaaataatggaatccttgttacagatgtaaataactttatagaaaacatagaaaaaatagcagctccatttaggagtagctattggtgactcaactacagcctgcctggatatggatgatgccaataaaaaattagtattttccctttggaaaacttgtgaacatgtgaatacacatgtgaacagtcttacatttgaaaaaccaatgttctacaacttggaaagttttcattttttatattttgctgaaatatgtcacagtggcattgcagttgtctgttagctttgggttgcagtgctagatattgttttaaattattttcattttaaacaagatgccttctaagctattgagcttattaaaaataattttacatgtttacttagttggagcaaaaataagtctattttaacaaatagctttgtttttgcatgctaatgtcagaaaggcatacgatgcacattatgctctgttttaaaggttttaccacccttgtaaaaactataatcttaaatggttttatttgctgttacacaaacaacactacataaaacattttttcctaaatggtacaaatttataaactatcatttttcacttacggtatttgtaaatactacactacaaaaatcagctttctgagaaagaaataatcatttatttatgatattgaaaatttctacagtaaacactcaaaaccaagcaaaaaacatttgtaagatacacggtatctatttggagcaacggtttttgtaactaatgtgtttcattttttaaataaagacaactaaaaataaatctctttctgcaatgatttttatagcagaaattgacttatctggagtgttctagcaatttttaggtcatttagcagaacagtaagcttccagaggaaacctacacttctatcctttgggcctggcctgttctgtttctgggttctttccgcagtcaagtacaccgagtaacaggttaaagaatggcagtttcacctggcctttacagggacacttacttctttcagaagtcattaagtcggcttttattattcctaaacaaaagagctttattttctcatgagtaggttttagagttttaattgttgacaatttttcagttactaatagaaccccagtcatttcattttatttttccaaggacaagagtctattaagggaaccattaactattcagtacagtgaattactttcagattactaaggaaaaggaaagtgagcagttataagatgccaaacacctatctatctgcctgaaatatgcacctttcaggttggacctaataacattcacctccccttgctgaaaagccttccaacacccacgaggccatctcagtttccatgctaccttttctgtaactctactaataaccaaaccacatcatgtgttcaccaaactgagttatcccagtaactaccattatcatctttgtctccactggcctggcacacaaggtattcagtaaatacgttgaatgaagaatatgaagatgcgtggtttttcttttttcacttattactaacccagcttgggcctttgcatgggaagagaaaaaggcttgctgggacttcagataattttatcatacaggtaaagcagtggttctcaacatctggagacatttttggttgtcattccaagatggtgctgttgccatctagtgtgtggaggccagggatgctgctacaatcaaccctatcaacagagaatgatccagcccaaaacatcaactgaagtcgagaagctccatcattttggcaatatgaataacaatctaaatcaccaccctagttcctttaacacatcatctaccttagtctgtctccttcatactctgaagagtcagtgtttatctgtggtaaacaacagcatctgccgtgaggctcatcactgtcaggggaaagggccttatatgtaaacactttatcatttcaactacacaaaaattatttactaaagcacctactctacctgacagttcacttactcccttataactgctgcta

SEQ ID NO: 307055 - DNA, 1884 bp, Homo sapiens
caacttggaaagttttagaacattggtttttcaaatgtaagactgttcacatgtgtattcaatgttctacaacttggaaagttttcattttttatattttgctgaaatatgtcacagtggcattgcagttgtctgttagctttgggttgcagtgctagatattgttttaaattattttcattttaaacaagatgccttctaagctattgagcttattaaaaataattttacatgtttacttagttggagcaaaaataagtctattttaacaaatagctttgtttttgcatgctaatgtcagaaaggcatacgatgcacattatgctctgttttaaaggttttaccacccttgtaaaaactataatcttaaatggttttatttgctgttacacaaacaacactacataaaacattttttcctaaatggtacaaatttataaactatcatttttcacttacggtatttgtaaatactacactacaaaaatcagctttctgagaaagaaataatcatttatttatgatattgaaaatttctacagtaaacactcaaaaccaagcaaaaaacatttgtaagatacacggtatctatttggagcaacggtttttgtaactaatgtgtttcattttttaaataaagacaactaaaaataaatctctttctgcaatgatttttatagcagaaattgacttatctggagtgttctagcaatttttaggtcatttagcagaacagtaagcttccagaggaaacctacacttctatcctttgggcctggcctgttctgtttctgggttctttccgcagtcaagtacaccgagtaacaggttaaagaatggcagtttcacctggcctttacagggacacttacttctttcagaagtcattaagtcggcttttattattcctaaacaaaagagctttattttctcatgagtaggttttagagttttaattgttgacaatttttcagttactaatagaaccccagtcatttcattttatttttccaaggacaagagtctattaagggaaccattaactattcagtacagtgaattactttcagattactaaggaaaaggaaagtgagcagttataagatgccaaacacctatctatctgcctgaaatatgcacctttcaggttggacctaataacattcacctccccttgctgaaaagccttccaacacccacgaggccatctcagtttccatgctaccttttctgtaactctactaataaccaaaccacatcatgtgttcaccaaactgagttatcccagtaactaccattatcatctttgtctccactggcctggcacacaaggtattcagtaaatacgttgaatgaagaatatgaagatgcgtggtttttcttttttcacttattactaacccagcttgggcctttgcatgggaagagaaaaaggcttgctgggacttcagataattttatcatacaggtaaagcagtggttctcaacatctggagacatttttggttgtcattccaagatggtgctgttgccatctagtgtgtggaggccagggatgctgctacaatcaaccctatcaacagagaatgatccagcccaaaacatcaactgaagtcgagaagctccatcattttggcaatatgaataacaatctaaatcaccaccctagttcctttaacacatcatctaccttagtctgtctccttcatactctgaagagtcagtgtttatctgtggtaaacaacagcatctgccgtgaggctcatcactgtcaggggaaagggccttatatgtaaacactttatcatttcaactacacaaaaattatttactaaagcacctactctacctgacagttcacttactcccttataactgctgcta

SEQ ID NO: 307056 - DNA, 1632 bp, Homo sapiens
cacacgcagcgttttgataaattattggttttcaaaaaaaaaaaaaaaaaaaaaaactcgatgcacattatgctctgttttaaaggttttaccacccttgtaaaaactataatcttaaatggttttatttgctgttacacaaacaacactacataaaacattttttcctaaatggtacaaatttataaactatcatttttcacttacggtatttgtaaatactacactacaaaaatcagctttctgagaaagaaataatcatttatttatgatattgaaaatttctacagtaaacactcaaaaccaagcaaaaaacatttgtaagatacacggtatctatttggagcaacggtttttgtaactaatgtgtttcattttttaaataaagacaactaaaaataaatctctttctgcaatgatttttatagcagaaattgacttatctggagtgttctagcaatttttaggtcatttagcagaacagtaagcttccagaggaaacctacacttctatcctttgggcctggcctgttctgtttctgggttctttccgcagtcaagtacaccgagtaacaggttaaagaatggcagtttcacctggcctttacagggacacttacttctttcagaagtcattaagtcggcttttattattcctaaacaaaagagctttattttctcatgagtaggttttagagttttaattgttgacaatttttcagttactaatagaaccccagtcatttcattttatttttccaaggacaagagtctattaagggaaccattaactattcagtacagtgaattactttcagattactaaggaaaaggaaagtgagcagttataagatgccaaacacctatctatctgcctgaaatatgcacctttcaggttggacctaataacattcacctccccttgctgaaaagccttccaacacccacgaggccatctcagtttccatgctaccttttctgtaactctactaataaccaaaccacatcatgtgttcaccaaactgagttatcccagtaactaccattatcatctttgtctccactggcctggcacacaaggtattcagtaaatacgttgaatgaagaatatgaagatgcgtggtttttcttttttcacttattactaacccagcttgggcctttgcatgggaagagaaaaaggcttgctgggacttcagataattttatcatacaggtaaagcagtggttctcaacatctggagacatttttggttgtcattccaagatggtgctgttgccatctagtgtgtggaggccagggatgctgctacaatcaaccctatcaacagagaatgatccagcccaaaacatcaactgaagtcgagaagctccatcattttggcaatatgaataacaatctaaatcaccaccctagttcctttaacacatcatctaccttagtctgtctccttcatactctgaagagtcagtgtttatctgtggtaaacaacagcatctgccgtgaggctcatcactgtcaggggaaagggccttatatgtaaacactttatcatttcaactacacaaaaattatttactaaagcacctactctacctgacagttcacttactcccttataactgctgcta

SEQ ID NO: 307057 - DNA, 2453 bp, Homo sapiens
gtatatccctcagtgtcagaagaaccagtagaaaataaggagagaaagggggataatttacaaccagttactttaatactttctaaagaaaattgcacccttgagattgcagaggaaattaatgtgacctctgattttccctttgattctgtaattgaagaagtatcaccagcgtctagtcctgaacctccagtaccagttaaagagacacgaccatatcaggctgtgactccatgcattttaaaacttcatggtacacagtgtgagaagagcaaccaaatctcccaatgtgagtcagaagacttaggcataacagaaaaagaaaatgtttttgttggtcctacccatccagtggggcaagataactttacccaggtacaacaaatgcaggtctctgccgaaatgcctctaatattaactgatcatccaggaagaacaggtagaccaacccttcctggtaaagtaactgaggaaattgtctcaagtgagcatgatgagggtttatctttctcaggaaaggtgcagtgctatggtagggagttaaaccagcctgcctcagctgccaaatgcacaggtgacttcagtccttctcctgaaaaactggtaaaatcaggaaatccattgcagccagttagtatagagaatagaaatttggacttaaaacatcttgtcttggagtccagtgaacctccatttggtcctagaaatgttattgaaaataagtctttgtctgacacattggtttccacaactgcaccaagtggtatagtgaatgtgtcagtaaaacagcagactagccctaaaagcagtcagaaccatctctttcccggtgatttgaaaacagatgaaggcatttatctgcaggtgaagtccttgacagctgcctcggttgatggagcttattctacacagggatgcatgtgctcagtggtccccacgctttgttcttcctcagacaatgctacattaacccattatgtaagaccaataaatgcagagccagcgtttcaagcacaggaaataccagcaggcagaatggccagtttgcttaagaatggtgagcctgaagctgagttacataaagaaaccacaggtccaggcactgctggccctcagtccaacaccacatcttctctaaaaggtgaacgcaaagccatccacacgctgcaagatgtgtcaacatgtgaaacaaaggagctattgaatgtcggggtttcctccctttgtgctggtccctaccaaaatacagcagacaccaaggaaaacctcagtaaagagcctttggcctcctttgtttcagaatcctttgatacttctgtttgtggaatagccacagagcacgtagaaattgagaacagtggggaggggctcagggctgaggctggttctgaaaccctaggcagagatggagaggtcggtgtgaattccgacatgcactatgaactctctggagattctgatctagacctgcttggtgattgtagaaatcccagactggatttggaggattcttatactttaagaggtagttacaccaggaaaaaagatgttcccacagatggctatgagtcgtcgttgaacttccacaacaacaaccaagaggactggggctgctctagctgggttccaggcatggagacgagcctccctcccgggcactggactgctgcggtaaagaaagaagagaagtgtgtgccgccttacgtccaaatccgagatctccacgggatcctcaggacttacgccaacttctctataacaaaagaactcaaagataccatgagaacttcacacggcctgaggaggcacccgagtttcagtgcaaactgtggcctgcccagctcctggacaagcacttggcaggtggcagacgacctcacccagaacactttagacctggagtatctgcgttttgcacataaactaaaacagaccataaagaatggggattctcagcattctgcctcctctgccaatgtctttccaaaggagtcaccaacccagatctccattggtgctttcccttcgacaaaaatctctgaggccccatttctgcatcctgcacctaggagcagaagcccccttctggtaacagttgtggagtcagatcccagaccacaggggcagcccaggagaggctacacagccagcagtctggacagctcttcctcttggagagagagatgtagtcataatagagatcttagaaattctcaaagaaatcacactgtttcattccacctcaacaaactgaaatacaacagtaacctctgcagacttaaatgtccctgtgtgacagctttgaagagagcagtggttctcccagcacgcagcttgagatctgagaacgggcagactgcctcctcaagtgagtccctgacacctgacccccaagcagcctaactaactgggaggcaccccccagtaggggcagactgacacatcacatgccg

SEQ ID NO: 307058 - DNA, 746 bp, Homo sapiens
ctggcattatgtaacaggcgttatgtattattgagaactcattagaaaactcttcatatcctttgaccttttgtggaatttacccaaaattctaggtggttatcagtcattgcaaaaccaacctcagttccatctctaggagggagatatgcagactacagttaaatattttaaagtttatacaaaataatgcccacccaaaacttacacaatagaagcatgtaaaaagtttctattcatagaaagagggatggcataaaagttggtatcatgtaactatgttcagtatgatgtcataaaaaatttatacaggaaaaagtgaaaggaaattaattcatgatgttaagagtgattatcactagggttatgggaatgggtgtgatttgggttttctccaacaagcatgagaatgtaagtgatgaaaactagagagacgggagtcgagcagagacagaaatgctaaaaatttaaacatactgagttaacacattttcctagtagtgatagaattttcagggaagcaagaaaccaagaaaattctggctgctacctaattttaatgaagtggcgattatctgcccacaaggtatgagaagtatagatgtgcattgctctacaaatatacaacgcaataaggcccactcgaaattcatgaaaggcttgccaagccacatggcttgattggtcgtaggtagatgcatgatgtccctcttagaatgaggcccatgtttaaaatccacatttac

SEQ ID NO: 307059 - DNA, 412 bp, Homo sapiens
taagaagtgttgtgaaagaggcttgtaaaagtaccttcctgttctaccttgtcgaaacagaagacaaatcattctttgtaagaacaaaggtaaagtgccagccacgtcttacgtattattttaattgctgattttagttttagaaataataaatttagcatattagccatcaaaaagaaatcatggtatgacatagtatttaaatttcacagcttagtctttatctgcatactaaatgttttcctgcaggatctgccatttgtactatatttgaaaattagtattatgttccagaattagggcaatgactaattttttttcacaaaaagttaccagtgtagacatgcccatacttcaagtgtaaatacaaacacattccgatgttaaaatacagattttttgaaaagtggtt

SEQ ID NO: 307060 - DNA, 3711 bp, Homo sapiens
gcgtgtgtgtaagtgcatgtgtgtggagtgtgtgtgtggggtatgtgtgcatatgtgtattggtgtgtgagaccgtatgagtgcatgtgtgtggagtgtgtgtgcagtatgtgtgtgtgtgtgtgtgtgtgtctccctctctcacacacacaagagcagtttgctgttgctgtttcctaccttctgaggcttcaaagtattttttaaaatctatgctttgtggcagctctacggtgcttatctctgtctttgtgtcaatccttaagtacccatgtctttttcatgtctaaccattgggaaggtagaggctggcagggaagacaaatctgctacaagtccatgggaagaccctacaatgaaatgttcattggttggtatactgttttagtcttgaattgccaactttccaactgatctatccatattccttaagtactaaagacaaaatagagggcttctttttctctcttaatgtcttgccttctggttttcctggtttgcaagactaagtgtacctaatctcaccatctcttcacttctagctctctgaaacaagggtcacactactcagagggataaccccttacagtggtctgaggagtaactatttcctaaagtattctaaaagagtaggaagagagaaatggtagcctgctgcttctcacagacacctcacatcctcacttgggatggcatccacatagaaaccctgcatttaggtaaaatttgcctgactgaaggggactcagtcctccaaatcaaggtcaagaagatatctgcatgagaccttaagaactctttattgccattatttggagagggcgggggaattgtcctaatcacacatttaacacagggaataagtgctgaagtgacccagatcaccaagcgcagttcctcatcatactttatttttgctttccttattccttggcactgactaagctaaagttaagaagccgacttcataagccaacccctgtgatgggatggaaaaatgggcttttgcagagggtttattaatagagatggatatactactcacaagttctggctcatggctccactgagaaggccatagtaataaaatgatcttatgaacactgttccccaaaggccaaagcctgaagatattgccccttataatccaatcagccttatattttaataagtcctgaatcaacctgactacggatatatggggccaccagggtgcatgggtgcatgtctgctcagcctagccctggaagtgagcactgccggccacagatcctgggaaaggtggtagtaacccagaagatgtagccttgaagggaggatacctatcaaaatgccaaagctgcagggacacgaagacggttgaaaattcaacctatgtatactagatccttccagtttgatggtttggtcattcttcttcatgattataccatggagaattttctgtgacaagggtggtcatggaagtaagtgagtgatcccctggtttctcattccttaaagcagtggttcgcaaagtatggcacaagaccagcagcatcagcagcctttgggaacttgttagaaacgaaaattctcaatcccatcccagatctgctgaatcagaaactctaatgagaggacccggcaatccacgttttaataagccctcctggtgattctgatgcacactaaattcaactgttttaaagggaaagccctttatagtattggagttcccacactgagaggctttggggcccaaaataagaaggttctaggttgtcattcagactttaacattaatttcaaagtcacctttctcatgcttccttgtgtttctgtttttccatttatgattttaacaaagaaaggtatgtgtgcttttgggtggaagttaggagaatgtttgtgtctttcctagttgaatacaaccttcagagaaaaaccttatgccttggaaattactacctggcacacaaaggggcttcaacaaggaaaagcagttggaggtctcttccagattgctcttctgccgaattatttgtatctattccgagctgattatgtaataggatggaaaaagtaaaaaaaaaaaaaaaaaatctaatttgtatttccatgacaacgtgttctcccagcaacatccctctcctttatttgagttataaagggcactgctgggcctgagaaccaggccagaacctccttctgtatggcagctaacagtgtagggctccagtatcccaggaaggccccttatccacactccactcagctcataggagagtcttgcataatgaagacacagacctgggcacttcagtccttgtgctcctcctctcttttccccacagcaggacctggatacagaagtactcagccaaggtgacagaataaaatcctttttttgttgttttctgtttgtttgtttgttttggagaaggagtctcgctttgtcacccaggctggtgtgcagtggcacgatctcggctcactgcaacctccgcctcccaggttcaagcgattctcctgtctcagcctcctgagtagctgggattacagacgtgcgccatcacgcccagctaatttttgtatttttagtagatacggagttttgccttgttggccaggctgtgctggagctcctgacctcaggtgattcacctgccacagcctcccaaagtgctgggattacaggcgtgagccacagcaccctgccaaataagatcctttttaaaaaatatctgaaaaaagcttcatatctttacaaactcataaaatagctgattgggccatggaggagatgaggctgtttagaactggttttgtttcaagtttgtcaattttccctgtatgagaacttgggtaaagcacaaagaaacatacagtgctagtaacaggtctcctgcgccctggaactaagtgtttggaggaaggactaaaccccgggggaggtgagtataaaataattccactaagatcacctcctcagtccccagaaggctgatggtggatcctctggccatctcctgtggggtcttactgctcctctgccatttctctatgcctgaagacacgaagatgatatcaaggcagagctaccatatcgcagccagtctctaggctactgctgtgcagtggctcccactttctaatgcttttttgtttttgctttttctaacaaaacaatcttttttcaaaatgaattccaacccctgctagcttccttccccgcctccatactgttttaggcagcaccgtttatgtgacagagtccgtgtttctcaaatgcatggtgttcctcaggtggagagtgggcagaagtttttgcaacactttttttttaagttattgggtgcaaaatcccaaaccaggatatgtgtatgtctgtgtgtttatgttttttatttgaccctcccctctttcaacctacccccttttatatctaatgtagaaaaagcgaaattgaatctggaaagcaaactgttgtatatagttgcggtaacaatcatgaagagagagccgggctgtcccctcagtaattcattttaaataacaaattatttaaaaataaaattcatgccagagccagctgaagaggccttccttcatcaccactgaggccacccccaatctgggccctctgtccatctggcatgtctcctcccagcaagattcatctgttcaatgccatttgcgtttcaataaagttatctcctgtactgtcca

SEQ ID NO: 307061 - DNA, 3882 bp, Homo sapiens
gcgtgtgtgtaagtgcatgtgtgtggagtgtgtgtgtggggtatgtgtgcatatgtgtattggtgtgtgagaccgtatgagtgcatgtgtgtggagtgtgtgtgcagtatgtgtgtgtgtgtgtgtgtgtgtctccctctctcacacacacaagagcagtttgctgttgctgtttcctaccttctgaggcttcaaagtattttttaaaatctatgctttgtggcagctctacggtgcttatctctgtctttgtgtcaatccttaagtacccatgtctttttcatgtctaaccattgggaaggtagaggctggcagggaagacaaatctgctacaagtccatgggaagaccctacaatgaaatgttcattggttggtatactgttttagtcttgaattgccaactttccaactgatctatccatattccttaagtactaaagacaaaatagagggcttctttttctctcttaatgtcttgccttctggttttcctggtttgcaagactaagtgtacctaatctcaccatctcttcacttctagctctctgaaacaagggtcacactactcagagggataaccccttacagtggtctgaggagtaactatttcctaaagtattctaaaagagtaggaagagagaaatggtagcctgctgcttctcacagacacctcacatcctcacttgggatggcatccacatagaaaccctgcatttaggtaaaatttgcctgactgaaggggactcagtcctccaaatcaaggtcaagaagatatctgcatgagaccttaagaactctttattgccattatttggagagggcgggggaattgtcctaatcacacatttaacacagggaataagtgctgaagtgacccagatcaccaagcgcagttcctcatcatactttatttttgctttccttattccttggcactgactaagctaaagttaagaagccgacttcataagccaacccctgtgatgggatggaaaaatgggcttttgcagagggtttattaatagagatggatatactactcacaagttctggctcatggctccactgagaaggccatagtaataaaatgatcttatgaacactgttccccaaaggccaaagcctgaagatattgccccttataatccaatcagccttatattttaataagtcctgaatcaacctgactacggatatatggggccaccagggtgcatgggtgcatgtctgctcagcctagccctggaagtgagcactgccggccacagatcctgggaaaggtggtagtaacccagaagatgtagccttgaagggaggatacctatcaaaatgccaaagctgcagggacacgaagacggttgaaaattcaacctatgtatactagatccttccagtttgatggtttggtcattcttcttcatgattataccatggagaattttctgtgacaagggtggtcatggaagtaagtgagtgatcccctggtttctcattccttaaagcagtggttcgcaaagtatggcacaagaccagcagcatcagcagcctttgggaacttgttagaaacgaaaattctcaatcccatcccagatctgctgaatcagaaactctaatgagaggacccggcaatccacgttttaataagccctcctggtgattctgatgcacactaaattcaactgttttaaagggaaagccctttatagtattggagttcccacactgagaggctttggggcccaaaataagaaggttctaggttgtcattcagactttaacattaatttcaaagtcacctttctcatgcttccttgtgtttctgtttttccatttatgattttaacaaagaaaggtatgtgtgcttttgggtggaagttaggagaatgtttgtgtctttcctagttgaatacaaccttcagagaaaaaccttatgccttggaaattactacctggcacacaaaggggcttcaacaaggaaaagcagttggaggtctcttccagattgctcttctgccgaattatttgtatctattccgagctgattatgtaataggatggaaaaagtaaaaaaaaaaaaaaaaaatctaatttgtatttccatgacaacgtgttctcccagcaacatccctctcctttatttgagttataaagggcactgctgggcctgagaaccaggccagaacctccttctgtatggcagctaacagtgtagggctccagtatcccaggaaggccccttatccacactccactcagctcataggagagtcttgcataatgaagacacagacctgggcacttcagtccttgtgctcctcctctcttttccccacagcaggacctggatacagaagtactcagccaaggtgacagaataaaatcctttttttgttgttttctgtttgtttgtttgttttggagaaggagtctcgctttgtcacccaggctggtgtgcagtggcacgatctcggctcactgcaacctccgcctcccaggttcaagcgattctcctgtctcagcctcctgagtagctgggattacagacgtgcgccatcacgcccagctaatttttgtatttttagtagatacggagttttgccttgttggccaggctgtgctggagctcctgacctcaggtgattcacctgccacagcctcccaaagtgctgggattacaggcgtgagccacagcaccctgccaaataagatcctttttaaaaaatatctgaaaaaagcttcatatctttacaaactcataaaatagctgattgggccatggaggagatgaggctgtttagaactggttttgtttcaagtttgtcaattttccctgtatgagaacttgggtaaagcacaaagaaacatacagtgctagtaacaggtctcctgcgccctggaactaagtgtttggaggaaggactaaaccccgggggaggtgagtataaaataattccactaagatcacctcctcagtccccagaaggctgatggtggatcctctggccatctcctgtggggtcttactgctcctctgccatttctctatgcctgaagacacgaagatgatatcaaggcagagctaccatatcgcagccagtctctaggctactgctgtgcagtggctcccactttctaatgcttttttgtttttgctttttctaacaaaacaatcttttttcaaaatgaattccaacccctgctagcttccttccccgcctccatactgttttaggcagcaccgtttatgtgacagagtccgtgtttctcaaatgcatggtgttcctcaggtggagagtgggcagaagtttttgcaacactttttttttaagttattgggtgcaaaatcccaaaccaggatatgtgtatgtctgtgtgtttatgttttttatttgaccctcccctctttcaacctacccccttttatatctaatgtagaaaaagcgaaattgaatctggaaagcaaactgttgtatatagttgcggtaacaatcatgaagagagagccgggctgtcccctcagtaattcattttaaataacaaattatttaaaaataaaattcatgccagagccagctgaagaggccttccttcatcaccactgaggccacccccaatctgggccctctgtccatctggcatgtctcctcccagcaagattcatctgttcaatgccatttgcgtttcaataaagttatctcctgtactgtccaaaaaaaaaaaaaaaaaaaaaaggggggcggaaaaatcccgaggggccagtaagcgaccccgttttggcaaggccccaaggggggaaaaaagagacggggcgtcaaaggcgggggaacggctgggcttggagagacctccgggggcaggggacccacagaaccggaaaaaag

SEQ ID NO: 307062 - DNA, 3673 bp, Homo sapiens
gcgtgtgtgtaagtgcatgtgtgtggagtgtgtgtgtggggtatgtgtgcatatgtgtattggtgtgtgagaccgtatgagtgcatgtgtgtggagtgtgtgtgcagtatgtgtgtgtgtgtgtgtgtgtgtctccctctctcacacacacaagagcagtttgctgttgctgtttcctaccttctgaggcttcaaagtattttttaaaatctatgctttgtggcagctctacggtgcttatctctgtctttgtgtcaatccttaagtacccatgtctttttcatgtctaaccattgggaaggtagaggctggcagggaagacaaatctgctacaagtccatgggaagaccctacaatgaaatgttcattggttggtatactgttttagtcttgaattgccaactttccaactgatctatccatattccttaagtactaaagacaaaatagagggcttctttttctctcttaatgtcttgccttctggttttcctggtttgcaagactaagtgtacctaatctcaccatctcttcacttctagctctctgaaacaagggtcacactactcagagggataaccccttacagtggtctgaggagtaactatttcctaaagtattctaaaagagtaggaagagagaaatggtagcctgctgcttctcacagacacctcacatcctcacttgggatggcatccacatagaaaccctgcatttaggtaaaatttgcctgactgaaggggactcagtcctccaaatcaaggtcaagaagatatctgcatgagaccttaagaactctttattgccattatttggagagggcgggggaattgtcctaatcacacatttaacacagggaataagtgctgaagtgacccagatcaccaagcgcagttcctcatcatactttatttttgctttccttattccttggcactgactaagctaaagttaagaagccgacttcataagccaacccctgtgatgggatggaaaaatgggcttttgcagagggtttattaatagagatggatatactactcacaagttctggctcatggctccactgagaaggccatagtaataaaatgatcttatgaacactgttccccaaaggccaaagcctgaagatattgccccttataatccaatcagccttatattttaataagtcctgaatcaacctgactacggatatatggggccaccagggtgcatgggtgcatgtctgctcagcctagccctggaagtgagcactgccggccacagatcctgggaaaggtggtagtaacccagaagatgtagccttgaagggaggatacctatcaaaatgccaaagctgcagggacacgaagacggttgaaaattcaacctatgtatactagatccttccagtttgatggtttggtcattcttcttcatgattataccatggagaattttctgtgacaagggtggtcatggaagtaagtgagtgatcccctggtttctcattccttaaagcagtggttcgcaaagtatggcacaagaccagcagcatcagcagcctttgggaacttgttagaaacgaaaattctcaatcccatcccagatctgctgaatcagaaactctaatgagaggacccggcaatccacgttttaataagccctcctggtgattctgatgcacactaaattcaactgttttaaagggaaagccctttatagtattggagttcccacactgagaggctttggggcccaaaataagaaggttctaggttgtcattcagactttaacattaatttcaaagtcacctttctcatgcttccttgtgtttctgtttttccatttatgattttaacaaagaaaggtatgtgtgcttttgggtggaagttaggagaatgtttgtgtctttcctagttgaatacaaccttcagagaaaaaccttatgccttggaaattactacctggcacacaaaggggcttcaacaaggaaaagcagttggaggtctcttccagattgctcttctgccgaattatttgtatctattccgagctgattatgtaataggatggaaaaagtaaaaaaaaaaaaaaaaaatctaatttgtatttccatgacaacgtgttctcccagcaacatccctctcctttatttgagttataaagggcactgctgggcctgagaaccaggccagaacctccttctgtatggcagctaacagtgtagggctccagtatcccaggaaggccccttatccacactccactcagctcataggagagtcttgcataatgaagacacagacctgggcacttcagtccttgtgctcctcctctcttttccccacagcaggacctggatacagaagtactcagccaaggtgacagaataaaatcctttttttgttgttttctgtttgtttgtttgttttggagaaggagtctcgctttgtcacccaggctggtgtgcagtggcacgatctcggctcactgcaacctccgcctcccaggttcaagcgattctcctgtctcagcctcctgagtagctgggattacagacgtgcgccatcacgcccagctaatttttgtatttttagtagatacggagttttgccttgttggccaggctgtgctggagctcctgacctcaggtgattcacctgccacagcctcccaaagtgctgggattacaggcgtgagccacagcaccctgccaaataagatcctttttaaaaaatatctgaaaaaagcttcatatctttacaaactcataaaatagctgattgggccatggaggagatgaggctgtttagaactggttttgtttcaagtttgtcaattttccctgtatgagaacttgggtaaagcacaaagaaacatacagtgctagtaacaggtctcctgcgccctggaactaagtgtttggaggaaggactaaaccccgggggaggtgagtataaaataattccactaagatcacctcctcagtccccagaaggctgatggtggatcctctggccatctcctgtggggtcttactgctcctctgccatttctctatgcctgaagacacgaagatgatatcaaggcagagctaccatatcgcagccagtctctaggctactgctgtgcagtggctcccactttctaatgcttttttgtttttgctttttctaacaaaacaatcttttttcaaaatgaattccaacccctgctagcttccttccccgcctccatactgttttaggcagcaccgtttatgtgacagagtccgtgtttctcaaatgcatggtgttcctcaggtggagagtgggcagaagtttttgcaacactttttttttaagttattgggtgcaaaatcccaaaccaggatatgtgtatgtctgtgtgtttatgttttttatttgaccctcccctctttcaacctacccccttttatatctaatgtagaaaaagcgaaattgaatctggaaagcaaactgttgtatatagttgcggtaacaatcatgaagagagagccgggctgtcccgttgttttgagacagagtctcagtctgtcgcccaggctggagtgcagtggtgcgatctcggctcactgcaacctccgcctcctgggttcaagcaattctcctgcctcagcctcccgagtagctgggattacaggcacctgccaccatgcctggctaa

SEQ ID NO: 307063 - DNA, 3443 bp, Homo sapiens
gcgtgtgtgtaagtgcatgtgtgtggagtgtgtgtgtggggtatgtgtgcatatgtgtattggtgtgtgagaccgtatgagtgcatgtgtgtggagtgtgtgtgcagtatgtgtgtgtgtgtgtgtgtgtgtctccctctctcacacacacaagagcagtttgctgttgctgtttcctaccttctgaggcttcaaagtattttttaaaatctatgctttgtggcagctctacggtgcttatctctgtctttgtgtcaatccttaagtacccatgtctttttcatgtctaaccattgggaaggtagaggctggcagggaagacaaatctgctacaagtccatgggaagaccctacaatgaaatgttcattggttggtatactgttttagtcttgaattgccaactttccaactgatctatccatattccttaagtactaaagacaaaatagagggcttctttttctctcttaatgtcttgccttctggttttcctggtttgcaagactaagtgtacctaatctcaccatctcttcacttctagctctctgaaacaagggtcacactactcagagggataaccccttacagtggtctgaggagtaactatttcctaaagtattctaaaagagtaggaagagagaaatggtagcctgctgcttctcacagacacctcacatcctcacttgggatggcatccacatagaaaccctgcatttaggtaaaatttgcctgactgaaggggactcagtcctccaaatcaaggtcaagaagatatctgcatgagaccttaagaactctttattgccattatttggagagggcgggggaattgtcctaatcacacatttaacacagggaataagtgctgaagtgacccagatcaccaagcgcagttcctcatcatactttatttttgctttccttattccttggcactgactaagctaaagttaagaagccgacttcataagccaacccctgtgatgggatggaaaaatgggcttttgcagagggtttattaatagagatggatatactactcacaagttctggctcatggctccactgagaaggccatagtaataaaatgatcttatgaacactgttccccaaaggccaaagcctgaagatattgccccttataatccaatcagccttatattttaataagtcctgaatcaacctgactacggatatatggggccaccagggtgcatgggtgcatgtctgctcagcctagccctggaagtgagcactgccggccacagatcctgggaaaggtggtagtaacccagaagatgtagccttgaagggaggatacctatcaaaatgccaaagctgcagggacacgaagacggttgaaaattcaacctatgtatactagatccttccagtttgatggtttggtcattcttcttcatgattataccatggagaattttctgtgacaagggtggtcatggaagtaagtgagtgatcccctggtttctcattccttaaagcagtggttcgcaaagtatggcacaagaccagcagcatcagcagcctttgggaacttgttagaaacgaaaattctcaatcccatcccagatctgctgaatcagaaactctaatgagaggacccggcaatccacgttttaataagccctcctggtgattctgatgcacactaaattcaactgttttaaagggaaagccctttatagtattggagttcccacagtctcttccagattgctcttctgccgaattatttgtatctattccgagctgattatgtaataggatggaaaaagtaaaaaaaaaaaaaaaaaatctaatttgtatttccatgacaacgtgttctcccagcaacatccctctcctttatttgagttataaagggcactgctgggcctgagaaccaggccagaacctccttctgtatggcagctaacagtgtagggctccagtatcccaggaaggccccttatccacactccactcagctcataggagagtcttgcataatgaagacacagacctgggcacttcagtccttgtgctcctcctctcttttccccacagcaggacctggatacagaagtactcagccaaggtgacagaataaaatcctttttttgttgttttctgtttgtttgtttgttttggagaaggagtctcgctttgtcacccaggctggtgtgcagtggcacgatctcggctcactgcaacctccgcctcccaggttcaagcgattctcctgtctcagcctcctgagtagctgggattacagacgtgcgccatcacgcccagctaatttttgtatttttagtagatacggagttttgccttgttggccaggctgtgctggagctcctgacctcaggtgattcacctgccacagcctcccaaagtgctgggattacaggcgtgagccacagcaccctgccaaataagatcctttttaaaaaatatctgaaaaaagcttcatatctttacaaactcataaaatagctgattgggccatggaggagatgaggctgtttagaactggttttgtttcaagtttgtcaattttccctgtatgagaacttgggtaaagcacaaagaaacatacagtgctagtaacaggtctcctgcgccctggaactaagtgtttggaggaaggactaaaccccgggggaggtgagtataaaataattccactaagatcacctcctcagtccccagaaggctgatggtggatcctctggccatctcctgtggggtcttactgctcctctgccatttctctatgcctgaagacacgaagatgatatcaaggcagagctaccatatcgcagccagtctctaggctactgctgtgcagtggctcccactttctaatgcttttttgtttttgctttttctaacaaaacaatcttttttcaaaatgaattccaacccctgctagcttccttccccgcctccatactgttttaggcagcaccgtttatgtgacagagtccgtgtttctcaaatgcatggtgttcctcaggtggagagtgggcagaagtttttgcaacactttttttttaagttattgggtgcaaaatcccaaaccaggatatgtgtatgtctgtgtgtttatgttttttatttgaccctcccctctttcaacctacccccttttatatctaatgtagaaaaagcgaaattgaatctggaaagcaaactgttgtatatagttgcggtaacaatcatgaagagagagccgggctgtcccctcagtaattcattttaaataacaaattatttaaaaataaaattcatgccagagccagctgaagaggccttccttcatcaccactgaggccacccccaatctgggccctctgtccatctggcatgtctcctcccagcaagattcatctgttcaatgccatttgcgtttcaataaagttatctcctgtactgtcca

SEQ ID NO: 307064 - DNA, 1778 bp, Homo sapiens
gcgtgtgtgtaagtgcatgtgtgtggagtgtgtgtgtggggtatgtgtgcatatgtgtattggtgtgtgagaccgtatgagtgcatgtgtgtggagtgtgtgtgcagtatgtgtgtgtgtgtgtgtgtgtgtctccctctctcacacacacaagagcagtttgctgttgctgtttcctaccttctgaggcttcaaagtattttttaaaatctatgctttgtggcagctctacggtgcttatctctgtctttgtgtcaatccttaagtacccatgtctttttcatgtctaaccattgggaaggtagaggctggcagggaagacaaatctgctacaagtccatgggaagaccctacaatgaaatgttcattggttggtatactgttttagtcttgaattgccaactttccaactgatctatccatattccttaagtactaaagacaaaatagagggcttctttttctctcttaatgtcttgccttctggttttcctggtttgcaagactaagtgtacctaatctcaccatctcttcacttctagctctctgaaacaagggtcacactactcagagggataaccccttacagtggtctgaggagtaactatttcctaaagtattctaaaagagtaggaagagagaaatggtagcctgctgcttctcacagacacctcacatcctcacttgggatggcatccacatagaaaccctgcatttaggtaaaatttgcctgactgaaggggactcagtcctccaaatcaaggtcaagaagatatctgcatgagaccttaagaactctttattgccattatttggagagggcgggggaattgtcctaatcacacatttaacacagggaataagtgctgaagtgacccagatcaccaagcgcagttcctcatcatactttatttttgctttccttattccttggcactgactaagctaaagttaagaagccgacttcataagccaacccctgtgatgggatggaaaaatgggcttttgcagagggtttattaatagagatggatatactactcacaagttctggctcatggctccactgagaaggccatagtaataaaatgatcttatgaacactgttccccaaaggccaaagcctgaagatattgccccttataatccaatcagccttatattttaataagtcctgaatcaacctgactacggatatatggggccaccagggtgcatgggtgcatgtctgctcagcctagccctggaagtgagcactgccggccacagatcctgggaaaggtggtagtaacccagaagatgtagccttgaagggaggatacctatcaaaatgccaaagctgcagggacacgaagacggttgaaaattcaacctatgtatactagatccttccagtttgatggtttggtcattcttcttcatgattataccatggagaattttctgtgacaagggtggtcatggaagtaagtgagtgatcccctggtttctcattccttaaagcagtggttcgcaaagtatggcacaagaccagcagcatcagcagcctttgggaacttgttagaaacgaaaattctcaatcccatcccagatctgctgaatcagaaactctaatgagaggacccggcaatccacgtttttactacctggcacacaaaggggcttcaacaaggaaaagcagttggaggtctcttccagattgctcttctgccgaattatttgtatctattccgagctgattatgtaataggatgaccattctgatgttggagcggccc

SEQ ID NO: 307065 - DNA, 5367 bp, Homo sapiens
tcttctttccaaacagtttgccgccctaaatccttccagtatattacttggggaggtgtcactagatctgtgtacctctgtttctcattatgtgactccattctggtttcttgcaggtttttgtttaaaggaatggtggcgttatttatttaaaacaggctttaaaagatacggttaaaacagggtagaaaaccctcacgtggcccacctgcaattcctactaacttaacataggtcccgcgtctgaggaatccccctaggtcctaaatctttggcagccaagtcaaaagtgactacgactccgggactataattcccaagagacactgcgtccgcaccctctgcgcatgttcaaccttggtgactgcataaggcagcgacgccaaggggctgggcttgggcctgagcggtgaatcggggcggggctaggggcagggccaggaggtggggtgctgccgcaccgcccggaacacgctagtggagcggaagatggcggcgcggcggcggccgctgcagccgggacttcagttgggctgaggcggaggagccgccgcttctgacctcgctctggctccggtgcgcgcggctgagcgcgtgcgaggccccgcgcgtcgggcaggggcggcggcggccactgcgcgccgccctgaggagcgccccagcggcggcgcgactgcggctgaggagagagccggctccgggcctccgcgtcctcctgctcccccggccccccgcctcctcgggggggcggcgggcgactacggactggtgacggccggctgcggcttcgggaaggacttccgtaagggcctcctcaagaagggcgcgtgctacggggacgacgcgtgcttcgtggcccggcaccgttccgcggacgtgctcggggttgcagatggtgtaggaggctggagagactatggagttgatccatctcaattctcagggactttaatgcggacgtgtgaacgtttagtaaaagaaggacggttcgtacctagtaatcccattggaattctcaccacaagctactgtgagttgctgcaaaataaagtccctttgctcggtagcagcaccgcctgcattgtggtgctggacagaaccagccaccgcttacacacagcaaacctgggcgattcaggcttcctggttgtcaggggtggtgaagtcgtgcaccgatcagatgagcagcagcattacttcaacactccattccagctctcaatcgctccccctgaagccgagggagtcgtcttgagcgacagtccggatgctgctgatagcacgtctttcgatgtccagctaggagacattatcctgacggcaacagatggactctttgacaacatgcctgattatatgattcttcaggagctaaaaaagttaaagaattcaaattatgagagtatacaacagactgccagaagcattgctgagcaagctcatgagctggcctatgacccaaattatatgtcaccttttgcacagtttgcatgtgacaatggattgaatgtgagaggtggaaagccagatgacatcaccgtccttctttcaatagtggctgagtatacagactagctgaggtgtcaagtcctgcctttcctttcatcatcccaaatttcccctgccatgtgtgctgatcctgctggcaggaccacatttctttgccactgatctcaatggccagtgatgtaagtcttttgcctgtcttcttgagactcgttgagatctttgttgagaaccactactatcattcactagctcatatctgccggcagcaattgaagagatccaatatttgaagattggccttcatttctcgatgttctttccatgatggggatggaggtgttcagtgccaccgtggctgttacttttcaaagtagttgaagtattgaaaatgagtaatgttggtaaagtgaattcaaaatcctagtatgctaaagggatggtacaagtctaacacaaattgtacgtaatgatacatctactagaaacatacattattcatcaaaagaaatgttacatgtgtactccacaggcatagtctttgttatgatgattggtgtggctttatgtctttgttataaactcctatttttcaggggcttatgattctgctctaaaacattgctctgggttatacagttttgatcccaaaagcttttttgttacaaatcgggagaaaaatccattttagttctatggatggaaatatttcatgcttttaaaaagatgtttgtgttcctgtggttaaagttttggcagtttattgattagtccaaatcacaggctaaggcctgatctccaggaggggtaggggagacactttaccagtatttttttatggaaataatactcaaggttgtaaaacccctcaaagcctagaaatttaattgttatggctgaaattcctcctagttgtctgatagaatgcccctgaatgggaactctaggtcccaaggcctgaagggttgagaacagacagctgtaactttgaattttgttggctttcagtggtcatgctacctacccatactcgtactctcagaccttttattagtagccttgctttctatagagcatgcaccaaatccagtgagtccatgtggagagagcactgtgtgcgcagcggcagcagcacagacgtccatgaggaaaactcccagtgatgatctgacatttacaattaccccacatggaaatttaggggtttctgaatcaagcttaatgtttacagtttccaaatagccattttgcagtgtatagtttccttacaaaactaccccgcattcagttttcacattatctgcaagctgaaacttatttttaagttttgtgtacaagttgactgctgtaaagatatatatttttgggtcagtttttttccttcattaacttggtggtagaaaaaaatatatacttagaaatccttaaattaaagccatgttttatatataagtcaggtaacattggtgtatagatgagaatgcaattaaacctgatgagaatctacttgagaatatagaaagtctttctctaaaggagatactgactccctggtttattgcattaaaatttatgtttgaggttacctcaacttgttttaaaagattttgttttgtgaatttgtactgtatatttgagtaactgtcaggcttttatttaaaattgtttaacatgtaccatgtacatgtcattactatatttcaatgcatcatgcttgtaacaggcatttcatttataataagaatgagttattcatttgtaagccgttcagtaatttatctactattcctaaattggcataatgttagataatctattttgaatcacctttaattacatgtcagaatgccttaactaccctaacttgacaaaacagaattctttggtagacgcggtgggggcggggtggggggtctggacggagtctctatttaaggagaaatcatcatgctatgataaaacacagaagcatgagtggcaagtggcggggtatttattttgcacaaactatttgcagtctctgtgtatttaaaaagtaaagaaagttgcatccagaagggttttgttagaatgaatacatttatattaggactgacaacttcagctcttttgtttaggttttcaattatttttggtaagagtatgtagccttatgatctggatatattttgcattcattttccaacgcctacatttaattcctggtaagagcagtgctcgtcaagtttctggtttttctctgctctcatttaacccgtcaaacacaatctttgtaaagctagattggtggtgttttatacaacttatttactcagcttacctttttgagaaacgattgttagaaattgacgatgtgtttgttccagtgatactgaaagtagtgggggcaagaattgagtttcacagtggaattggctttggatctggcctatagattagtgacataaaatattttctctattttcccctgttctttttgtgttatgcacttaattttatgactgccgggggggtcagctggagtgctgcttaacaagtatctctcctactctcagtggtcagaggctgtgttggacccatagtagaattttccaggtcacagacccaagcttccatgggttgttactgtgctgtaccacttggtgggtctgattctgaacctgatgtgtgtgttaattatattttaagcaacacacacacacacacacgcctcatgtaatggacttttataacaaaagaaaaaatttggatttctaatttacaaatggcaaattatttatccctctctggatgcaccaaagaccagtaaagtttatagcttttccatctatatttataaagcaatactgtattataaaaatcaatatttttatcacatgcttgaaatttttattttgttgttttaaaatgtgcactctaaacatatcagaaccttatttcttcctatgaacttaagctgcctgcgcacaaaaaaaaaaaaaatttaccaaatggagatgcagtagagtccataggctctaaaaactaaaagaaatgggatgcagggggaacaagttatttgtcctgagttactgtacttgcttgacatggttgttgggtactaaatcacaaaagaatccattccaggtatgcatgtctgggggttgggctgtgtctagattagaaactgggtttcaagctttgcatgatgggagagcgtcctctcctctatcagctgcgtgtgttctggataggacagtagcccggagatggaaaccaccttcagtaccattagcccaccataccaagtaacaagttaggcaggaatcgtgggaatttattgagtcagctttgagtgtttgagagaatgtaaacaagattggctcgaattgtaaacgtttgtactttggatgagttcatggttctttaggtcaccttaataccagctatctttggtagaagctacagcattcagtttctctggaaactgtatcacatttttgcattttaaaaattttacagtatcaaaaaaccaaaatctgcttatgaaacaaaacatgaagcaggacatatttggattctatttatttaaaattaaattctttgcaaaattgaacttctcaactaaaacgtgtccatgtcagaattttaactgttagcaggtagtttgtggcaaagatggctaaataatgaagcaaattagaatctgtgtgtatactaatgagctgctttttttctgttgagactatcattatttgtcttattacccaagaggcaattacctgaatttggatgtctgaattataacttatgcaggaatagttctgtaaatacatttaaataaactgtaaagatatttaataaatatagtatttatactaa

SEQ ID NO: 307066 - DNA, 5643 bp, Homo sapiens
tcttctttccaaacagtttgccgccctaaatccttccagtatattacttggggaggtgtcactagatctgtgtacctctgtttctcattatgtgactccattctggtttcttgcaggtttttgtttaaaggaatggtggcgttatttatttaaaacaggctttaaaagatacggttaaaacagggtagaaaaccctcacgtggcccacctgcaattcctactaacttaacataggtcccgcgtctgaggaatccccctaggtcctaaatctttggcagccaagtcaaaagtgactacgactccgggactataattcccaagagacactgcgtccgcaccctctgcgcatgttcaaccttggtgactgcataaggcagcgacgccaaggggctgggcttgggcctgagcggtgaatcggggcggggctaggggcagggccaggaggtggggtgctgccgcaccgcccggaacacgctagtggagcggaagatggcggcgcggcggcggccgctgcagccgggacttcagttgggctgaggcggaggagccgccgcttctgacctcgctctggctccggtgcgcgcggctgagcgcgtgcgaggccccgcgcgtcgggcaggggcggcggcggccactgcgcgccgccctgaggagcgccccagcggcggcgcgactgcggctgaggagagagccggctccgggcctccgcgtcctcctgctcccccggccccccgcctcctcgggggggcggcgggcgactacggactggtgacggccggctgcggcttcgggaaggacttccgtaagggcctcctcaagaagggcgcgtgctacggggacgacgcgtgcttcgtggcccggcaccgttccgcggacgtgctcggggttgcagatggtgtaggaggctggagagactatggagttgatccatctcaattctcagggactttaatgcggacgtgtgaacgtttagtaaaagaaggacggttcgtacctagtaatcccattggaattctcaccacaagctactgtgagttgctgcaaaataaagtccctttgctcggtagcagcaccgcctgcattgtggtgctggacagaaccagccaccgcttacacacagcaaacctgggcgattcaggcttcctggttgtcaggggtggtgaagtcgtgcaccgatcagatgagcagcagcattacttcaacactccattccagctctcaatcgctccccctgaagccgagggagtcgtcttgagcgacagtccggatgctgctgatagcacgtctttcgatgtccagctaggagacattatcctgacggcaacagatggactctttgacaacatgcctgattatatgattcttcaggagctaaaaaagttaaagaattcaaattatgagagtatacaacagactgccagaagcattgctgagcaagctcatgagctggcctatgacccaaattatatgtcaccttttgcacagtttgcatgtgacaatggattgaatgtgagaggtggaaagccagatgacatcaccgtccttctttcaatagtggctgagtatacagactagctgaggtgtcaagtcctgcctttcctttcatcatcccaaatttcccctgccatgtgtgctgatcctgctggcaggaccacatttctttgccactgatctcaatggccagtgatgtaagtcttttgcctgtcttcttgagactcgttgagatctttgttgagaaccactactatcattcactagctcatatctgccggcagcaattgaagagatccaatatttgaagattggccttcatttctcgatgttctttccatgatggggatggaggtgttcagtgccaccgtggctgttacttttcaaagtagttgaagtattgaaaatgagtaatgttggtaaagtgaattcaaaatcctagtatgctaaagggatggtacaagtctaacacaaattgtacgtaatgatacatctactagaaacatacattattcatcaaaagaaatgttacatgtgtactccacaggcatagtctttgttatgatgattggtgtggctttatgtctttgttataaactcctatttttcaggggcttatgattctgctctaaaacattgctctgggttatacagttttgatcccaaaagcttttttgttacaaatcgggagaaaaatccattttagttctatggatggaaatatttcatgcttttaaaaagatgtttgtgttcctgtggttaaagttttggcagtttattgattagtccaaatcacaggctaaggcctgatctccaggaggggtaggggagacactttaccagtatttttttatggaaataatactcaaggttgtaaaacccctcaaagcctagaaatttaattgttatggctgaaattcctcctagttgtctgatagaatgcccctgaatgggaactctaggtcccaaggcctgaagggttgagaacagacagctgtaactttgaattttgttggctttcagtggtcatgctacctacccatactcgtactctcagaccttttattagtagccttgctttctatagagcatgcaccaaatccagtgagtccatgtggagagagcactgtgtgcgcagcggcagcagcacagacgtccatgaggaaaactcccagtgatgatctgacatttacaattaccccacatggaaatttaggggtttctgaatcaagcttaatgtttacagtttccaaatagccattttgcagtgtatagtttccttacaaaactaccccgcattcagttttcacattatctgcaagctgaaacttatttttaagttttgtgtacaagttgactgctgtaaagatatatatttttgggtcagtttttttccttcattaacttggtggtagaaaaaaatatatacttagaaatccttaaattaaagccatgttttatatataagtcaggtaacattggtgtatagatgagaatgcaattaaacctgatgagaatctacttgagaatatagaaagtctttctctaaaggagatactgactccctggtttattgcattaaaatttatgtttgaggttacctcaacttgttttaaaagattttgttttgtgaatttgtactgtatatttgagtaactgtcaggcttttatttaaaattgtttaacatgtaccatgtacatgtcattactatatttcaatgcatcatgcttgtaacaggcatttcatttataataagaatgagttattcatttgtaagccgttcagtaatttatctactattcctaaattggcataatgttagataatctattttgaatcacctttaattacatgtcagaatgccttaactaccctaacttgacaaaacagaattctttggtagacgcggtgggggcggggtggggggtctggacggagtctctatttaaggagaaatcatcatgctatgataaaacacagaagcatgagtggcaagtggcggggtatttattttgcacaaactatttgcagtctctgtgtatttaaaaagtaaagaaagttgcatccagaagggttttgttagaatgaatacatttatattaggactgacaacttcagctcttttgtttaggttttcaattatttttggtaagagtatgtagccttatgatctggatatattttgcattcattttccaacgcctacatttaattcctggtaagagcagtgctcgtcaagtttctggtttttctctgctctcatttaacccgtcaaacacaatctttgtaaagctagattggtggtgttttatacaacttatttactcagcttacctttttgagaaacgattgttagaaattgacgatgtgtttgttccagtgatactgaaagtagtgggggcaagaattgagtttcacagtggaattggctttggatctggcctatagattagtgacataaaatattttctctattttcccctgttctttttgtgttatgcacttaattttatgactgccgggggggtcagctggagtgctgcttaacaagtatctctcctactctcagtggtcagaggctgtgttggacccatagtagaattttccaggtcacagacccaagcttccatgggttgttactgtgctgtaccacttggtgggtctgattctgaacctgatgtgtgtgttaattatattttaagcaacacacacacacacacacgcctcatgtaatggacttttataacaaaagaaaaaatttggatttctaatttacaaatggcaaattatttatccctctctggatgcaccaaagaccagtaaagtttatagcttttccatctatatttataaagcaatactgtattataaaaatcaatatttttatcacatgcttgaaatttttattttgttgttttaaaatgtgcactctaaacatatcagaaccttatttcttcctatgaacttaagctgcctgcgcacaaaaaaaaaaaaaatttaccaaatggagatgcagtagagtccataggctctaaaaactaaaagaaatgggatgcagggggaacaagttatttgtcctgagttactgtacttgcttgacatggttgttgggtactaaatcacaaaagaatccattccaggtatgcatgtctgggggttgggctgtgtctagattagaaactgggtttcaagctttgcatgatgggagagcgtcctctcctctatcagctgcgtgtgttctggataggacagtagcccggagatggaaaccaccttcagtaccattagcccaccataccaagtaacaagttaggcaggaatcgtgggaatttattgagtcagctttgagtgtttgagagaatgtaaacaagattggctcgaattgtaaacgtttgtactttggatgagttcatggttctttaggtcaccttaataccagctatctttggtagaagctacagcattcagtttctctggaaactgtatcacatttttgcattttaaaaattttacagtatcaaaaaaccaaaatctgcttatgaaacaaaacatgaagcaggacatatttggattctatttatttaaaattaaattctttgcaaaattgaacttctcaactaaaacgtgtccatgtcagaattttaactgttagcaggtagtttgtggcaaagatggctaaataatgaagcaaattagaatctgtgtgtatactaatgagctgctttttttctgttgagactatcattatttgtcttattacccaagaggcaattacctgaatttggatgtctgaattataacttatgcaggaatagttctgtaaatacatttaaataaactgtaaagatatttaataaatatagtatttatactaatctgtgtgcttcttttggtttgaatagtaactaaatgagacaccagcccttgacattgagtttgttggtcactatcaggtcctcatttccaagcctcctagtcattctagcactgattatatgctgctactttaactggctccagctgcttcactacatcagtttagcttcctcagaaattcatcaaaatggacggacaattaaatgtaaattatagaactttttcccagctgaggctttgcaccttccgtatagtatagagggaagctacaaaaa

SEQ ID NO: 307067 - DNA, 5419 bp, Homo sapiens
  misc_feature (5401)..(5401): n is a, c, g, or t
  misc_feature (5416)..(5417): n is a, c, g, or t
tcttctttccaaacagtttgccgccctaaatccttccagtatattacttggggaggtgtcactagatctgtgtacctctgtttctcattatgtgactccattctggtttcttgcaggtttttgtttaaaggaatggtggcgttatttatttaaaacaggctttaaaagatacggttaaaacagggtagaaaaccctcacgtggcccacctgcaattcctactaacttaacataggtcccgcgtctgaggaatccccctaggtcctaaatctttggcagccaagtcaaaagtgactacgactccgggactataattcccaagagacactgcgtccgcaccctctgcgcatgttcaaccttggtgactgcataaggcagcgacgccaaggggctgggcttgggcctgagcggtgaatcggggcggggctaggggcagggccaggaggtggggtgctgccgcaccgcccggaacacgctagtggagcggaagatggcggcgcggcggcggccgctgcagccgggacttcagttgggctgaggcggaggagccgccgcttctgacctcgctctggctccggtgcgcgcggctgagcgcgtgcgaggccccgcgcgtcgggcaggggcggcggcggccactgcgcgccgccctgaggagcgccccagcggcggcgcgactgcggctgaggagagagccggctccgggcctccgcgtcctcctgctcccccggccccccgcctcctcgggggggcggcgggcgactacggactggtgacggccggctgcggcttcgggaaggacttccgtaagggcctcctcaagaagggcgcgtgctacggggacgacgcgtgcttcgtggcccggcaccgttccgcggacgtgctcggggttgcagatggtgtaggaggctggagagactatggagttgatccatctcaattctcagggactttaatgcggacgtgtgaacgtttagtaaaagaaggacggttcgtacctagtaatcccattggaattctcaccacaagctactgtgagttgctgcaaaataaagtccctttgctcggtagcagcaccgcctgcattgtggtgctggacagaaccagccaccgcttacacacagcaaacctgggcgattcaggcttcctggttgtcaggggtggtgaagtcgtgcaccgatcagatgagcagcagcattacttcaacactccattccagctctcaatcgctccccctgaagccgagggagtcgtcttgagcgacagtccggatgctgctgatagcacgtctttcgatgtccagctaggagacattatcctgacggcaacagatggactctttgacaacatgcctgattatatgattcttcaggagctaaaaaagttaaagaattcaaattatgagagtatacaacagactgccagaagcattgctgagcaagctcatgagctggcctatgacccaaattatatgtcaccttttgcacagtttgcatgtgacaatggattgaatgtgagaggtggaaagccagatgacatcaccgtccttctttcaatagtggctgagtatacagactagctgaggtgtcaagtcctgcctttcctttcatcatcccaaatttcccctgccatgtgtgctgatcctgctggcaggaccacatttctttgccactgatctcaatggccagtgatgtaagtcttttgcctgtcttcttgagactcgttgagatctttgttgagaaccactactatcattcactagctcatatctgccggcagcaattgaagagatccaatatttgaagattggccttcatttctcgatgttctttccatgatggggatggaggtgttcagtgccaccgtggctgttacttttcaaagtagttgaagtattgaaaatgagtaatgttggtaaagtgaattcaaaatcctagtatgctaaagggatggtacaagtctaacacaaattgtacgtaatgatacatctactagaaacatacattattcatcaaaagaaatgttacatgtgtactccacaggcatagtctttgttatgatgattggtgtggctttatgtctttgttataaactcctatttttcaggggcttatgattctgctctaaaacattgctctgggttatacagttttgatcccaaaagcttttttgttacaaatcgggagaaaaatccattttagttctatggatggaaatatttcatgcttttaaaaagatgtttgtgttcctgtggttaaagttttggcagtttattgattagtccaaatcacaggctaaggcctgatctccaggaggggtaggggagacactttaccagtatttttttatggaaataatactcaaggttgtaaaacccctcaaagcctagaaatttaattgttatggctgaaattcctcctagttgtctgatagaatgcccctgaatgggaactctaggtcccaaggcctgaagggttgagaacagacagctgtaactttgaattttgttggctttcagtggtcatgctacctacccatactcgtactctcagaccttttattagtagccttgctttctatagagcatgcaccaaatccagtgagtccatgtggagagagcactgtgtgcgcagcggcagcagcacagacgtccatgaggaaaactcccagtgatgatctgacatttacaattaccccacatggaaatttaggggtttctgaatcaagcttaatgtttacagtttccaaatagccattttgcagtgtatagtttccttacaaaactaccccgcattcagttttcacattatctgcaagctgaaacttatttttaagttttgtgtacaagttgactgctgtaaagatatatatttttgggtcagtttttttccttcattaacttggtggtagaaaaaaatatatacttagaaatccttaaattaaagccatgttttatatataagtcaggtaacattggtgtatagatgagaatgcaattaaacctgatgagaatctacttgagaatatagaaagtctttctctaaaggagatactgactccctggtttattgcattaaaatttatgtttgaggttacctcaacttgttttaaaagattttgttttgtgaatttgtactgtatatttgagtaactgtcaggcttttatttaaaattgtttaacatgtaccatgtacatgtcattactatatttcaatgcatcatgcttgtaacaggcatttcatttataataagaatgagttattcatttgtaagccgttcagtaatttatctactattcctaaattggcataatgttagataatctattttgaatcacctttaattacatgtcagaatgccttaactaccctaacttgacaaaacagaattctttggtagacgcggtgggggcggggtggggggtctggacggagtctctatttaaggagaaatcatcatgctatgataaaacacagaagcatgagtggcaagtggcggggtatttattttgcacaaactatttgcagtctctgtgtatttaaaaagtaaagaaagttgcatccagaagggttttgttagaatgaatacatttatattaggactgacaacttcagctcttttgtttaggttttcaattatttttggtaagagtatgtagccttatgatctggatatattttgcattcattttccaacgcctacatttaattcctggtaagagcagtgctcgtcaagtttctggtttttctctgctctcatttaacccgtcaaacacaatctttgtaaagctagattggtggtgttttatacaacttatttactcagcttacctttttgagaaacgattgttagaaattgacgatgtgtttgttccagtgatactgaaagtagtgggggcaagaattgagtttcacagtggaattggctttggatctggcctatagattagtgacataaaatattttctctattttcccctgttctttttgtgttatgcacttaattttatgactgccgggggggtcagctggagtgctgcttaacaagtatctctcctactctcagtggtcagaggctgtgttggacccatagtagaattttccaggtcacagacccaagcttccatgggttgttactgtgctgtaccacttggtgggtctgattctgaacctgatgtgtgtgttaattatattttaagcaacacacacacacacacacgcctcatgtaatggacttttataacaaaagaaaaaatttggatttctaatttacaaatggcaaattatttatccctctctggatgcaccaaagaccagtaaagtttatagcttttccatctatatttataaagcaatactgtattataaaaatcaatatttttatcacatgcttgaaatttttattttgttgttttaaaatgtgcactctaaacatatcagaaccttatttcttcctatgaacttaagctgcctgcgcacaaaaaaaaaaaaaatttaccaaatggagatgcagtagagtccataggctctaaaaactaaaagaaatgggatgcagggggaacaagttatttgtcctgagttactgtacttgcttgacatggttgttgggtactaaatcacaaaagaatccattccaggtatgcatgtctgggggttgggctgtgtctagattagaaactgggtttcaagctttgcatgatgggagagcgtcctctcctctatcagctgcgtgtgttctggataggacagtagcccggagatggaaaccaccttcagtaccattagcccaccataccaagtaacaagttaggcaggaatcgtgggaatttattgagtcagctttgagtgtttgagagaatgtaaacaagattggctcgaattgtaaacgtttgtactttggatgagttcatggttctttaggtcaccttaataccagctatctttggtagaagctacagcattcagtttctctggaaactgtatcacatttttgcattttaaaaattttacagtatcaaaaaaccaaaatctgcttatgaaacaaaacatgaagcaggacatatttggattctatttatttaaaattaaattctttgcaaaattgaacttctcaactaaaacgtgtccatgtcagaattttaactgttagcaggtagtttgtggcaaagatggctaaataatgaagcaaattagaatctgtgtgtatactaatgagctgctttttttctgttgagactatcattatttgtcttattacccaagaggcaattacctgaatttggatgtctgaattataacttatgcaggaatagttctgtaaatacattttgttgaaatgtcccccttgtgattggagtgggtgttgaaaaaaatcaggcgagtagggtcactgggtggggggggggnagaccgccggggggnngg

SEQ ID NO: 307068 - DNA, 5313 bp, Homo sapiens
tcttctttccaaacagtttgccgccctaaatccttccagtatattacttggggaggtgtcactagatctgtgtacctctgtttctcattatgtgactccattctggtttcttgcaggtttttgtttaaaggaatggtggcgttatttatttaaaacaggctttaaaagatacggttaaaacagggtagaaaaccctcacgtggcccacctgcaattcctactaacttaacataggtcccgcgtctgaggaatccccctaggtcctaaatctttggcagccaagtcaaaagtgactacgactccgggactataattcccaagagacactgcgtccgcaccctctgcgcatgttcaaccttggtgactgcataaggcagcgacgccaaggggctgggcttgggcctgagcggtgaatcggggcggggctaggggcagggccaggaggtggggtgctgccgcaccgcccggaacacgctagtggagcggaagatggcggcgcggcggcggccgctgcagccgggacttcagttgggctgaggcggaggagccgccgcttctgacctcgctctggctccggtgcgcgcggctgagcgcgtgcgaggccccgcgcgtcgggcaggggcggcggcggccactgcgcgccgccctgaggagcgccccagcggcggcgcgactgcggctgaggagagagccggctccgggcctccgcgtcctcctgctcccccggccccccgcctcctcgggggggcggcgggcgactacggactggtgacggccggctgcggcttcgggaaggacttccgtaagggcctcctcaagaagggcgcgtgctacggggacgacgcgtgcttcgtggcccggcaccgttccgcggacgtgctcggggttgcagatggtgtaggaggctggagagactatggagttgatccatctcaattctcagggactttaatgcggacgtgtgaacgtttagtaaaagaaggacggttcgtacctagtaatcccattggaattctcaccacaagctactgtgagttgctgcaaaataaagtccctttgctcggtagcagcaccgcctgcattgtggtgctggacagaaccagccaccgcttacacacagcaaacctgggcgattcaggcttcctggttgtcaggggtggtgaagtcgtgcaccgatcagatgagcagcagcattacttcaacactccattccagctctcaatcgctccccctgaagccgagggagtcgtcttgagcgacagtccggatgctgctgatagcacgtctttcgatgtccagctaggagacattatcctgacggcaacagatggactctttgacaacatgcctgattatatgattcttcaggagctaaaaaagttaaagaattcaaattatgagagtatacaacagactgccagaagcattgctgagcaagctcatgagctggcctatgacccaaattatatgtcaccttttgcacagtttgcatgtgacaatggattgaatgtgagaggtggaaagccagatgacatcaccgtccttctttcaatagtggctgagtatacagactagctgaggtgtcaagtcctgcctttcctttcatcatcccaaatttcccctgccatgtgtgctgatcctgctggcaggaccacatttctttgccactgatctcaatggccagtgatgtaagtcttttgcctgtcttcttgagactcgttgagatctttgttgagaaccactactatcattcactagctcatatctgccggcagcaattgaagagatccaatatttgaagattggccttcatttctcgatgttctttccatgatggggatggaggtgttcagtgccaccgtggctgttacttttcaaagtagttgaagtattgaaaatgagtaatgttggtaaagtgaattcaaaatcctagtatgctaaagggatggtacaagtctaacacaaattgtacgtaatgatacatctactagaaacatacattattcatcaaaagaaatgttacatgtgtactccacaggcatagtctttgttatgatgattggtgtggctttatgtctttgttataaactcctatttttcaggggcttatgattctgctctaaaacattgctctgggttatacagttttgatcccaaaagcttttttgttacaaatcgggagaaaaatccattttagttctatggatggaaatatttcatgcttttaaaaagatgtttgtgttcctgtggttaaagttttggcagtttattgattagtccaaatcacaggctaaggcctgatctccaggaggggtaggggagacactttaccagtatttttttatggaaataatactcaaggttgtaaaacccctcaaagcctagaaatttaattgttatggctgaaattcctcctagttgtctgatagaatgcccctgaatgggaactctaggtcccaaggcctgaagggttgagaacagacagctgtaactttgaattttgttggctttcagtggtcatgctacctacccatactcgtactctcagaccttttattagtagccttgctttctatagagcatgcaccaaatccagtgagtccatgtggagagagcactgtgtgcgcagcggcagcagcacagacgtccatgaggaaaactcccagtgatgatctgacatttacaattaccccacatggaaatttaggggtttctgaatcaagcttaatgtttacagtttccaaatagccattttgcagtgtatagtttccttacaaaactaccccgcattcagttttcacattatctgcaagctgaaacttatttttaagttttgtgtacaagttgactgctgtaaagatatatatttttgggtcagtttttttccttcattaacttggtggtagaaaaaaatatatacttagaaatccttaaattaaagccatgttttatatataagtcaggtaacattggtgtatagatgagaatgcaattaaacctgatgagaatctacttgagaatatagaaagtctttctctaaaggagatactgactccctggtttattgcattaaaatttatgtttgaggttacctcaacttgttttaaaagattttgttttgtgaatttgtactgtatatttgagtaactgtcaggcttttatttaaaattgtttaacatgtaccatgtacatgtcattactatatttcaatgcatcatgcttgtaacaggcatttcatttataataagaatgagttattcatttgtaagccgttcagtaatttatctactattcctaaattggcataatgttagataatctattttgaatcacctttaattacatgtcagaatgccttaactaccctaacttgacaaaacagaattctttggtagacgcggtgggggcggggtggggggtctggacggagtctctatttaaggagaaatcatcatgctatgataaaacacagaagcatgagtggcaagtggcggggtatttattttgcacaaactatttgcagtctctgtgtatttaaaaagtaaagaaagttgcatccagaagggttttgttagaatgaatacatttatattaggactgacaacttcagctcttttgtttaggttttcaattatttttggtaagagtatgtagccttatgatctggatatattttgcattcattttccaacgcctacatttaattcctggtaagagcagtgctcgtcaagtttctggtttttctctgctctcatttaacccgtcaaacacaatctttgtaaagctagattggtggtgttttatacaacttatttactcagcttacctttttgagaaacgattgttagaaattgacgatgtgtttgttccagtgatactgaaagtagtgggggcaagaattgagtttcacagtggaattggctttggatctggcctatagattagtgacataaaatattttctctattttcccctgttctttttgtgttatgcacttaattttatgactgccgggggggtcagctggagtgctgcttaacaagtatctctcctactctcagtggtcagaggctgtgttggacccatagtagaattttccaggtcacagacccaagcttccatgggttgttactgtgctgtaccacttggtgggtctgattctgaacctgatgtgtgtgttaattatattttaagcaacacacacacacacacacgcctcatgtaatggacttttataacaaaagaaaaaatttggatttctaatttacaaatggcaaattatttatccctctctggatgcaccaaagaccagtaaagtttatagcttttccatctatatttataaagcaatactgtattataaaaatcaatatttttatcacatgcttgaaatttttattttgttgttttaaaatgtgcactctaaacatatcagaaccttatttcttcctatgaacttaagctgcctgcgcacaaaaaaaaaaaaaatttaccaaatggagatgcagtagagtccataggctctaaaaactaaaagaaatgggatgcagggggaacaagttatttgtcctgagttactgtacttgcttgacatggttgttgggtactaaatcacaaaagaatccattccaggtatgcatgtctgggggttgggctgtgtctagattagaaactgggtttcaagctttgcatgatgggagagcgtcctctcctctatcagctgcgtgtgttctggataggacagtagcccggagatggaaaccaccttcagtaccattagcccaccataccaagtaacaagttaggcaggaatcgtgggaatttattgagtcagctttgagtgtttgagagaatgtaaacaagattggctcgaattgtaaacgtttgtactttggatgagttcatggttctttaggtcaccttaataccagctatctttggtagaagctacagcattcagtttctctggaaactgtatcacatttttgcattttaaaaattttacagtatcaaaaaaccaaaatctgcttatgaaacaaaacatgaagcaggacatatttggattctatttatttaaaattaaattctttgcaaaattgaacttctcaaatggctaaataatgaagcaaattagaatctgtgtgtatactaatgagctgctttttttctgttgagactatcattatttgtcttattacccaagaggcaattacctgaatttggatgtctgaattataacttatgcaggaatagttctgtaaatacatttaaataaactgtaaagatatttaataaatatagtatttatactaa

SEQ ID NO: 307069 - DNA, 412 bp, Homo sapiens
gtaattaactcaaaggttagctcttgggaaaagtggccctctctggatagctgagttttatggattcagttgcattatctctttgtagttttggaaagaactattttgtgaatttcaggaaaataataatagctctggtctttcaaataattagagcacttggaaaaagaagcttcctacccaaggttttcataggctggtagaagtaggaaaagtctagatggagggcatttcttgtttgtatctttatttatattttaatggtgtcgggtcctggttgtttctccttttattcttctaacacccagcaggtgttgaatcaggcaaagacaggaaatagtcatgccagagccagccaaaggcagcaggccactggaagcctcagtgtgacctgagctgccaccagtaacca

SEQ ID NO: 307070 - DNA, 436 bp, Homo sapiens
gcggccgctgcagccgggacttcagttgggctgaggcggaggagccgccgcttctgacctcgctctggctccggtgcgcgcggctgagcgcgtgcgaggccccgcgcgtcgggcaggggcggcggcggccactgcgcgccgccctgaggagcgccccagcggcggcgcgactgcggctgaggagagagccggctccgggcctccgcgtcctcctgctcccccggccccccgcctcctcgggggggcggcggcggcgatgttctcggtcctctcgtacgggcggctggtggcccgcgccgtgctcggcggcctctcgcagaccgaccccagggccggcggcggcggcggcggcgactacggactggtgacggccggctgcggcttcgggaaggacttccgtaagggcctcctcaagaagggcgcgtgctacggggac

SEQ ID NO: 307071 - DNA, 2757 bp, Homo sapiens
  misc_feature (1)..(1): n is a, c, g, or t
natcgcgcaggcgcactgaacctcagccgcgccgggaggcgagcccgttggcgaggggcggggcagatggcgagggagcggggcgagctgctttttgaggctgcgcactcgcatggccccacctcgcaggtccacttccggcgccgcggctgttccgggcggagaccgcttgtgctggagtcggagttgtaacgctccactgactgatagagcgaccggccgaccatggcgcccggagtggcccgcgggccgacgccgtactggaggttgcgcctcggtggcgccgcgctgctcctgctgctcatcccggtggccgccgcgcaggagcctcccggagctgcttgttctcagaacacaaacaaaacctgtgaagagtgcctgaagaacgtctcctgtctttggtgcaacactaacaaggcttgtctggactacccagttacaagcgtcttgccaccggcttccctttgtaaattgagctctgcacgctggggagtttgttgggtgaactttgaggcgctgatcatcaccatgtcggtagtcgggggaaccctcctcctgggcattgccatctgctgctgctgctgctgcaggaggaagaggagccggaagccggacaggagtgaggagaaggccatgcgtgagcgggaggagaggcggatacggcaggaggaacggagagcagagatgaagacaagacatgatgaaatcagaaaaaaatatggcctgtttaaagaagaaaacccgtatgctagatttgaaaacaactaaagcgctccagcacatcagtcccgacgcttcctgtgaggtgcacgctccgcagcccagcccagccgggagaccacgtggccattgcggtctcctgaccttggccagtgaacctgccagccttccaggacaggcggccggagagctgcccctgaaggacagtcctctcgtcttgcagactggtgaccttctattccctgttcatctctgtttctagatttagtcacttgaaataagaaatctttggggtttgggcttttttatactcttctcagtttgtgaaacgctaactgcacacgaagccgcctgacggcacccagcgctgtggctgtcattctcccagggcagaaccctgcgtttctctctgtccactaacaagcttcacacgcaacacagggaagtcggtttgacttttgtcatgaggagaactgaccagccctcatcattccccataaaaccacggacagcgtctgtgtgcgcatcttgagtcttcacacctgttgactcacacggcttttgctgatgacacggggctccagtacacagtctgataaggacttaacgtcctaacctcaattgtattaaatagcattggggaatagctaaacctttttaaaaaaatttattggattttcctccctgcttaaaagatttcaccagaaaaccttcatataaaaattcaggccctttttggacaatttttaaaatttgtatctttactagaacatgagaatctttttcccttggaagcttgaattataaatgtggtgtttggcctgcctcagcagcaccagttgactgctcgtgtgccagcggtgtggggaggacggggcaggacgctgcagctctctccagccctgttggcatcctcagtgcctgcaggcctctcgctgcctgttgggctgtctggggggtggccatttagggatcgtggggacggggtccaccccaagaagaaagaaaggcccgtccacaggcccggctctgggccacgtgccccggaagcaggtgtgtccagagtcagctgagggctctccccacaccacccagcaggcgctggtgctccttctgcctcatgggaccagtccagcttccagccgctctggctcgagggtggtctgagcacttccttctgagtgggcttctctgggagctctccagtggcactgctggacctgcccacgtttctgtaaaatcaggatacgtggctttagtaagcagaccaagcgcttcgtggcagggaaagcagcgtgcggggaagtcactgaaaagtgctgcctaaggaagtttggaaatagtccccgttccagattgccttgaattttaaaacattttgctttgggaaagtaggtcagcagcacctaagatcaaggatgcgttccattttcacacttcacagtcatgaaaactgagaagactgtcttcagcgtgaactaaagttcacaggcagatcactgatccagaacacttcaagaactcgtcaaacagctcgataagcctttttgactgtgtacatctgtaccgggaataacattcctaggctgaaatttccacaaagaatagaacctgtacccagttcttcaggctgatttccctgacctcttgggcatttgtatttgtagtaaagtattgcagagattcctaagtattttatagcagccatcaaaattggactttgtattgtttattcataaaagacacttggtaatagacttcagtgaactctgtatgaatgcagtagtgtgcgtgcaaaatccgcttcctgagcgtagggtgctgagctggcgctagggctcggttgtgaaatacagcgtagtcagcccttgcgctcagtgtagaaacccacgtctgtaaggtcggtcttcgtccatctgcttttttctgaaatacactaagagcagccacaaaactgtaacctcaaggaaaccataaagcttggagtgccttaatttttaaccagtttccaataaaacggtttactacctgcgtgtg

SEQ ID NO: 307072 - DNA, 768 bp, Homo sapiens
  misc_feature (1)..(1): n is a, c, g, or t
  misc_feature (738)..(738): n is a, c, g, or t
natcgcgcaggcgcactgaacctcagccgcgccgggaggcgagcccgttggcgaggggcggggcagatggcgagggagcggggcgagctgctttttgaggctgcgcactcgcatggccccacctcgcaggtccacttccggcgccgcggctgttccgggcggagaccgcttgtgctggagtcggagttgtaacgctccactgactgatagagcgaccggccgaccatggcgcccggagtggcccgcgggccgacgccgtactggaggttgcgcctcggtggcgccgcgctgctcctgctgctcatcccggtggccgccgcgcaggagcctcccggagctgcttgttctcagaacacaaacaaaacctgtgaagagtgcctgaagaacgtctcctgtctttggtgcaacactaacaaggcttgtctggactacccagttacaagcgtcttgccaccggcttccctttgtaaattgagctctgcacgctggggagtttgttgggtgaactttgaggcgctgatcatcaccatgtcggtagtcgggggaaccctcctcctgggcattgccatctgctgctgctgctgctgcaggaggaagaggagccggaagccggacaggagtgaggagaaggccatgcgtgagcgggaggagaggcggatacggcaggaggaacggagagcagagatgaagacaagacatgatgaaatcagaaaaaaatatgcctgttaaagaaacccngttgcgttattggcagccaacccaacgggg

SEQ ID NO: 307073 - DNA, 798 bp, Homo sapiens
  misc_feature (1)..(1): n is a, c, g, or t
natcgcgcaggcgcactgaacctcagccgcgccgggaggcgagcccgttggcgaggggcggggcagatggcgagggagcggggcgagctgctttttgaggctgcgcactcgcatggccccacctcgcaggtccacttccggcgccgcggctgttccgggcggagaccgcttgtgctggagtcggagttgtaacgctccactgactgatagagcgaccggccgaccatggcgcccggagtggcccgcgggccgacgccgtactggaggttgcgcctcggtggcgccgcgctgctcctgctgctcatcccggtggccgccgcgcaggagcctcccggagctgcttgttctcagaacacaaacaaaacctgtgaagagtgcctgaagaacgtctcctgtctttggtgcaacactaacaaggcttgtctggactacccagttacaagcgtcttgccaccggcttccctttgtaaattgagctctgcacgctggggagtttgttgggtgaactttgaggcgctgatcatcaccatgtcggtagtcgggggaaccctcctcctgggcattgccatctgctgctgctgctgctgcaggaggaagaggagccggaagccggacaggagtgaggagaaggccatgcgtgagcgggaggagaggcggatacggcaggaggaacggagagcagagatgaagacaagacatgatgaaatcagaaaaaaatatggcctgtttaaagaagaaaacccgtagtgccttaatttttaaccagtttccaataaaacggtttactacctgcgtgtg

SEQ ID NO: 307074 - DNA, 777 bp, Homo sapiens
  misc_feature (1)..(1): n is a, c, g, or t
natcgcgcaggcgcactgaacctcagccgcgccgggaggcgagcccgttggcgaggggcggggcagatggcgagggagcggggcgagctgctttttgaggctgcgcactcgcatggccccacctcgcaggtccacttccggcgccgcggctgttccgggcggagaccgcttgtgctggagtcggagttgtaacgctccactgactgatagagcgaccggccgaccatggcgcccggagtggcccgcgggccgacgccgtactggaggttgcgcctcggtggcgccgcgctgctcctgctgctcatcccggtggccgccgcgcaggagcctcccggagctgcttgttctcagaacacaaacaaaacctgtgaagagtgcctgaagaacgtctcctgtctttggtgcaacactaacaaggcttgtctggactacccagttacaagcgtcttgccaccggcttccctttgtaaattgagctctgcacgctggggagtttgttgggtgaactttgaggcgctgatcatcaccatgtcggtagtcgggggaaccctcctcctgggcattgccatctgctgctgctgctgctgcaggaggaagaggagccggaagccggacaggagtgaggagaaggccatgcgtgagcgggaggagaggcggatacggcaggaggaacggaccgggaaccgagatgaagacaagacttgatgaaaatccgaatattgcctggttaaagaagcgacacttccctttgaagtgacaccttcgcaaacccccggt

SEQ ID NO: 307075 - DNA, 1787 bp, Homo sapiens
gcgctgggctcggcgggcggcctgggcccacggtcgcaggcagcgccccgacggaggctcctcgagggtcacgcccgtttggcggccgcgggagctgccgtcgcggctggggcgcgggcaggggaagagccgtctttgtctttgtctttgttttgtccagtcgctgcggccgctcctcgcgcgtggcctcgggttggccctcgcccggcaggcgggacgcttggcacctgcggcctcccttagcctcactgcgaccccaaacagcactcctcgggttcgatcccgagccgggaagccggctcacgacgtgttcgaggtcgcacagctggtcgggggcaggccgggatggcggccgcaggcccctgcagggtgatggggccgcggccggtgtgtctctacagccgccggcgttcacgccgccactccctcccggccgcagttccacgcacagcagcgaacgctcgcacttatgccttagaaaggaaggcgtccccaaagccaggctgtagcatctgattttgaagcaagctgattgcggttctacgctgtccagacgcgcaggtggcattcttcatcgtttatcccgtctgcgccaggccctgcggccacagtggtgaccgacagccagagctcctatccaagaggagctgagtccccgggaggctgaccaagaaagaagcagtgagggcgcgggggctgggggaggaaagtgcatgacaggagactcagagttccagaaaccggcagtgtttatagagggtggcttcctgtggggctgggcctccagggcctggtgggctgcgggaaaatccagcaggttctaagctggagagtgtcatggttggacctgtttcacaatgtcatgctggcttccgtgtgtggagtttccaggtgaccactagtggtggggaatagtgccaccttaacttcagtttcctgacccttacaattagggttgacctgggcccagcttgaggggctaatacttttctcagctcttgttagcccaggctctgtcagtgtctgtttagcatagtagagcaccttttctttttgtgaccttatggaatgtttattccgatgcaggattatttgtgtttcttcttacctgcctccaagtgtgcttagggtttgtgacgttagcaatgcagctgccttgaagtttgttagtcaaggaggccagtgggactgtactgggaacttttggcccagattgagttctaagcgcaaatgtgcagtgaatacgtttccacaaacagaatgggcgtctgcaggcagagtgtgtgattcactggcaactgtatcagtggctcgggggtgtgtttgcttgcattgtgaaagcgggagtgtcaggaaaacaaccatgaggttttgtttgactgtgattcctcctgctctgcactgctgaagggtgcagagatgggtgtggacgagtggagtggacagtgtgggaattaatccggaactgccattcggtgtgtcagctgaaaagccattcggtgtgtctgcacttggaggctgcacttgcttgcttccacttatggtaatcaccaagtcctggtgggtggactgttgtttctctcactggggaccccttggaataggaagaatggtgccgtgtcatgttggcattcactgcccaggcgcctttggtgtctgcgtgccccttgtccttggagagaggggctatttatagcctggagaactcccctcttcccacagagtacttgcttggtgtgagatttttactgcttgtcatggttacaggaatgtgaccgcagtactga

SEQ ID NO: 307076 - DNA, 986 bp, Homo sapiens
  misc_feature (1)..(1): n is a, c, g, or t
  misc_feature (503)..(503): n is a, c, g, or t
  misc_feature (517)..(517): n is a, c, g, or t
  misc_feature (528)..(528): n is a, c, g, or t
  misc_feature (536)..(536): n is a, c, g, or t
  misc_feature (546)..(546): n is a, c, g, or t
  misc_feature (567)..(567): n is a, c, g, or t
  misc_feature (575)..(575): n is a, c, g, or t
  misc_feature (583)..(584): n is a, c, g, or t
  misc_feature (597)..(597): n is a, c, g, or t
  misc_feature (612)..(612): n is a, c, g, or t
  misc_feature (614)..(615): n is a, c, g, or t
  misc_feature (621)..(621): n is a, c, g, or t
  misc_feature (623)..(623): n is a, c, g, or t
  misc_feature (626)..(626): n is a, c, g, or t
  misc_feature (628)..(628): n is a, c, g, or t
  misc_feature (657)..(657): n is a, c, g, or t
  misc_feature (662)..(662): n is a, c, g, or t
  misc_feature (676)..(676): n is a, c, g, or t
  misc_feature (680)..(680): n is a, c, g, or t
  misc_feature (682)..(682): n is a, c, g, or t
  misc_feature (697)..(697): n is a, c, g, or t
  misc_feature (706)..(706): n is a, c, g, or t
  misc_feature (853)..(853): n is a, c, g, or t
  misc_feature (909)..(910): n is a, c, g, or t
  misc_feature (913)..(913): n is a, c, g, or t
  misc_feature (916)..(916): n is a, c, g, or t
  misc_feature (935)..(935): n is a, c, g, or t
natcgcgcaggcgcactgaacctcagccgcgccgggaggcgagcccgttggcgaggggcggggcagatggcgagggagcggggcgagctgctttttgaggctgcgcactcgcatggccccacctcgcaggtccacttccggcgccgcggctgttccgggcggagaccgcttgtgctggagtcggagttgtaacgctccactgactgatagagcgaccggccgaccatggcgcccggagtggcccgcgggccgacgccgtactggaggttgcgcctcggtggcgccgcgctgctcctgctgctcatcccggtggccgccgcgcaggagcctcccggagctgcttgttctcagaacacaaacaaaacctgtgaagagtgcctgaagaacgtctcctgtctttggtgcaacactaacaaggcttgtctggactacccagttacaagcgtcttgccaccggcttccctttgtaaattgagctctgcacgctggggagtttgttgggncgtgaactttgagncgctgatcatnaccatgtngcgctagctngggggaaaataataatgcgcnaattgcanatatgatnntgatgcatgcatnaaggcagcgcagcancnnaagccnanaancnaaggcgctgcgcgcgcagcgcaaatgagngcgangcgcgggcgcgcgnggcntnaggcagcgcgcgcanaggcgcagnagcagcatgcaagcaaaagcaaatgcatgcaaataagcaaaaaaaaatatgcgcaatgctttaagagcaagcaaaaaaaaagctaatgcatagcattttgcaaaaaaaaaataaaagcagcataaaagcaaaaataagctaaaagcnagcattaaatgctgcgcgctgcaaaaaataaagcaagcaaaaagcaaaaagcaagnngcngcnaaaaagctggcaaaattgngcgctataaatgcgaaattgcgcaaagctgcgaaaatgcaaagaaattaaa

SEQ ID NO: 307077 - DNA, 996 bp, Homo sapiens
gcgctgggctcggcgggcggcctgggcccacggtcgcaggcagcgccccgacggaggctcctcgagggtcacgcccgtttggcggccgcgggagctgccgtcgcggctggggcgcgggcaggggaagagccgtctttgtctttgtctttgttttgtccagtcgctgcggccgctcctcgcgcgtggcctcgggttggccctcgcccggcaggcgggacgcttggcacctgcggcctcccttagcctcactgcgaccccaaacagcactcctcgggttcgatcccgagccgggaagccggctcacgacgtgttcgaggtcgcacagctggtcgggggcaggccgggatggcggccgcaggcccctgcagggtgatggggccgcggccggtgtgtctctacagccgccggcgttcacgccgccactccctcccggccgcagttccacgcacagcagcgaacgctcgcacttatgccttagaaaggaaggcgtccccaaagccaggctgtagcatctgattttgaagcaagctgattgcggttctacgctgtccagacgcgcagcgggattcctgaacactcgttccacatgtcttgaagaaggcttgttatcagcaggggctcaggaagaggaccttcatttgcttgttctcagaacacaaacaaaacctgtgaagagtgcctgaagaacgtctcctgtctttggtgcaacactaacaaggcttgtctggactacccagttacaagcgtcttgccaccggcttccctttgtaaattgagctctgcacgctggggagtttgttgggtgaactttgaggcgctgatcatcaccatgtcggtagtcgggggaaccctcctcctgggcattgccatctgctgctgctgctgctgcaggaggaagaggagccggaagccggacaggagtgaggagaaggccatgcgtgagcgggaggagaggcggatacggcaggaggaacgggtgaggtggtggtgatgccc

SEQ ID NO: 307078 - DNA, 220 bp, Homo sapiens
ccagaagaaacctggcgcccccactgagggacacggaagggcgtgtctagcagttacaccaccgtgcgctgtcgtttggtgctcataatgttcctctgtgttttaggagagcagagatgaagacaagacatgatgaaatcagaaaaaaatatgatggtaaggactggtcacgcctcctttttgtctggttgggaggcgatggcacgctgtctcggtcctc

SEQ ID NO: 307079 - DNA, 2704 bp, Homo sapiens
  misc_feature (1)..(1): n is a, c, g, or t
natcgcgcaggcgcactgaacctcagccgcgccgggaggcgagcccgttggcgaggggcggggcagatggcgagggagcggggcgagctgctttttgaggctgcgcactcgcatggccccacctcgcaggtccacttccggcgccgcggctgttccgggcggagaccgcttgtgctggagtcggagttgtaacgctccactgactgatagagcgaccggccgaccatggcgcccggagtggcccgcgggccgacgccgtactggaggttgcgcctcggtggcgccgcgctgctcctgctgctcatcccggtggccgccgcgcaggagcctcccggagctgcttgttctcagaacacaaacaaaacctgtgaagagtgcctgaagaacgtctcctgtctttggtgcaacactaacaaggcttgtctggactacccagttacaagcgtcttgccaccggcttccctttgtaaattgagctctgcacgctggggagtttgttgggtgaactttgaggcgctgatcatcaccatgtcggtagtcgggggaaccctcctcctgggcattgccatctgctgctgctgctgctgcaggaggaagaggagccggaagccggacaggagtgaggagaaggccatgcgtgagcgggaggagaggcggatacggcaggaggaacggagagcagagatgaagacaagacatgatgaaatcagaaaaaaatatggcctgtttaaagaagaaaacccgtatgctagatttgaaaacaactaaagcgctccagcacatcagtcccgacgcttcctgtgaggtgcacgctccgcagcccagcccagccgggagaccacgtggccattgcggtctcctgaccttggccagtgaacctgccagccttccaggacaggcggccggagagctgcccctgaaggacagtcctctcgtcttgcagactggtgaccttctattccctgttcatctctgtttctagatttagtcacttgaaataagaaatctttggggtttgggcttttttatactcttctcagtttgtgaaacgctaactgcacacgaagccgcctgacggcacccagcgctgtggctgtcattctcccagggcagaaccctgcgtttctctctgtccactaacaagcttcacacgcaacacagggaagtcggtttgacttttgtcatgaggagaactgaccagccctcatcattccccatcacacggcttttgctgatgacacggggctccagtacacagtctgataaggacttaacgtcctaacctcaattgtattaaatagcattggggaatagctaaacctttttaaaaaaatttattggattttcctccctgcttaaaagatttcaccagaaaaccttcatataaaaattcaggccctttttggacaatttttaaaatttgtatctttactagaacatgagaatctttttcccttggaagcttgaattataaatgtggtgtttggcctgcctcagcagcaccagttgactgctcgtgtgccagcggtgtggggaggacggggcaggacgctgcagctctctccagccctgttggcatcctcagtgcctgcaggcctctcgctgcctgttgggctgtctggggggtggccatttagggatcgtggggacggggtccaccccaagaagaaagaaaggcccgtccacaggcccggctctgggccacgtgccccggaagcaggtgtgtccagagtcagctgagggctctccccacaccacccagcaggcgctggtgctccttctgcctcatgggaccagtccagcttccagccgctctggctcgagggtggtctgagcacttccttctgagtgggcttctctgggagctctccagtggcactgctggacctgcccacgtttctgtaaaatcaggatacgtggctttagtaagcagaccaagcgcttcgtggcagggaaagcagcgtgcggggaagtcactgaaaagtgctgcctaaggaagtttggaaatagtccccgttccagattgccttgaattttaaaacattttgctttgggaaagtaggtcagcagcacctaagatcaaggatgcgttccattttcacacttcacagtcatgaaaactgagaagactgtcttcagcgtgaactaaagttcacaggcagatcactgatccagaacacttcaagaactcgtcaaacagctcgataagcctttttgactgtgtacatctgtaccgggaataacattcctaggctgaaatttccacaaagaatagaacctgtacccagttcttcaggctgatttccctgacctcttgggcatttgtatttgtagtaaagtattgcagagattcctaagtattttatagcagccatcaaaattggactttgtattgtttattcataaaagacacttggtaatagacttcagtgaactctgtatgaatgcagtagtgtgcgtgcaaaatccgcttcctgagcgtagggtgctgagctggcgctagggctcggttgtgaaatacagcgtagtcagcccttgcgctcagtgtagaaacccacgtctgtaaggtcggtcttcgtccatctgcttttttctgaaatacactaagagcagccacaaaactgtaacctcaaggaaaccataaagcttggagtgccttaatttttaaccagtttccaataaaacggtttactacctgcgtgtg

SEQ ID NO: 307080 - DNA, 2703 bp, Homo sapiens
  misc_feature (1)..(1): n is a, c, g, or t
natcgcgcaggcgcactgaacctcagccgcgccgggaggcgagcccgttggcgaggggcggggcagatggcgagggagcggggcgagctgctttttgaggctgcgcactcgcatggccccacctcgcaggtccacttccggcgccgcggctgttccgggcggagaccgcttgtgctggagtcggagttgtaacgctccactgactgatagagcgaccggccgaccatggcgcccggagtggcccgcgggccgacgccgtactggaggttgcgcctcggtggcgccgcgctgctcctgctgctcatcccggtggccgccgcgcaggagcctcccggagctgcttgttctcagaacacaaacaaaacctgtgaagagtgcctgaagaacgtctcctgtctttggtgcaacactaacaaggcttgtctggactacccagttacaagcgtcttgccaccggcttccctttgtaaattgagctctgcacgctggggagtttgttgggtgaactttgaggcgctgatcatcaccatgtcggtagtcgggggaaccctcctcctgggcattgccatctgctgctgctgctgctgcaggaggaagaggagccggaagccggacaggagtgaggagaaggccatgcgtgagcgggaggagaggcggatacggcaggaggaacggagagcagagatgaagacaagacatgatgaaatcagaaaaaaatatggcctgtttaaagaagaaaacccgtatgctagatttgaaaacaactaaagcgctccagcacatcagtcccgacgcttcctgtgaggtgcacgctccgcagcccagcccagccgggagaccacgtggccattgcggtctcctgaccttggccagtgaacctgccagccttccaggacaggcggccggagagctgcccctgaaggacagtcctctcgtcttgcagactggtgaccttctattccctgttcatctctgtttctagatttagtcacttgaaataagaaatctttggggtttgggcttttttatactcttctcagtttgtgaaacgctaactgcacacgaagccgcctgacggcacccagcgctgtggctgtcattctcccagggcagaaccctgcgtttctctctgtccactaacaagcttcacacgcaacacagggaagtcggtttgacttttgtcatgaggagaactgaccagccctcatcattccccataaaaccacggacagcgtctgtgtgcgcatcttgagtcttcacacctgttgactcacacggcttttgctgatgacacggggctccagtacacagtctgataaggacttaacgtcctaacctcaattgtattaaatagcattggggaatagctaaacctttttaaaaaaatttattggattttcctccctgcttaaaagatttcaccagaaaaccttcatataaaaattcaggccctttttggacaattttttataaatgtggtgtttggcctgcctcagcagcaccagttgactgctcgtgtgccagcggtgtggggaggacggggcaggacgctgcagctctctccagccctgttggcatcctcagtgcctgcaggcctctcgctgcctgttgggctgtctggggggtggccatttagggatcgtggggacggggtccaccccaagaagaaagaaaggcccgtccacaggcccggctctgggccacgtgccccggaagcaggtgtgtccagagtcagctgagggctctccccacaccacccagcaggcgctggtgctccttctgcctcatgggaccagtccagcttccagccgctctggctcgagggtggtctgagcacttccttctgagtgggcttctctgggagctctccagtggcactgctggacctgcccacgtttctgtaaaatcaggatacgtggctttagtaagcagaccaagcgcttcgtggcagggaaagcagcgtgcggggaagtcactgaaaagtgctgcctaaggaagtttggaaatagtccccgttccagattgccttgaattttaaaacattttgctttgggaaagtaggtcagcagcacctaagatcaaggatgcgttccattttcacacttcacagtcatgaaaactgagaagactgtcttcagcgtgaactaaagttcacaggcagatcactgatccagaacacttcaagaactcgtcaaacagctcgataagcctttttgactgtgtacatctgtaccgggaataacattcctaggctgaaatttccacaaagaatagaacctgtacccagttcttcaggctgatttccctgacctcttgggcatttgtatttgtagtaaagtattgcagagattcctaagtattttatagcagccatcaaaattggactttgtattgtttattcataaaagacacttggtaatagacttcagtgaactctgtatgaatgcagtagtgtgcgtgcaaaatccgcttcctgagcgtagggtgctgagctggcgctagggctcggttgtgaaatacagcgtagtcagcccttgcgctcagtgtagaaacccacgtctgtaaggtcggtcttcgtccatctgcttttttctgaaatacactaagagcagccacaaaactgtaacctcaaggaaaccataaagcttggagtgccttaatttttaaccagtttccaataaaacggtttactacctgcgtgtg

SEQ ID NO: 307081 - DNA, 2723 bp, Homo sapiens
  misc_feature (1)..(1): n is a, c, g, or t
natcgcgcaggcgcactgaacctcagccgcgccgggaggcgagcccgttggcgaggggcggggcagatggcgagggagcggggcgagctgctttttgaggctgcgcactcgcatggccccacctcgcaggtccacttccggcgccgcggctgttccgggcggagaccgcttgtgctggagtcggagttgtaacgctccactgactgatagagcgaccggccgaccatggcgcccggagtggcccgcgggccgcgctgctcctgctgctcatcccggtggccgccgcgcaggagcctcccggagctgcttgttctcagaacacaaacaaaacctgtgaagagtgcctgaagaacgtctcctgtctttggtgcaacactaacaaggcttgtctggactacccagttacaagcgtcttgccaccggcttccctttgtaaattgagctctgcacgctggggagtttgttgggtgaactttgaggcgctgatcatcaccatgtcggtagtcgggggaaccctcctcctgggcattgccatctgctgctgctgctgctgcaggaggaagaggagccggaagccggacaggagtgaggagaaggccatgcgtgagcgggaggagaggcggatacggcaggaggaacggagagcagagatgaagacaagacatgatgaaatcagaaaaaaatatggcctgtttaaagaagaaaacccgtatgctagatttgaaaacaactaaagcgctccagcacatcagtcccgacgcttcctgtgaggtgcacgctccgcagcccagcccagccgggagaccacgtggccattgcggtctcctgaccttggccagtgaacctgccagccttccaggacaggcggccggagagctgcccctgaaggacagtcctctcgtcttgcagactggtgaccttctattccctgttcatctctgtttctagatttagtcacttgaaataagaaatctttggggtttgggcttttttatactcttctcagtttgtgaaacgctaactgcacacgaagccgcctgacggcacccagcgctgtggctgtcattctcccagggcagaaccctgcgtttctctctgtccactaacaagcttcacacgcaacacagggaagtcggtttgacttttgtcatgaggagaactgaccagccctcatcattccccataaaaccacggacagcgtctgtgtgcgcatcttgagtcttcacacctgttgactcacacggcttttgctgatgacacggggctccagtacacagtctgataaggacttaacgtcctaacctcaattgtattaaatagcattggggaatagctaaacctttttaaaaaaatttattggattttcctccctgcttaaaagatttcaccagaaaaccttcatataaaaattcaggccctttttggacaatttttaaaatttgtatctttactagaacatgagaatctttttcccttggaagcttgaattataaatgtggtgtttggcctgcctcagcagcaccagttgactgctcgtgtgccagcggtgtggggaggacggggcaggacgctgcagctctctccagccctgttggcatcctcagtgcctgcaggcctctcgctgcctgttgggctgtctggggggtggccatttagggatcgtggggacggggtccaccccaagaagaaagaaaggcccgtccacaggcccggctctgggccacgtgccccggaagcaggtgtgtccagagtcagctgagggctctccccacaccacccagcaggcgctggtgctccttctgcctcatgggaccagtccagcttccagccgctctggctcgagggtggtctgagcacttccttctgagtgggcttctctgggagctctccagtggcactgctggacctgcccacgtttctgtaaaatcaggatacgtggctttagtaagcagaccaagcgcttcgtggcagggaaagcagcgtgcggggaagtcactgaaaagtgctgcctaaggaagtttggaaatagtccccgttccagattgccttgaattttaaaacattttgctttgggaaagtaggtcagcagcacctaagatcaaggatgcgttccattttcacacttcacagtcatgaaaactgagaagactgtcttcagcgtgaactaaagttcacaggcagatcactgatccagaacacttcaagaactcgtcaaacagctcgataagcctttttgactgtgtacatctgtaccgggaataacattcctaggctgaaatttccacaaagaatagaacctgtacccagttcttcaggctgatttccctgacctcttgggcatttgtatttgtagtaaagtattgcagagattcctaagtattttatagcagccatcaaaattggactttgtattgtttattcataaaagacacttggtaatagacttcagtgaactctgtatgaatgcagtagtgtgcgtgcaaaatccgcttcctgagcgtagggtgctgagctggcgctagggctcggttgtgaaatacagcgtagtcagcccttgcgctcagtgtagaaacccacgtctgtaaggtcggtcttcgtccatctgcttttttctgaaatacactaagagcagccacaaaactgtaacctcaaggaaaccataaagcttggagtgccttaatttttaaccagtttccaataaaacggtttactacctgcgtgtg

SEQ ID NO: 307082 - DNA, 2572 bp, Homo sapiens
  misc_feature (1)..(1): n is a, c, g, or t
natcgcgcaggcgcactgaacctcagccgcgccgggaggcgagcccgttggcgaggggcggggcagatggcgagggagcggggcgagctgctttttgaggctgcgcactcgcatggccccacctcgcaggtccacttccggcgccgcggctgttccgggcggagaccgcttgtgctggagtcggagttgtaacgctccactgactgatagagcgaccggccgaccatggcgcccggagtggcccgcgggccgacgccgtactggaggttgcgcctcggtggcgccgcgctgctcctgctgctcatcccggtggccgccgcgcaggagcctcccggagctgcttgttctcagaacacaaacaaaacctgtgaagagtgcctgaagaacgtctcctgtctttggtgcaacactaacaaggcttgtctggactacccagttacaagcgtcttgccaccggcttccctttgtaaattgagctctgcacgctggggagtttgttgggtgaactttgaggcgctgatcatcaccatgtcggtagtcgggggaaccctcctcctgggcattgccatctgctgctgctgctgctgcaggaggaagaggagccggaagccggacaggagtgaggagaaggccatgcgtgagcgggaggagaggcggatacggcaggaggaacggagagcagagatgaagacaagacatgatgaaatcagaaaaaaatatggcctgtttaaagaagaaaacccgtatgctagatttgaaaacaactaaagcgctccagcacatcagtcccgacgcttcctgtgaggtgcacgctccgcagcccagcccagccgggagaccacgtggccattgcggtctcctgaccttggccagtgaacctgccagccttccaggacaggcggccggagagctgcccctgaaggacagtcctctcgtcttgcagactggtgaccttctattccctgttcatctctgtttctagatttagtcacttgaaataagaaatctttggggtttgggcttttttatactcttctcagtttgtgaaacgctaactgcacacgaagccgcctgacggcacccagcgctgtggctgtcattctcccagggcagaaccctgcgtttctctctgtccactaacaagcttcacacgcaacacagggaagtcggtttgacttttgtcatgaggagaactgaccagccctcatcattccccataaaaccacggacagcgtctgtgtgcgcatcttgagtcttcacacctgttgactcacacggcttttgctgatgacacggggctccagtacacagtctgataaggacttaacgtcctaacctcaattgtattaaatagcattggggaatagctaaacctttttaaaaaaatttattggattttcctccctgcttaaaagatttcaccagaaaaccttcatataaaaattcaggccctttttggacaatttttaaaatttgtatctttactagaacatgagaatctttttcccttggaagcttgaattataaatgtggtgtttggcctgcctcagcagcaccagttgactgctcgtgtgccagcggtgtggggaggacggggcaggacgctgcagcttctccccacaccacccagcaggcgctggtgctccttctgcctcatgggaccagtccagcttccagccgctctggctcgagggtggtctgagcacttccttctgagtgggcttctctgggagctctccagtggcactgctggacctgcccacgtttctgtaaaatcaggatacgtggctttagtaagcagaccaagcgcttcgtggcagggaaagcagcgtgcggggaagtcactgaaaagtgctgcctaaggaagtttggaaatagtccccgttccagattgccttgaattttaaaacattttgctttgggaaagtaggtcagcagcacctaagatcaaggatgcgttccattttcacacttcacagtcatgaaaactgagaagactgtcttcagcgtgaactaaagttcacaggcagatcactgatccagaacacttcaagaactcgtcaaacagctcgataagcctttttgactgtgtacatctgtaccgggaataacattcctaggctgaaatttccacaaagaatagaacctgtacccagttcttcaggctgatttccctgacctcttgggcatttgtatttgtagtaaagtattgcagagattcctaagtattttatagcagccatcaaaattggactttgtattgtttattcataaaagacacttggtaatagacttcagtgaactctgtatgaatgcagtagtgtgcgtgcaaaatccgcttcctgagcgtagggtgctgagctggcgctagggctcggttgtgaaatacagcgtagtcagcccttgcgctcagtgtagaaacccacgtctgtaaggtcggtcttcgtccatctgcttttttctgaaatacactaagagcagccacaaaactgtaacctcaaggaaaccataaagcttggagtgccttaatttttaaccagtttccaataaaacggtttactacctgcgtgtg

SEQ ID NO: 307083 - DNA, 2837 bp, Homo sapiens
  misc_feature (1)..(1): n is a, c, g, or t
natcgcgcaggcgcactgaacctcagccgcgccgggaggcgagcccgttggcgaggggcggggcagatggcgagggagcggggcgagctgctttttgaggctgcgcactcgcatggccccacctcgcaggtccacttccggcgccgcggctgttccgggcggagaccgcttgtgctggagtcggagttgtaacgctccactgactgatagagcgaccggccgaccatggcgcccggagtggcccgcgggccgacgccgtactggaggttgcgcctcggtggcgccgcgctgctcctgctgctcatcccggtggccgccgcgcaggagcctcccggagctgcgggattcctgaacactcgttccacatgtcttgaagaaggcttgttatcagcaggggctcaggaagaggaccttcatttgcttgttctcagaacacaaacaaaacctgtgaagagtgcctgaagaacgtctcctgtctttggtgcaacactaacaaggcttgtctggactacccagttacaagcgtcttgccaccggcttccctttgtaaattgagctctgcacgctggggagtttgttgggtgaactttgaggcgctgatcatcaccatgtcggtagtcgggggaaccctcctcctgggcattgccatctgctgctgctgctgctgcaggaggaagaggagccggaagccggacaggagtgaggagaaggccatgcgtgagcgggaggagaggcggatacggcaggaggaacggagagcagagatgaagacaagacatgatgaaatcagaaaaaaatatggcctgtttaaagaagaaaacccgtatgctagatttgaaaacaactaaagcgctccagcacatcagtcccgacgcttcctgtgaggtgcacgctccgcagcccagcccagccgggagaccacgtggccattgcggtctcctgaccttggccagtgaacctgccagccttccaggacaggcggccggagagctgcccctgaaggacagtcctctcgtcttgcagactggtgaccttctattccctgttcatctctgtttctagatttagtcacttgaaataagaaatctttggggtttgggcttttttatactcttctcagtttgtgaaacgctaactgcacacgaagccgcctgacggcacccagcgctgtggctgtcattctcccagggcagaaccctgcgtttctctctgtccactaacaagcttcacacgcaacacagggaagtcggtttgacttttgtcatgaggagaactgaccagccctcatcattccccataaaaccacggacagcgtctgtgtgcgcatcttgagtcttcacacctgttgactcacacggcttttgctgatgacacggggctccagtacacagtctgataaggacttaacgtcctaacctcaattgtattaaatagcattggggaatagctaaacctttttaaaaaaatttattggattttcctccctgcttaaaagatttcaccagaaaaccttcatataaaaattcaggccctttttggacaatttttaaaatttgtatctttactagaacatgagaatctttttcccttggaagcttgaattataaatgtggtgtttggcctgcctcagcagcaccagttgactgctcgtgtgccagcggtgtggggaggacggggcaggacgctgcagctctctccagccctgttggcatcctcagtgcctgcaggcctctcgctgcctgttgggctgtctggggggtggccatttagggatcgtggggacggggtccaccccaagaagaaagaaaggcccgtccacaggcccggctctgggccacgtgccccggaagcaggtgtgtccagagtcagctgagggctctccccacaccacccagcaggcgctggtgctccttctgcctcatgggaccagtccagcttccagccgctctggctcgagggtggtctgagcacttccttctgagtgggcttctctgggagctctccagtggcactgctggacctgcccacgtttctgtaaaatcaggatacgtggctttagtaagcagaccaagcgcttcgtggcagggaaagcagcgtgcggggaagtcactgaaaagtgctgcctaaggaagtttggaaatagtccccgttccagattgccttgaattttaaaacattttgctttgggaaagtaggtcagcagcacctaagatcaaggatgcgttccattttcacacttcacagtcatgaaaactgagaagactgtcttcagcgtgaactaaagttcacaggcagatcactgatccagaacacttcaagaactcgtcaaacagctcgataagcctttttgactgtgtacatctgtaccgggaataacattcctaggctgaaatttccacaaagaatagaacctgtacccagttcttcaggctgatttccctgacctcttgggcatttgtatttgtagtaaagtattgcagagattcctaagtattttatagcagccatcaaaattggactttgtattgtttattcataaaagacacttggtaatagacttcagtgaactctgtatgaatgcagtagtgtgcgtgcaaaatccgcttcctgagcgtagggtgctgagctggcgctagggctcggttgtgaaatacagcgtagtcagcccttgcgctcagtgtagaaacccacgtctgtaaggtcggtcttcgtccatctgcttttttctgaaatacactaagagcagccacaaaactgtaacctcaaggaaaccataaagcttggagtgccttaatttttaaccagtttccaataaaacggtttactacctgcgtgtg

SEQ ID NO: 307084 - DNA, 3058 bp, Homo sapiens
gcgctgggctcggcgggcggcctgggcccacggtcgcaggcagcgccccgacggaggctcctcgagggtcacgcccgtttggcggccgcgggagctgccgtcgcggctggggcgcgggcaggggaagagccgtctttgtctttgtctttgttttgtccagtcgctgcggccgctcctcgcgcgtggcctcgggttggccctcgcccggcaggcgggacgcttggcacctgcggcctcccttagcctcactgcgaccccaaacagcactcctcgggttcgatcccgagccgggaagccggctcacgacgtgttcgaggtcgcacagctggtcgggggcaggccgggatggcggccgcaggcccctgcagggtgatggggccgcggccggtgtgtctctacagccgccggcgttcacgccgccactccctcccggccgcagttccacgcacagcagcgaacgctcgcacttatgccttagaaaggaaggcgtccccaaagccaggctgtagcatctgattttgaagcaagctgattgcggttctacgctgtccagacgcgcagcgggattcctgaacactcgttccacatgtcttgaagaaggcttgttatcagcaggggctcaggaagaggaccttcatttgcttgttctcagaacacaaacaaaacctgtgaagagtgcctgaagaacgtctcctgtctttggtgcaacactaacaaggcttgtctggactacccagttacaagcgtcttgccaccggcttccctttgtaaattgagctctgcacgctggggagtttgttgggtgaactttgaggcgctgatcatcaccatgtcggtagtcgggggaaccctcctcctgggcattgccatctgctgctgctgctgctgcaggaggaagaggagccggaagccggacaggagtgaggagaaggccatgcgtgagcgggaggagaggcggatacggcaggaggaacggagagcagagatgaagacaagacatgatgaaatcagaaaaaaatatggcctgtttaaagaagaaaacccgtatgctagatttgaaaacaactaaagcgctccagcacatcagtcccgacgcttcctgtgaggtgcacgctccgcagcccagcccagccgggagaccacgtggccattgcggtctcctgaccttggccagtgaacctgccagccttccaggacaggcggccggagagctgcccctgaaggacagtcctctcgtcttgcagactggtgaccttctattccctgttcatctctgtttctagatttagtcacttgaaataagaaatctttggggtttgggcttttttatactcttctcagtttgtgaaacgctaactgcacacgaagccgcctgacggcacccagcgctgtggctgtcattctcccagggcagaaccctgcgtttctctctgtccactaacaagcttcacacgcaacacagggaagtcggtttgacttttgtcatgaggagaactgaccagccctcatcattccccataaaaccacggacagcgtctgtgtgcgcatcttgagtcttcacacctgttgactcacacggcttttgctgatgacacggggctccagtacacagtctgataaggacttaacgtcctaacctcaattgtattaaatagcattggggaatagctaaacctttttaaaaaaatttattggattttcctccctgcttaaaagatttcaccagaaaaccttcatataaaaattcaggccctttttggacaatttttaaaatttgtatctttactagaacatgagaatctttttcccttggaagcttgaattataaatgtggtgtttggcctgcctcagcagcaccagttgactgctcgtgtgccagcggtgtggggaggacggggcaggacgctgcagctctctccagccctgttggcatcctcagtgcctgcaggcctctcgctgcctgttgggctgtctggggggtggccatttagggatcgtggggacggggtccaccccaagaagaaagaaaggcccgtccacaggcccggctctgggccacgtgccccggaagcaggtgtgtccagagtcagctgagggctctccccacaccacccagcaggcgctggtgctccttctgcctcatgggaccagtccagcttccagccgctctggctcgagggtggtctgagcacttccttctgagtgggcttctctgggagctctccagtggcactgctggacctgcccacgtttctgtaaaatcaggatacgtggctttagtaagcagaccaagcgcttcgtggcagggaaagcagcgtgcggggaagtcactgaaaagtgctgcctaaggaagtttggaaatagtccccgttccagattgccttgaattttaaaacattttgctttgggaaagtaggtcagcagcacctaagatcaaggatgcgttccattttcacacttcacagtcatgaaaactgagaagactgtcttcagcgtgaactaaagttcacaggcagatcactgatccagaacacttcaagaactcgtcaaacagctcgataagcctttttgactgtgtacatctgtaccgggaataacattcctaggctgaaatttccacaaagaatagaacctgtacccagttcttcaggctgatttccctgacctcttgggcatttgtatttgtagtaaagtattgcagagattcctaagtattttatagcagccatcaaaattggactttgtattgtttattcataaaagacacttggtaatagacttcagtgaactctgtatgaatgcagtagtgtgcgtgcaaaatccgcttcctgagcgtagggtgctgagctggcgctagggctcggttgtgaaatacagcgtagtcagcccttgcgctcagtgtagaaacccacgtctgtaaggtcggtcttcgtccatctgcttttttctgaaatacactaagagcagccacaaaactgtaacctcaaggaaaccataaagcttggagtgccttaatttttaaccagtttccaataaaacggtttactacctgcgtgtg

SEQ ID NO: 307085 - DNA, 2704 bp, Homo sapiens
  misc_feature (1)..(1): n is a, c, g, or t
natcgcgcaggcgcactgaacctcagccgcgccgggaggcgagcccgttggcgaggggcggggcagatggcgagggagcggggcgagctgctttttgaggctgcgcactcgcatggccccacctcgcaggtccacttccggcgccgcggctgttccgggcggagaccgcttgtgctggagtcggagttgtaacgctccactgactgatagagcgaccggccgaccatggcgcccggagtggcccgcgggccgacgccgtactggaggttgcgcctcggtggcgccgcgctgctcctgctgctcatcccggtggccgccgcgcaggagcctcccggagctgtgtctttggtgcaacactaacaaggcttgtctggactacccagttacaagcgtcttgccaccggcttccctttgtaaattgagctctgcacgctggggagtttgttgggtgaactttgaggcgctgatcatcaccatgtcggtagtcgggggaaccctcctcctgggcattgccatctgctgctgctgctgctgcaggaggaagaggagccggaagccggacaggagtgaggagaaggccatgcgtgagcgggaggagaggcggatacggcaggaggaacggagagcagagatgaagacaagacatgatgaaatcagaaaaaaatatggcctgtttaaagaagaaaacccgtatgctagatttgaaaacaactaaagcgctccagcacatcagtcccgacgcttcctgtgaggtgcacgctccgcagcccagcccagccgggagaccacgtggccattgcggtctcctgaccttggccagtgaacctgccagccttccaggacaggcggccggagagctgcccctgaaggacagtcctctcgtcttgcagactggtgaccttctattccctgttcatctctgtttctagatttagtcacttgaaataagaaatctttggggtttgggcttttttatactcttctcagtttgtgaaacgctaactgcacacgaagccgcctgacggcacccagcgctgtggctgtcattctcccagggcagaaccctgcgtttctctctgtccactaacaagcttcacacgcaacacagggaagtcggtttgacttttgtcatgaggagaactgaccagccctcatcattccccataaaaccacggacagcgtctgtgtgcgcatcttgagtcttcacacctgttgactcacacggcttttgctgatgacacggggctccagtacacagtctgataaggacttaacgtcctaacctcaattgtattaaatagcattggggaatagctaaacctttttaaaaaaatttattggattttcctccctgcttaaaagatttcaccagaaaaccttcatataaaaattcaggccctttttggacaatttttaaaatttgtatctttactagaacatgagaatctttttcccttggaagcttgaattataaatgtggtgtttggcctgcctcagcagcaccagttgactgctcgtgtgccagcggtgtggggaggacggggcaggacgctgcagctctctccagccctgttggcatcctcagtgcctgcaggcctctcgctgcctgttgggctgtctggggggtggccatttagggatcgtggggacggggtccaccccaagaagaaagaaaggcccgtccacaggcccggctctgggccacgtgccccggaagcaggtgtgtccagagtcagctgagggctctccccacaccacccagcaggcgctggtgctccttctgcctcatgggaccagtccagcttccagccgctctggctcgagggtggtctgagcacttccttctgagtgggcttctctgggagctctccagtggcactgctggacctgcccacgtttctgtaaaatcaggatacgtggctttagtaagcagaccaagcgcttcgtggcagggaaagcagcgtgcggggaagtcactgaaaagtgctgcctaaggaagtttggaaatagtccccgttccagattgccttgaattttaaaacattttgctttgggaaagtaggtcagcagcacctaagatcaaggatgcgttccattttcacacttcacagtcatgaaaactgagaagactgtcttcagcgtgaactaaagttcacaggcagatcactgatccagaacacttcaagaactcgtcaaacagctcgataagcctttttgactgtgtacatctgtaccgggaataacattcctaggctgaaatttccacaaagaatagaacctgtacccagttcttcaggctgatttccctgacctcttgggcatttgtatttgtagtaaagtattgcagagattcctaagtattttatagcagccatcaaaattggactttgtattgtttattcataaaagacacttggtaatagacttcagtgaactctgtatgaatgcagtagtgtgcgtgcaaaatccgcttcctgagcgtagggtgctgagctggcgctagggctcggttgtgaaatacagcgtagtcagcccttgcgctcagtgtagaaacccacgtctgtaaggtcggtcttcgtccatctgcttttttctgaaatacactaagagcagccacaaaactgtaacctcaaggaaaccataaagcttggagtgccttaatttttaaccagtttccaataaaacggtttactacctgcgtgtg

SEQ ID NO: 307086 - DNA, 2570 bp, Homo sapiens
agtgcagttgtgaaggtcagaggtaggaagcatggtccttgctacagatggtgaccatgctcacccaagtccattcaacacaaactcagtgagtgcctgtgatgggccaggctgtgtcctgtgttcttgggagacttcagccagtgaagtgcacaggtgcccggcgtgtggggaggagaggtctacggaagcaaacctcacaggagtgtctttggtgcaacactaacaaggcttgtctggactacccagttacaagcgtcttgccaccggcttccctttgtaaattgagctctgcacgctggggagtttgttgggtgaactttgaggcgctgatcatcaccatgtcggtagtcgggggaaccctcctcctgggcattgccatctgctgctgctgctgctgcaggaggaagaggagccggaagccggacaggagtgaggagaaggccatgcgtgagcgggaggagaggcggatacggcaggaggaacggagagcagagatgaagacaagacatgatgaaatcagaaaaaaatatggcctgtttaaagaagaaaacccgtatgctagatttgaaaacaactaaagcgctccagcacatcagtcccgacgcttcctgtgaggtgcacgctccgcagcccagcccagccgggagaccacgtggccattgcggtctcctgaccttggccagtgaacctgccagccttccaggacaggcggccggagagctgcccctgaaggacagtcctctcgtcttgcagactggtgaccttctattccctgttcatctctgtttctagatttagtcacttgaaataagaaatctttggggtttgggcttttttatactcttctcagtttgtgaaacgctaactgcacacgaagccgcctgacggcacccagcgctgtggctgtcattctcccagggcagaaccctgcgtttctctctgtccactaacaagcttcacacgcaacacagggaagtcggtttgacttttgtcatgaggagaactgaccagccctcatcattccccataaaaccacggacagcgtctgtgtgcgcatcttgagtcttcacacctgttgactcacacggcttttgctgatgacacggggctccagtacacagtctgataaggacttaacgtcctaacctcaattgtattaaatagcattggggaatagctaaacctttttaaaaaaatttattggattttcctccctgcttaaaagatttcaccagaaaaccttcatataaaaattcaggccctttttggacaatttttaaaatttgtatctttactagaacatgagaatctttttcccttggaagcttgaattataaatgtggtgtttggcctgcctcagcagcaccagttgactgctcgtgtgccagcggtgtggggaggacggggcaggacgctgcagctctctccagccctgttggcatcctcagtgcctgcaggcctctcgctgcctgttgggctgtctggggggtggccatttagggatcgtggggacggggtccaccccaagaagaaagaaaggcccgtccacaggcccggctctgggccacgtgccccggaagcaggtgtgtccagagtcagctgagggctctccccacaccacccagcaggcgctggtgctccttctgcctcatgggaccagtccagcttccagccgctctggctcgagggtggtctgagcacttccttctgagtgggcttctctgggagctctccagtggcactgctggacctgcccacgtttctgtaaaatcaggatacgtggctttagtaagcagaccaagcgcttcgtggcagggaaagcagcgtgcggggaagtcactgaaaagtgctgcctaaggaagtttggaaatagtccccgttccagattgccttgaattttaaaacattttgctttgggaaagtaggtcagcagcacctaagatcaaggatgcgttccattttcacacttcacagtcatgaaaactgagaagactgtcttcagcgtgaactaaagttcacaggcagatcactgatccagaacacttcaagaactcgtcaaacagctcgataagcctttttgactgtgtacatctgtaccgggaataacattcctaggctgaaatttccacaaagaatagaacctgtacccagttcttcaggctgatttccctgacctcttgggcatttgtatttgtagtaaagtattgcagagattcctaagtattttatagcagccatcaaaattggactttgtattgtttattcataaaagacacttggtaatagacttcagtgaactctgtatgaatgcagtagtgtgcgtgcaaaatccgcttcctgagcgtagggtgctgagctggcgctagggctcggttgtgaaatacagcgtagtcagcccttgcgctcagtgtagaaacccacgtctgtaaggtcggtcttcgtccatctgcttttttctgaaatacactaagagcagccacaaaactgtaacctcaaggaaaccataaagcttggagtgccttaatttttaaccagtttccaataaaacggtttactacctgcgtgtg

SEQ ID NO: 307087 - DNA, 2704 bp, Homo sapiens
  misc_feature (1)..(1): n is a, c, g, or t
natcgcgcaggcgcactgaacctcagccgcgccgggaggcgagcccgttggcgaggggcggggcagatggcgagggagcggggcgagctgctttttgaggctgcgcactcgcatggccccacctcgcaggtccacttccggcgccgcggctgttccgggcggagaccgcttgtgctggagtcggagttgtaacgctccactgactgatagagcgaccggccgaccatggcgcccggagtggcccgcgggccgacgccgtactggaggttgcgcctcggtggcgccgcgctgctcctgctgctcatcccggtggccgccgcgcaggagcctcccggagctgcttgttctcagaacacaaacaaaacctgtgaagagtgcctgaagaacgtctcctgtctttggtgcaacactaacaaggcttgtctggactacccagttacaagcgtcttgccaccggcttccctttgtaaattgagctctgcacgctggggagtttgttgggtgaactttgaggcgctgatcatcaccatgtcggtagtcgggggaaccctcctcctgggcattgccatctgctgctgctgctgctgcaggaggaagaggagccggaagccggacaggagtgaggagaaggccatgcgtgagcgggaggagaggcggatacggcaggaggaacggagagcagagatgaagacaagacatgatgaaatcagaaaaaaatatggcctgtttaaagaagaaaacccgtatgctagatttgagctccgcagcccagcccagccgggagaccacgtggccattgcggtctcctgaccttggccagtgaacctgccagccttccaggacaggcggccggagagctgcccctgaaggacagtcctctcgtcttgcagactggtgaccttctattccctgttcatctctgtttctagatttagtcacttgaaataagaaatctttggggtttgggcttttttatactcttctcagtttgtgaaacgctaactgcacacgaagccgcctgacggcacccagcgctgtggctgtcattctcccagggcagaaccctgcgtttctctctgtccactaacaagcttcacacgcaacacagggaagtcggtttgacttttgtcatgaggagaactgaccagccctcatcattccccataaaaccacggacagcgtctgtgtgcgcatcttgagtcttcacacctgttgactcacacggcttttgctgatgacacggggctccagtacacagtctgataaggacttaacgtcctaacctcaattgtattaaatagcattggggaatagctaaacctttttaaaaaaatttattggattttcctccctgcttaaaagatttcaccagaaaaccttcatataaaaattcaggccctttttggacaatttttaaaatttgtatctttactagaacatgagaatctttttcccttggaagcttgaattataaatgtggtgtttggcctgcctcagcagcaccagttgactgctcgtgtgccagcggtgtggggaggacggggcaggacgctgcagctctctccagccctgttggcatcctcagtgcctgcaggcctctcgctgcctgttgggctgtctggggggtggccatttagggatcgtggggacggggtccaccccaagaagaaagaaaggcccgtccacaggcccggctctgggccacgtgccccggaagcaggtgtgtccagagtcagctgagggctctccccacaccacccagcaggcgctggtgctccttctgcctcatgggaccagtccagcttccagccgctctggctcgagggtggtctgagcacttccttctgagtgggcttctctgggagctctccagtggcactgctggacctgcccacgtttctgtaaaatcaggatacgtggctttagtaagcagaccaagcgcttcgtggcagggaaagcagcgtgcggggaagtcactgaaaagtgctgcctaaggaagtttggaaatagtccccgttccagattgccttgaattttaaaacattttgctttgggaaagtaggtcagcagcacctaagatcaaggatgcgttccattttcacacttcacagtcatgaaaactgagaagactgtcttcagcgtgaactaaagttcacaggcagatcactgatccagaacacttcaagaactcgtcaaacagctcgataagcctttttgactgtgtacatctgtaccgggaataacattcctaggctgaaatttccacaaagaatagaacctgtacccagttcttcaggctgatttccctgacctcttgggcatttgtatttgtagtaaagtattgcagagattcctaagtattttatagcagccatcaaaattggactttgtattgtttattcataaaagacacttggtaatagacttcagtgaactctgtatgaatgcagtagtgtgcgtgcaaaatccgcttcctgagcgtagggtgctgagctggcgctagggctcggttgtgaaatacagcgtagtcagcccttgcgctcagtgtagaaacccacgtctgtaaggtcggtcttcgtccatctgcttttttctgaaatacactaagagcagccacaaaactgtaacctcaaggaaaccataaagcttggagtgccttaatttttaaccagtttccaataaaacggtttactacctgcgtgtg

SEQ ID NO: 307088 - DNA, 2710 bp, Homo sapiens
  misc_feature (1)..(1): n is a, c, g, or t
natcgcgcaggcgcactgaacctcagccgcgccgggaggcgagcccgttggcgaggggcggggcagatggcgagggagcggggcgagctgctttttgaggctgcgcactcgcatggccccacctcgcaggtccacttccggcgccgcggctgttccgggcggagaccgcttgtgctggagtcggagttgtaacgctccactgactgatagagcgaccggccgaccatggcgcccggagtggcccgcgggccgacgccgtactggaggttgcgcctcggtggcgccgcgctgctcctgctgctcatcccggtggccgccgcgcaggagcctcccggagctgcttgttctcagaacacaaacaaaacctgtgaagagtgcctgaagaacgtctcctgtctttggtgcaacactaacaaggcttgtctggactacccagttacaagcgtcttgccaccggcttccctttgtaaattgagctctgcacgctggggagtttgttgggtgaactttgaggcgctgatcatcaccatgtcggtagtcgggggaaccctcctcctgggcattgccatctgctgctgctgctgctgcaggaggaagaggagccggaagccggacaggagtgaggagaaggccatgcgtgagcgggaggagaggcggatacggcaggaggaacggcctgtttaaagaagaaaacccgtatgctagatttgaaaacaactaaagcgctccagcacatcagtcccgacgcttcctgtgaggtgcacgctccgcagcccagcccagccgggagaccacgtggccattgcggtctcctgaccttggccagtgaacctgccagccttccaggacaggcggccggagagctgcccctgaaggacagtcctctcgtcttgcagactggtgaccttctattccctgttcatctctgtttctagatttagtcacttgaaataagaaatctttggggtttgggcttttttatactcttctcagtttgtgaaacgctaactgcacacgaagccgcctgacggcacccagcgctgtggctgtcattctcccagggcagaaccctgcgtttctctctgtccactaacaagcttcacacgcaacacagggaagtcggtttgacttttgtcatgaggagaactgaccagccctcatcattccccataaaaccacggacagcgtctgtgtgcgcatcttgagtcttcacacctgttgactcacacggcttttgctgatgacacggggctccagtacacagtctgataaggacttaacgtcctaacctcaattgtattaaatagcattggggaatagctaaacctttttaaaaaaatttattggattttcctccctgcttaaaagatttcaccagaaaaccttcatataaaaattcaggccctttttggacaatttttaaaatttgtatctttactagaacatgagaatctttttcccttggaagcttgaattataaatgtggtgtttggcctgcctcagcagcaccagttgactgctcgtgtgccagcggtgtggggaggacggggcaggacgctgcagctctctccagccctgttggcatcctcagtgcctgcaggcctctcgctgcctgttgggctgtctggggggtggccatttagggatcgtggggacggggtccaccccaagaagaaagaaaggcccgtccacaggcccggctctgggccacgtgccccggaagcaggtgtgtccagagtcagctgagggctctccccacaccacccagcaggcgctggtgctccttctgcctcatgggaccagtccagcttccagccgctctggctcgagggtggtctgagcacttccttctgagtgggcttctctgggagctctccagtggcactgctggacctgcccacgtttctgtaaaatcaggatacgtggctttagtaagcagaccaagcgcttcgtggcagggaaagcagcgtgcggggaagtcactgaaaagtgctgcctaaggaagtttggaaatagtccccgttccagattgccttgaattttaaaacattttgctttgggaaagtaggtcagcagcacctaagatcaaggatgcgttccattttcacacttcacagtcatgaaaactgagaagactgtcttcagcgtgaactaaagttcacaggcagatcactgatccagaacacttcaagaactcgtcaaacagctcgataagcctttttgactgtgtacatctgtaccgggaataacattcctaggctgaaatttccacaaagaatagaacctgtacccagttcttcaggctgatttccctgacctcttgggcatttgtatttgtagtaaagtattgcagagattcctaagtattttatagcagccatcaaaattggactttgtattgtttattcataaaagacacttggtaatagacttcagtgaactctgtatgaatgcagtagtgtgcgtgcaaaatccgcttcctgagcgtagggtgctgagctggcgctagggctcggttgtgaaatacagcgtagtcagcccttgcgctcagtgtagaaacccacgtctgtaaggtcggtcttcgtccatctgcttttttctgaaatacactaagagcagccacaaaactgtaacctcaaggaaaccataaagcttggagtgccttaatttttaaccagtttccaataaaacggtttactacctgcgtgtg

SEQ ID NO: 307089 - DNA, 2707 bp, Homo sapiens
  misc_feature (1)..(1): n is a, c, g, or t
natcgcgcaggcgcactgaacctcagccgcgccgggaggcgagcccgttggcgaggggcggggcagatggcgagggagcggggcgagctgctttttgaggctgcgcactcgcatggccccacctcgcaggtccacttccggcgccgcggctgttccgggcggagaccgcttgtgctggagtcggagttgtaacgctccactgactgatagagcgaccggccgaccatggcgcccggagtggcccgcgggccgacgccgtactggaggttgcgcctcggtggcgccgcgctgctcctgctgctcatcccggtggccgccgcgcaggagcctcccggagctgcttgttctcagaacacaaacaaaacctgtgaagagtgcctgaagaacgtctcctgtctttggtgcaacactaacaaggcttgtctggactacccagttacaagcgtcttgccaccggcttccctttgtaaattgagctctgcacgctggggagtttgttgggctcctgggcattgccatctgctgctgctgctgctgcaggaggaagaggagccggaagccggacaggagtgaggagaaggccatgcgtgagcgggaggagaggcggatacggcaggaggaacggagagcagagatgaagacaagacatgatgaaatcagaaaaaaatatggcctgtttaaagaagaaaacccgtatgctagatttgaaaacaactaaagcgctccagcacatcagtcccgacgcttcctgtgaggtgcacgctccgcagcccagcccagccgggagaccacgtggccattgcggtctcctgaccttggccagtgaacctgccagccttccaggacaggcggccggagagctgcccctgaaggacagtcctctcgtcttgcagactggtgaccttctattccctgttcatctctgtttctagatttagtcacttgaaataagaaatctttggggtttgggcttttttatactcttctcagtttgtgaaacgctaactgcacacgaagccgcctgacggcacccagcgctgtggctgtcattctcccagggcagaaccctgcgtttctctctgtccactaacaagcttcacacgcaacacagggaagtcggtttgacttttgtcatgaggagaactgaccagccctcatcattccccataaaaccacggacagcgtctgtgtgcgcatcttgagtcttcacacctgttgactcacacggcttttgctgatgacacggggctccagtacacagtctgataaggacttaacgtcctaacctcaattgtattaaatagcattggggaatagctaaacctttttaaaaaaatttattggattttcctccctgcttaaaagatttcaccagaaaaccttcatataaaaattcaggccctttttggacaatttttaaaatttgtatctttactagaacatgagaatctttttcccttggaagcttgaattataaatgtggtgtttggcctgcctcagcagcaccagttgactgctcgtgtgccagcggtgtggggaggacggggcaggacgctgcagctctctccagccctgttggcatcctcagtgcctgcaggcctctcgctgcctgttgggctgtctggggggtggccatttagggatcgtggggacggggtccaccccaagaagaaagaaaggcccgtccacaggcccggctctgggccacgtgccccggaagcaggtgtgtccagagtcagctgagggctctccccacaccacccagcaggcgctggtgctccttctgcctcatgggaccagtccagcttccagccgctctggctcgagggtggtctgagcacttccttctgagtgggcttctctgggagctctccagtggcactgctggacctgcccacgtttctgtaaaatcaggatacgtggctttagtaagcagaccaagcgcttcgtggcagggaaagcagcgtgcggggaagtcactgaaaagtgctgcctaaggaagtttggaaatagtccccgttccagattgccttgaattttaaaacattttgctttgggaaagtaggtcagcagcacctaagatcaaggatgcgttccattttcacacttcacagtcatgaaaactgagaagactgtcttcagcgtgaactaaagttcacaggcagatcactgatccagaacacttcaagaactcgtcaaacagctcgataagcctttttgactgtgtacatctgtaccgggaataacattcctaggctgaaatttccacaaagaatagaacctgtacccagttcttcaggctgatttccctgacctcttgggcatttgtatttgtagtaaagtattgcagagattcctaagtattttatagcagccatcaaaattggactttgtattgtttattcataaaagacacttggtaatagacttcagtgaactctgtatgaatgcagtagtgtgcgtgcaaaatccgcttcctgagcgtagggtgctgagctggcgctagggctcggttgtgaaatacagcgtagtcagcccttgcgctcagtgtagaaacccacgtctgtaaggtcggtcttcgtccatctgcttttttctgaaatacactaagagcagccacaaaactgtaacctcaaggaaaccataaagcttggagtgccttaatttttaaccagtttccaataaaacggtttactacctgcgtgtg

SEQ ID NO: 307090 - DNA, 2137 bp, Homo sapiens
cgccgctggctgttccggtgcggaggagacggctggatacggcagtgaggaacggagagcagagatgaagacaagacatgatgaaatcagaaaaaaatatggcctgtttaaagaagaaaacccgtatgctagatttgaaaacaactaaagcgctccagcacatcagtcccgacgcttcctgtgaggtgcacgctccgcagcccagcccagccgggagaccacgtggccattgcggtctcctgaccttggccagtgaacctgccagccttccaggacaggcggccggagagctgcccctgaaggacagtcctctcgtcttgcagactggtgaccttctattccctgttcatctctgtttctagatttagtcacttgaaataagaaatctttggggtttgggcttttttatactcttctcagtttgtgaaacgctaactgcacacgaagccgcctgacggcacccagcgctgtggctgtcattctcccagggcagaaccctgcgtttctctctgtccactaacaagcttcacacgcaacacagggaagtcggtttgacttttgtcatgaggagaactgaccagccctcatcattccccataaaaccacggacagcgtctgtgtgcgcatcttgagtcttcacacctgttgactcacacggcttttgctgatgacacggggctccagtacacagtctgataaggacttaacgtcctaacctcaattgtattaaatagcattggggaatagctaaacctttttaaaaaaatttattggattttcctccctgcttaaaagatttcaccagaaaaccttcatataaaaattcaggccctttttggacaatttttaaaatttgtatctttactagaacatgagaatctttttcccttggaagcttgaattataaatgtggtgtttggcctgcctcagcagcaccagttgactgctcgtgtgccagcggtgtggggaggacggggcaggacgctgcagctctctccagccctgttggcatcctcagtgcctgcaggcctctcgctgcctgttgggctgtctggggggtggccatttagggatcgtggggacggggtccaccccaagaagaaagaaaggcccgtccacaggcccggctctgggccacgtgccccggaagcaggtgtgtccagagtcagctgagggctctccccacaccacccagcaggcgctggtgctccttctgcctcatgggaccagtccagcttccagccgctctggctcgagggtggtctgagcacttccttctgagtgggcttctctgggagctctccagtggcactgctggacctgcccacgtttctgtaaaatcaggatacgtggctttagtaagcagaccaagcgcttcgtggcagggaaagcagcgtgcggggaagtcactgaaaagtgctgcctaaggaagtttggaaatagtccccgttccagattgccttgaattttaaaacattttgctttgggaaagtaggtcagcagcacctaagatcaaggatgcgttccattttcacacttcacagtcatgaaaactgagaagactgtcttcagcgtgaactaaagttcacaggcagatcactgatccagaacacttcaagaactcgtcaaacagctcgataagcctttttgactgtgtacatctgtaccgggaataacattcctaggctgaaatttccacaaagaatagaacctgtacccagttcttcaggctgatttccctgacctcttgggcatttgtatttgtagtaaagtattgcagagattcctaagtattttatagcagccatcaaaattggactttgtattgtttattcataaaagacacttggtaatagacttcagtgaactctgtatgaatgcagtagtgtgcgtgcaaaatccgcttcctgagcgtagggtgctgagctggcgctagggctcggttgtgaaatacagcgtagtcagcccttgcgctcagtgtagaaacccacgtctgtaaggtcggtcttcgtccatctgcttttttctgaaatacactaagagcagccacaaaactgtaacctcaaggaaaccataaagcttggagtgccttaatttttaaccagtttccaataaaacggtttactacctgcgtgtg

SEQ ID NO: 307091 - DNA, 2538 bp, Homo sapiens
  misc_feature (1)..(1): n is a, c, g, or t
natcgcgcaggcgcactgaacctcagccgcgccgggaggcgagcccgttggcgaggggcggggcagatggcgagggagcggggcgagctgctttttgaggctgcgcactcgcatggccccacctcgcaggtccacttccggcgccgcggctgttccgggcggagaccgcttgtgctggagtcggagttgtaacgctccactgactgatagagcgaccggccgaccatggcgcccggagtggcccgcgggccgacgccgtactggaggttgcgcctcggtggcgccgcgctgctcctgctgctcatcccggtggccgccgcgcaggagcctcccggagctgcttgttctcagaacacaaacaaaacctgtgaagagtgcctgaagaacgtctcctgtctttggtgcaacactaacaaggcttgtctggactacccagttacaagcgtcttgccaccggcttccctttgtaaattgagctctgcacgctggggagtttgttggggcctgtttaaagaagaaaacccgtatgctagatttgaaaacaactaaagcgctccagcacatcagtcccgacgcttcctgtgaggtgcacgctccgcagcccagcccagccgggagaccacgtggccattgcggtctcctgaccttggccagtgaacctgccagccttccaggacaggcggccggagagctgcccctgaaggacagtcctctcgtcttgcagactggtgaccttctattccctgttcatctctgtttctagatttagtcacttgaaataagaaatctttggggtttgggcttttttatactcttctcagtttgtgaaacgctaactgcacacgaagccgcctgacggcacccagcgctgtggctgtcattctcccagggcagaaccctgcgtttctctctgtccactaacaagcttcacacgcaacacagggaagtcggtttgacttttgtcatgaggagaactgaccagccctcatcattccccataaaaccacggacagcgtctgtgtgcgcatcttgagtcttcacacctgttgactcacacggcttttgctgatgacacggggctccagtacacagtctgataaggacttaacgtcctaacctcaattgtattaaatagcattggggaatagctaaacctttttaaaaaaatttattggattttcctccctgcttaaaagatttcaccagaaaaccttcatataaaaattcaggccctttttggacaatttttaaaatttgtatctttactagaacatgagaatctttttcccttggaagcttgaattataaatgtggtgtttggcctgcctcagcagcaccagttgactgctcgtgtgccagcggtgtggggaggacggggcaggacgctgcagctctctccagccctgttggcatcctcagtgcctgcaggcctctcgctgcctgttgggctgtctggggggtggccatttagggatcgtggggacggggtccaccccaagaagaaagaaaggcccgtccacaggcccggctctgggccacgtgccccggaagcaggtgtgtccagagtcagctgagggctctccccacaccacccagcaggcgctggtgctccttctgcctcatgggaccagtccagcttccagccgctctggctcgagggtggtctgagcacttccttctgagtgggcttctctgggagctctccagtggcactgctggacctgcccacgtttctgtaaaatcaggatacgtggctttagtaagcagaccaagcgcttcgtggcagggaaagcagcgtgcggggaagtcactgaaaagtgctgcctaaggaagtttggaaatagtccccgttccagattgccttgaattttaaaacattttgctttgggaaagtaggtcagcagcacctaagatcaaggatgcgttccattttcacacttcacagtcatgaaaactgagaagactgtcttcagcgtgaactaaagttcacaggcagatcactgatccagaacacttcaagaactcgtcaaacagctcgataagcctttttgactgtgtacatctgtaccgggaataacattcctaggctgaaatttccacaaagaatagaacctgtacccagttcttcaggctgatttccctgacctcttgggcatttgtatttgtagtaaagtattgcagagattcctaagtattttatagcagccatcaaaattggactttgtattgtttattcataaaagacacttggtaatagacttcagtgaactctgtatgaatgcagtagtgtgcgtgcaaaatccgcttcctgagcgtagggtgctgagctggcgctagggctcggttgtgaaatacagcgtagtcagcccttgcgctcagtgtagaaacccacgtctgtaaggtcggtcttcgtccatctgcttttttctgaaatacactaagagcagccacaaaactgtaacctcaaggaaaccataaagcttggagtgccttaatttttaaccagtttccaataaaacggtttactacctgcgtgtg

SEQ ID NO: 307092 - DNA, 2382 bp, Homo sapiens
agtaaggttattttgtttaatagtagccatccactgtggaactagccaaccactgtggaaagaaatacttgccttaaatttcttttcttcgccgagcatcaggaagtaagtgcttatctcttaggatctgttagagttcttgtttctagtaaattttatttcagttttaaagtttaaagtggtttgacttcaaaaaaggttaagcactgtatgagagcctgcttacaacgcccgttgttgctatagcctcagtaaatcttcttataaagcttggtttgtatggctttctaagattttgtttctggttgaatgaatgaagttatgattcaagtttattttgtttcaggcctgtttaaagaagaaaacccgtatgctagatttgaaaacaactaaagcgctccagcacatcagtcccgacgcttcctgtgaggtgcacgctccgcagcccagcccagccgggagaccacgtggccattgcggtctcctgaccttggccagtgaacctgccagccttccaggacaggcggccggagagctgcccctgaaggacagtcctctcgtcttgcagactggtgaccttctattccctgttcatctctgtttctagatttagtcacttgaaataagaaatctttggggtttgggcttttttatactcttctcagtttgtgaaacgctaactgcacacgaagccgcctgacggcacccagcgctgtggctgtcattctcccagggcagaaccctgcgtttctctctgtccactaacaagcttcacacgcaacacagggaagtcggtttgacttttgtcatgaggagaactgaccagccctcatcattccccataaaaccacggacagcgtctgtgtgcgcatcttgagtcttcacacctgttgactcacacggcttttgctgatgacacggggctccagtacacagtctgataaggacttaacgtcctaacctcaattgtattaaatagcattggggaatagctaaacctttttaaaaaaatttattggattttcctccctgcttaaaagatttcaccagaaaaccttcatataaaaattcaggccctttttggacaatttttaaaatttgtatctttactagaacatgagaatctttttcccttggaagcttgaattataaatgtggtgtttggcctgcctcagcagcaccagttgactgctcgtgtgccagcggtgtggggaggacggggcaggacgctgcagctctctccagccctgttggcatcctcagtgcctgcaggcctctcgctgcctgttgggctgtctggggggtggccatttagggatcgtggggacggggtccaccccaagaagaaagaaaggcccgtccacaggcccggctctgggccacgtgccccggaagcaggtgtgtccagagtcagctgagggctctccccacaccacccagcaggcgctggtgctccttctgcctcatgggaccagtccagcttccagccgctctggctcgagggtggtctgagcacttccttctgagtgggcttctctgggagctctccagtggcactgctggacctgcccacgtttctgtaaaatcaggatacgtggctttagtaagcagaccaagcgcttcgtggcagggaaagcagcgtgcggggaagtcactgaaaagtgctgcctaaggaagtttggaaatagtccccgttccagattgccttgaattttaaaacattttgctttgggaaagtaggtcagcagcacctaagatcaaggatgcgttccattttcacacttcacagtcatgaaaactgagaagactgtcttcagcgtgaactaaagttcacaggcagatcactgatccagaacacttcaagaactcgtcaaacagctcgataagcctttttgactgtgtacatctgtaccgggaataacattcctaggctgaaatttccacaaagaatagaacctgtacccagttcttcaggctgatttccctgacctcttgggcatttgtatttgtagtaaagtattgcagagattcctaagtattttatagcagccatcaaaattggactttgtattgtttattcataaaagacacttggtaatagacttcagtgaactctgtatgaatgcagtagtgtgcgtgcaaaatccgcttcctgagcgtagggtgctgagctggcgctagggctcggttgtgaaatacagcgtagtcagcccttgcgctcagtgtagaaacccacgtctgtaaggtcggtcttcgtccatctgcttttttctgaaatacactaagagcagccacaaaactgtaacctcaaggaaaccataaagcttggagtgccttaatttttaaccagtttccaataaaacggtttactacctgcgtgtg

SEQ ID NO: 307093 - DNA, 3061 bp, Homo sapiens
  misc_feature (1)..(1): n is a, c, g, or t
  misc_feature (2769)..(2769): n is a, c, g, or t
natcgcgcaggcgcactgaacctcagccgcgccgggaggcgagcccgttggcgaggggcggggcagatggcgagggagcggggcgagctgctttttgaggctgcgcactcgcatggccccacctcgcaggtccacttccggcgccgcggctgttccgggcggagaccgcttgtgctggagtcggagttgtaacgctccactgactgatagagcgaccggccgaccatggcgcccggagtggcccgcgggccgacgccgtactggaggttgcgcctcggtggcgccgcgctgctcctgctgctcatcccggtggccgccgcgcaggagcctcccggagctgcttgttctcagaacacaaacaaaacctgtgaagagtgcctgaagaacgtctcctgtctttggtgcaacactaacaaggcttgtctggactacccagttacaagcgtcttgccaccggcttccctttgtaaattgagctctgcacgctggggagtttgttgggtgaactttgaggcgctgatcatcaccatgtcggtagtcgggggaaccctcctcctgggcattgccatctgctgctgctgctgctgcaggaggaagaggagccggaagccggacaggagtgaggagaaggccatgcgtgagcgggaggagaggcggatacggcaggaggaacggagagcagagatgaagacaagacatgatgaaatcagaaaaaaatatggcctgtttaaagaagaaaacccgtatgctagatttgaaaacaactaaagcgctccagcacatcagtcccgacgcttcctgtgaggtgcacgctccgcagcccagcccagccgggagaccacgtggccattgcggtctcctgaccttggccagtgaacctgccagccttccaggacaggcggccggagagctgcccctgaaggacagtcctctcgtcttgcagactggtgaccttctattccctgttcatctctgtttctagatttagtcacttgaaataagaaatctttggggtttgggcttttttatactcttctcagtttgtgaaacgctaactgcacacgaagccgcctgacggcacccagcgctgtggctgtcattctcccagggcagaaccctgcgtttctctctgtccactaacaagcttcacacgcaacacagggaagtcggtttgacttttgtcatgaggagaactgaccagccctcatcattccccataaaaccacggacagcgtctgtgtgcgcatcttgagtcttcacacctgttgactcacacggcttttgctgatgacacggggctccagtacacagtctgataaggacttaacgtcctaacctcaattgtattaaatagcattggggaatagctaaacctttttaaaaaaatttattggattttcctccctgcttaaaagatttcaccagaaaaccttcatataaaaattcaggccctttttggacaatttttaaaatttgtatctttactagaacatgagaatctttttcccttggaagcttgaattataaatgtggtgtttggcctgcctcagcagcaccagttgactgctcgtgtgccagcggtgtggggaggacggggcaggacgctgcagctctctccagccctgttggcatcctcagtgcctgcaggcctctcgctgcctgttgggctgtctggggggtggccatttagggatcgtggggacggggtccaccccaagaagaaagaaaggcccgtccacaggcccggctctgggccacgtgccccggaagcaggtgtgtccagagtcagctgagggctctccccacaccacccagcaggcgctggtgctccttctgcctcatgggaccagtccagcttccagccgctctggctcgagggtggtctgagcacttccttctgagtgggcttctctgggagctctccagtggcactgctggacctgcccacgtttctgtaaaatcaggatacgtggctttagtaagcagaccaagcgcttcgtggcagggaaagcagcgtgcggggaagtcactgaaaagtgctgcctaaggaagtttggaaatagtccccgttccagattgccttgaattttaaaacattttgctttgggaaagtaggtcagcagcacctaagatcaaggatgcgttccattttcacacttcacagtcatgaaaactgagaagactgtcttcagcgtgaactaaagttcacaggcagatcactgatccagaacacttcaagaactcgtcaaacagctcgataagcctttttgactgtgtacatctgtaccgggaataacattcctaggctgaaatttccacaaagaatagaacctgtacccagttcttcaggctgatttccctgacctcttgggcatttgtatttgtagtaaagtattgcagagattcctaagtattttatagcagccatcaaaattggactttgtattgtttattcataaaagacacttggtaatagacttcagtgaactctgtatgaatgcagtagtgtgcgtgcaaaatccgcttcctgagcgtagggtgctgagctggcgctagggctcggttgtgaaatacagcgtagtcagcccttgcgctcagtgtagaaacccacgtctgtaaggtcggtcttcgtccatctgcttttttctgaaatacactaagagcagccacaaaactgtaacctcaaggaaaccataaagcttggagtgccttaatttttaaccagtttccaataaaacggtttactacctgcgtgtgaaaaaaaaaaanaaaaaaaaaaaaaaaaaaaaaaagggggggggggcaaaaattttaccccgcggaggggcccaagataagcggcgtcacccgagtttttctgtgtacaaagggggcgccctatagggagagcaggaattaaaaagacaaagccagggggccgcggtaaaaccacgtgcgtggggggaacacggctacagtggggactctgggcaagagacctcaatgcgggcgcggcactcaagcgccacctactcacgagtgagatcaggaattcacttcaggttaggaacacggtagcggg

SEQ ID NO: 307094 - DNA, 2742 bp, Homo sapiens
  misc_feature (1)..(1): n is a, c, g, or t
natcgcgcaggcgcactgaacctcagccgcgccgggaggcgagcccgttggcgaggggcggggcagatggcgagggagcggggcgagctgctttttgaggctgcgcactcgcatggccccacctcgcaggtccacttccggcgccgcggctgttccgggcggagaccgcttgtgctggagtcggagttgtaacgctccactgactgatagagcgaccggccgaccatggcgcccggagtggcccgcgggccgacgccgtactggaggttgcgcctcggtggcgccgcgctgctcctgctgctcatcccggtggccgccgcgcaggagcctcccggagctgcttgttctcagaacacaaacaaaacctgtgaagagtgcctgaagaacgtctcctgtctttggtgcaacactaacaaggcttgtctggactacccagttacaagcgtcttgccaccggcttccctttgtaaattgagctctgcacgctggggagtttgttgggtgaactttgaggcgctgatcatcaccatgtcggtagtcgggggaaccctcctcctgggcattgccatctgctgctgctgctgctgcaggaggaagaggagccggaagccggacaggagtgaggagaaggccatgcgtgagcgggaggagaggcggatacggcaggaggaacggagagcagagatgaagacaagacatgatgaaatcagaaaaaaatatggcctgtttaaagaagaaaacccgtatgctagatttgaaaacaactaaagcgctccagcacatcagtcccgacgcttcctgtgaggtgcacgctccgcagcccagcccagccgggagaccacgtggccattgcggtctcctgaccttggccagtgaacctgccagccttccaggacaggcggccggagagctgcccctgaaggacagtcctctcgtcttgcagactggtgaccttctattccctgttcatctctgtttctagatttagtcacttgaaataagaaatctttggggtttgggcttttttatactcttctcagtttgtgaaacgctaactgcacacgaagccgcctgacggcacccagcgctgtggctgtcattctcccagggcagaaccctgcgtttctctctgtccactaacaagcttcacacgcaacacagggaagtcggtttgacttttgtcatgaggagaactgaccagccctcatcattccccataaaaccacggacagcgtctgtgtgcgcatcttgagtcttcacacctgttgactcacacggcttttgctgatgacacggggctccagtacacagtctgataaggacttaacgtcctaacctcaattgtattaaatagcattggggaatagctaaacctttttaaaaaaatttattggattttcctccctgcttaaaagatttcaccagaaaaccttcatataaaaattcaggccctttttggacaatttttaaaatttgtatctttactagaacatgagaatctttttcccttggaagcttgaattataaatgtggtgtttggcctgcctcagcagcaccagttgactgctcgtgtgccagcggtgtggggaggacggggcaggacgctgcagctctctccagccctgttggcatcctcagtgcctgcaggcctctcgctgcctgttgggctgtctggggggtggccatttagggatcgtggggacggggtccaccccaagaagaaagaaaggcccgtccacaggcccggctctgggccacgtgccccggaagcaggtgtgtccagagtcagctgagggctctccccacaccacccagcaggcgctggtgctccttctgcctcatgggaccagtccagcttccagccgctctggctcgagggtggtctgagcacttccttctgagtgggcttctctgggagctctccagtggcactgctggacctgcccacgtttctgtaaaatcaggatacgtggctttagtaagcagaccaagcgcttcgtggcagggaaagcagcgtgcggggaagtcactgaaaagtgctgcctaaggaagtttggaaatagtccccgttccagattgccttgaattttaaaacattttgctttgggaaagtaggtcagcagcacctaagatcaaggatgcgttccattttcacacttcacagtcatgaaaactgagaagactgtcttcagcgtgaactaaagttcacaggcagatcactgatccagaacacttcaagaactcgtcaaacagctcgataagcctttttgactgtgtacatctgtaccgggaataacattcctaggctgaaatttccacaaagaatagaacctgtacccagttcttcaggctgatttccctgacctcttgggcatttgtatttgtagtaaagtattgcagagattcctaagtattttatagcagccatcaaaattggactttgtattgtttattcataaaagacacttggtaatagacttcagtgaactctgtatgaatgcagtagtgtgcgtgcaaaatccgcttcctgagcgtagggtgctgagctggcgctagggctcggttgtgaaatacagcgtagtcagcccttgcgctcagtgtagaaacccacgtctgtaaggtcggtcttcgtccatctgcttttttctgaaatacactaagagcagccacaaaactgtaacctcaaggaaaccataaagcttggaatagctgctgtagttgcttggaatagctgtgtagttg

SEQ ID NO: 307095 - DNA, 2735 bp, Homo sapiens
  misc_feature (1)..(1): n is a, c, g, or t
natcgcgcaggcgcactgaacctcagccgcgccgggaggcgagcccgttggcgaggggcggggcagatggcgagggagcggggcgagctgctttttgaggctgcgcactcgcatggccccacctcgcaggtccacttccggcgccgcggctgttccgggcggagaccgcttgtgctggagtcggagttgtaacgctccactgactgatagagcgaccggccgaccatggcgcccggagtggcccgcgggccgacgccgtactggaggttgcgcctcggtggcgccgcgctgctcctgctgctcatcccggtggccgccgcgcaggagcctcccggagctgcttgttctcagaacacaaacaaaacctgtgaagagtgcctgaagaacgtctcctgtctttggtgcaacactaacaaggcttgtctggactacccagttacaagcgtcttgccaccggcttccctttgtaaattgagctctgcacgctggggagtttgttgggtgaactttgaggcgctgatcatcaccatgtcggtagtcgggggaaccctcctcctgggcattgccatctgctgctgctgctgctgcaggaggaagaggagccggaagccggacaggagtgaggagaaggccatgcgtgagcgggaggagaggcggatacggcaggaggaacggagagcagagatgaagacaagacatgatgaaatcagaaaaaaatatggcctgtttaaagaagaaaacccgtatgctagatttgaaaacaactaaagcgctccagcacatcagtcccgacgcttcctgtgaggtgcacgctccgcagcccagcccagccgggagaccacgtggccattgcggtctcctgaccttggccagtgaacctgccagccttccaggacaggcggccggagagctgcccctgaaggacagtcctctcgtcttgcagactggtgaccttctattccctgttcatctctgtttctagatttagtcacttgaaataagaaatctttggggtttgggcttttttatactcttctcagtttgtgaaacgctaactgcacacgaagccgcctgacggcacccagcgctgtggctgtcattctcccagggcagaaccctgcgtttctctctgtccactaacaagcttcacacgcaacacagggaagtcggtttgacttttgtcatgaggagaactgaccagccctcatcattccccataaaaccacggacagcgtctgtgtgcgcatcttgagtcttcacacctgttgactcacacggcttttgctgatgacacggggctccagtacacagtctgataaggacttaacgtcctaacctcaattgtattaaatagcattggggaatagctaaacctttttaaaaaaatttattggattttcctccctgcttaaaagatttcaccagaaaaccttcatataaaaattcaggccctttttggacaatttttaaaatttgtatctttactagaacatgagaatctttttcccttggaagcttgaattataaatgtggtgtttggcctgcctcagcagcaccagttgactgctcgtgtgccagcggtgtggggaggacggggcaggacgctgcagctctctccagccctgttggcatcctcagtgcctgcaggcctctcgctgcctgttgggctgtctggggggtggccatttagggatcgtggggacggggtccaccccaagaagaaagaaaggcccgtccacaggcccggctctgggccacgtgccccggaagcaggtgtgtccagagtcagctgagggctctccccacaccacccagcaggcgctggtgctccttctgcctcatgggaccagtccagcttccagccgctctggctcgagggtggtctgagcacttccttctgagtgggcttctctgggagctctccagtggcactgctggacctgcccacgtttctgtaaaatcaggatacgtggctttagtaagcagaccaagcgcttcgtggcagggaaagcagcgtgcggggaagtcactgaaaagtgctgcctaaggaagtttggaaatagtccccgttccagattgccttgaattttaaaacattttgctttgggaaagtaggtcagcagcacctaagatcaaggatgcgttccattttcacacttcacagtcatgaaaactgagaagactgtcttcagcgtgaactaaagttcacaggcagatcactgatccagaacacttcaagaactcgtcaaacagctcgataagcctttttgactgtgtacatctgctgaaatttccacaaagaatagaacctgtacccagttcttcaggctgatttccctgacctcttgggcatttgtatttgtagtaaagtattgcagagattcctaagtattttatagcagccatcaaaattggactttgtattgtttattcataaaagacacttggtaatagacttcagtgaactctgtatgaatgcagtagtgtgcgtgcaaaatccgcttcctgagcgtagggtgctgagctggcgctagggctcggttgtgaaatacagcgtagtcagcccttgcgctcagtgtagaaacccacgtctgtaaggtcggtcttcgtccatctgcttttttctgaaatacactaagagcagccacaaaactgtaacctcaaggaaaccataaagcttggagtgccttaatttttaaccagtttccaataaaacggtttactacctgcgtgtg

SEQ ID NO: 307096 - DNA, 1480 bp, Homo sapiens
gcgggcgactagaggaccctcacccagtacacagtctgataaggacttaacgtcctaacctcaattgtattaaatagcattggggaatagctaaacctttttaaaaaaatttattggattttcctccctgcttaaaagatttcaccagaaaaccttcatataaaaattcaggccctttttggacaatttttaaaatttgtatctttactagaacatgagaatctttttcccttggaagcttgaattataaatgtggtgtttggcctgcctcagcagcaccagttgactgctcgtgtgccagcggtgtggggaggacggggcaggacgctgcagctctctccagccctgttggcatcctcagtgcctgcaggcctctcgctgcctgttgggctgtctggggggtggccatttagggatcgtggggacggggtccaccccaagaagaaagaaaggcccgtccacaggcccggctctgggccacgtgccccggaagcaggtgtgtccagagtcagctgagggctctccccacaccacccagcaggcgctggtgctccttctgcctcatgggaccagtccagcttccagccgctctggctcgagggtggtctgagcacttccttctgagtgggcttctctgggagctctccagtggcactgctggacctgcccacgtttctgtaaaatcaggatacgtggctttagtaagcagaccaagcgcttcgtggcagggaaagcagcgtgcggggaagtcactgaaaagtgctgcctaaggaagtttggaaatagtccccgttccagattgccttgaattttaaaacattttgctttgggaaagtaggtcagcagcacctaagatcaaggatgcgttccattttcacacttcacagtcatgaaaactgagaagactgtcttcagcgtgaactaaagttcacaggcagatcactgatccagaacacttcaagaactcgtcaaacagctcgataagcctttttgactgtgtacatctgtaccgggaataacattcctaggctgaaatttccacaaagaatagaacctgtacccagttcttcaggctgatttccctgacctcttgggcatttgtatttgtagtaaagtattgcagagattcctaagtattttatagcagccatcaaaattggactttgtattgtttattcataaaagacacttggtaatagacttcagtgaactctgtatgaatgcagtagtgtgcgtgcaaaatccgcttcctgagcgtagggtgctgagctggcgctagggctcggttgtgaaatacagcgtagtcagcccttgcgctcagtgtagaaacccacgtctgtaaggtcggtcttcgtccatctgcttttttctgaaatacactaagagcagccacaaaactgtaacctcaaggaaaccataaagcttggagtgccttaatttttaaccagtttccaataaaacggtttactacctgcgtgtg

SEQ ID NO: 307097 - DNA, 1413 bp, Homo sapiens
  misc_feature (56)..(56): n is a, c, g, or t
tggtcgagtaagtgtctactcatgtataatagatgggatagtattaaaaaattatnggtgtctcctgttaaagattcacagaaaaccttcatataaaaattcaggccctttttggacaatttttaaaatttgtatctttactagaacatgagaatctttttcccttggaagcttgaattataaatgtggtgtttggcctgcctcagcagcaccagttgactgctcgtgtgccagcggtgtggggaggacggggcaggacgctgcagctctctccagccctgttggcatcctcagtgcctgcaggcctctcgctgcctgttgggctgtctggggggtggccatttagggatcgtggggacggggtccaccccaagaagaaagaaaggcccgtccacaggcccggctctgggccacgtgccccggaagcaggtgtgtccagagtcagctgagggctctccccacaccacccagcaggcgctggtgctccttctgcctcatgggaccagtccagcttccagccgctctggctcgagggtggtctgagcacttccttctgagtgggcttctctgggagctctccagtggcactgctggacctgcccacgtttctgtaaaatcaggatacgtggctttagtaagcagaccaagcgcttcgtggcagggaaagcagcgtgcggggaagtcactgaaaagtgctgcctaaggaagtttggaaatagtccccgttccagattgccttgaattttaaaacattttgctttgggaaagtaggtcagcagcacctaagatcaaggatgcgttccattttcacacttcacagtcatgaaaactgagaagactgtcttcagcgtgaactaaagttcacaggcagatcactgatccagaacacttcaagaactcgtcaaacagctcgataagcctttttgactgtgtacatctgtaccgggaataacattcctaggctgaaatttccacaaagaatagaacctgtacccagttcttcaggctgatttccctgacctcttgggcatttgtatttgtagtaaagtattgcagagattcctaagtattttatagcagccatcaaaattggactttgtattgtttattcataaaagacacttggtaatagacttcagtgaactctgtatgaatgcagtagtgtgcgtgcaaaatccgcttcctgagcgtagggtgctgagctggcgctagggctcggttgtgaaatacagcgtagtcagcccttgcgctcagtgtagaaacccacgtctgtaaggtcggtcttcgtccatctgcttttttctgaaatacactaagagcagccacaaaactgtaacctcaaggaaaccataaagcttggagtgccttaatttttaaccagtttccaataaaacggtttactacctgcgtgtg

SEQ ID NO: 307098 - DNA, 2684 bp, Homo sapiens
  misc_feature (1)..(1): n is a, c, g, or t
natcgcgcaggcgcactgaacctcagccgcgccgggaggcgagcccgttggcgaggggcggggcagatggcgagggagcggggcgagctgctttttgaggctgcgcactcgcatggccccacctcgcaggtccacttccggcgccgcggctgttccgggcggagaccgcttgtgctggagtcggagttgtaacgctccactgactgatagagcgaccggccgaccatggcgcccggagtggcccgcgggccgacgccgtactggaggttgcgcctcggtggcgccgcgctgctcctgctgctcatcccggtggccgccgcgcaggagcctcccggagctgcttgttctcagaacacaaacaaaacctgtgaagagtgcctgaagaacgtctcctgtctttggtgcaacactaacaaggcttgtctggactacccagttacaagcgtcttgccaccggcttccctttgtaaattgagctctgcacgctggggagtttgttgggtgaactttgaggcgctgatcatcaccatgtcggtagtcgggggaaccctcctcctgggcattgccatctgctgctgctgctgctgcaggaggaagaggagccggaagccggacaggagtgaggagaaggccatgcgtgagcgggaggagaggcggatacggcaggaggaacggagagcagagatgaagacaagacatgatgaaatcagaaaaaaatatggcctgtttaaagaagaaaacccgtatgctagatttgaaaacaactaaagcgctccagcacatcagtcccgacgcttcctgtgaggtgcacgctccgcagcccagcccagccgggagaccacgtggccattgcggtctcctgaccttggccagtgaacctgccagccttccaggacaggcggccggagagctgcccctgaaggacagtcctctcgtcttgcagactggtgaccttctattccctgttcatctctgtttctagatttagtcacttgaaataagaaatctttggggtttgggcttttttatactcttctcagtttgtgaaacgctaactgcacacgaagccgcctgacggcacccagcgctgtggctgtcattctcccagggcagaaccctgcgtttctctctgtccactaacaagcttcacacgcaacacagggaagtcggtttgacttttgtcatgaggagaactgaccagccctcatcattccccataaaaccacggacagcgtctgtgtgcgcatcttgagtcttcacacctgttgactcacacggcttttgctgatgacacggggctccagtacacagtctgataaggacttaacgtcctaacctcaattgtattaaatagcattggggaatagctaaacctttttaaaaaaatttattggattttcctccctgcttaaaagatttcaccagaaaaccttcatataaaaattcaggccctttttggacaatttttaaaatttgtatctttactagaacatgagaatctttttcccttggaagcttgaattataaatgtggtgtttggcctgcctcagcagcaccagttgactgctcgtgtgccagcggtgtggggaggacggggcaggacgctgcagctctctccagccctgttggcatcctcagtgcctgcaggcctctcgctgcctgttgggctgtctggggggtggccatttagggatcgtggggacggggtccaccccaagaagaaagaaaggcccgtccacaggcccggctctgggccacgtgccccggaagcaggtgtgtccagagtcagctgagggctctccccacaccacccagcaggcgctggtgctccttctgcctcatgggaccagtccagcttccagccgctctggctcgagggtggtctgagcacttccttctgagtgggcttctctgggagctctccagtggcactgctggacctgcccacgtttctgtaaaatcaggatacgtggctttagtaagcagaccaagcgcttcgtggcagggaaagcagcgtgcggggaagtcactgaaaagtgctgcctaaggaagtttggaaatagtccccgttccagattgccttgaattttaaaacattttgctttgggaaagtaggtcagcagcacctaagatcaaggatgcgttccattttcacacttcacagtcatgaaaactgagaagactgtcttcagcgtgaactaaagttcacaggcagatcactgatccagaacacttcaagaactcgtcaaacagctcgataagcctttttgactgtgtacatctgtaccgggaataacattcctaggctgaaatttccacaaagaatagaacctgtacccagttcttcaggctgatttccctgacctcttgggcatttgtatttgtagtaaagtattgcagagattcctaagtattttatagcagccatcaaaatagtacataaggagagttggttgactttaacagaatatggtcactccaagagaagttagtgtgggtggggaagtgcaaggttaagaaacagcaaagtcactggagacatatcgtgtcacagcaatatcacagatcaaatccagaagatgaaaaatctcttcctgctttactacctgccatgccaaaaaccacttagcaaatacgaaaacagacctggccgggcacagtggctcacgcttgtaatcccagca

SEQ ID NO: 307099 - DNA, 2387 bp, Homo sapiens
  misc_feature (1)..(1): n is a, c, g, or t
natcgcgcaggcgcactgaacctcagccgcgccgggaggcgagcccgttggcgaggggcggggcagatggcgagggagcggggcgagctgctttttgaggctgcgcactcgcatggccccacctcgcaggtccacttccggcgccgcggctgttccgggcggagaccgcttgtgctggagtcggagttgtaacgctccactgactgatagagcgaccggccgaccatggcgcccggagtggcccgcgggccgacgccgtactggaggttgcgcctcggtggcgccgcgctgctcctgctgctcatcccggtggccgccgcgcaggagcctcccggagctgcttgttctcagaacacaaacaaaacctgtgaagagtgcctgaagaacgtctcctgtctttggtgcaacactaacaaggcttgtctggactacccagttacaagcgtcttgccaccggcttccctttgtaaattgagctctgcacgctggggagtttgttgggtgaactttgaggcgctgatcatcaccatgtcggtagtcgggggaaccctcctcctgggcattgccatctgctgctgctgctgctgcaggaggaagaggagccggaagccggacaggagtgaggagaaggccatgcgtgagcgggaggagaggcggatacggcaggaggaacggagagcagagatgaagacaagacatgatgaaatcagaaaaaaatatggcctgtttaaagaagaaaacccgtatgctagatttgaaaacaactaaagcgctccagcacatcagtcccgacgcttcctgtgaggtgcacgctccgcagcccagcccagccgggagaccacgtggccattgcggtctcctgaccttggccagtgaacctgccagccttccaggacaggcggccggagagctgcccctgaaggacagtcctctcgtcttgcagactggtgaccttctattccctgttcatctctgtttctagatttagtcacttgaaataagaaatctttggggtttgggcttttttatactcttctcagtttgtgaaacgctaactgcacacgaagccgcctgacggcacccagcgctgtggctgtcattctcccagggcagaaccctgcgtttctctctgtccactaacaagcttcacacgcaacacagggaagtcggtttgacttttgtcatgaggagaactgaccagccctcatcattccccataaaaccacggacagcgtctgtgtgcgcatcttgagtcttcacacctgttgactcacacggcttttgctgatgacacggggctccagtacacagtctgataaggacttaacgtcctaacctcaattgtattaaatagcattggggaatagctaaacctttttaaaaaaatttattggattttcctccctgcttaaaagatttcaccagaaaaccttcatataaaaattcaggccctttttggacaatttttaaaatttgtatctttactagaacatgagaatctttttcccttggaagcttgaattataaatgtggtgtttggcctgcctcagcagcaccagttgactgctcgtgtgccagcggtgtggggaggacggggcaggacgctgcagctctctccagccctgttggcatcctcagtgcctgcaggcctctcgctgcctgttgggctgtctggggggtggccatttagggatcgtggggacggggtccaccccaagaagaaagaaaggcccgtccacaggcccggctctgggccacgtgccccggaagcaggtgtgtccagagtcagctgagggctctccccacaccacccagcaggcgctggtgctccttctgcctcatgggaccagtccagcttccagccgctctggctcgagggtggtctgagcacttccttctgagtgggcttctctgggagctctccagtggcactgctggacctgcccacgtttctgtaaaatcaggatacgtggctttagtaagcagaccaagcgcttcgtggcagggaaagcagcgtgcggggaagtcactgaaaagtgctgcctaaggaagtttggaaatagtccccgttccagattgccttgaattttaaaacattttgctttgggaaagtaggtcagcagcacctaagatcaaggatgcgttccattttcacacttcacagtcatgaaaactgagaagactgtcttcagcgtgaactaaagttcacaggcagatcactgatccagaacacttcaagaactcgtcaaacagctcgataagcctttttgactgtgtacatctgtaccgggaataacattcctagcctgaagaactgggtacaggttctattattgtggaaatttcagcctaggaatgttattcccggtcagatggccgggttccta

SEQ ID NO: 307100 - DNA, 2276 bp, Homo sapiens
  misc_feature (1)..(1): n is a, c, g, or t
natcgcgcaggcgcactgaacctcagccgcgccgggaggcgagcccgttggcgaggggcggggcagatggcgagggagcggggcgagctgctttttgaggctgcgcactcgcatggccccacctcgcaggtccacttccggcgccgcggctgttccgggcggagaccgcttgtgctggagtcggagttgtaacgctccactgactgatagagcgaccggccgaccatggcgcccggagtggcccgcgggccgacgccgtactggaggttgcgcctcggtggcgccgcgctgctcctgctgctcatcccggtggccgccgcgcaggagcctcccggagctgcttgttctcagaacacaaacaaaacctgtgaagagtgcctgaagaacgtctcctgtctttggtgcaacactaacaaggcttgtctggactacccagttacaagcgtcttgccaccggcttccctttgtaaattgagctctgcacgctggggagtttgttgggtgaactttgaggcgctgatcatcaccatgtcggtagtcgggggaaccctcctcctgggcattgccatctgctgctgctgctgctgcaggaggaagaggagccggaagccggacaggagtgaggagaaggccatgcgtgagcgggaggagaggcggatacggcaggaggaacggagagcagagatgaagacaagacatgatgaaatcagaaaaaaatatggcctgtttaaagaagaaaacccgtatgctagatttgaaaacaactaaagcgctccagcacatcagtcccgacgcttcctgtgaggtgcacgctccgcagcccagcccagccgggagaccacgtggccattgcggtctcctgaccttggccagtgaacctgccagccttccaggacaggcggccggagagctgcccctgaaggacagtcctctcgtcttgcagactggtgaccttctattccctgttcatctctgtttctagatttagtcacttgaaataagaaatctttggggtttgggcttttttatactcttctcagtttgtgaaacgctaactgcacacgaagccgcctgacggcacccagcgctgtggctgtcattctcccagggcagaaccctgcgtttctctctgtccactaacaagcttcacacgcaacacagggaagtcggtttgacttttgtcatgaggagaactgaccagccctcatcattccccataaaaccacggacagcgtctgtgtgcgcatcttgagtcttcacacctgttgactcacacggcttttgctgatgacacggggctccagtacacagtctgataaggacttaacgtcctaacctcaattgtattaaatagcattggggaatagctaaacctttttaaaaaaatttattggattttcctccctgcttaaaagatttcaccagaaaaccttcatataaaaattcaggccctttttggacaatttttaaaatttgtatctttactagaacatgagaatctttttcccttggaagcttgaattataaatgtggtgtttggcctgcctcagcagcaccagttgactgctcgtgtgccagcggtgtggggaggacggggcaggacgctgcagctctctccagccctgttggcatcctcagtgcctgcaggcctctcgctgcctgttgggctgtctggggggtggccatttagggatcgtggggacggggtccaccccaagaagaaagaaaggcccgtccacaggcccggctctgggccacgtgccccggaagcaggtgtgtccagagtcagctgagggctctccccacaccacccagcaggcgctggtgctccttctgcctcatgggaccagtccagcttccagccgctctggctcgagggtggtctgagcacttccttctgagtgggcttctctgggagctctccagtggcactgctggacctgcccacgtttctgtaaaatcaggatacgtggctttagtaagcagaccaagcgcttcgtggcagggaaagcagcgtgcggggaagtcactgaaaagtgctgcctaaggaagtttggaaatagtccccgttccagattgccttgaattttaaaacattttgctttgggaaagtaggtcagcagcacctaagatcaaggatgcgttccattttcacacttcacagtcatgaaaactgagaagactgtcttcagcgtgaactaaagttcacaggcagatcactgatccagaacacttcaagaactcgaacccagtgtggagatcctctagagtcaccc

SEQ ID NO: 307101 - DNA, 2193 bp, Homo sapiens
  misc_feature (1)..(1): n is a, c, g, or t
natcgcgcaggcgcactgaacctcagccgcgccgggaggcgagcccgttggcgaggggcggggcagatggcgagggagcggggcgagctgctttttgaggctgcgcactcgcatggccccacctcgcaggtccacttccggcgccgcggctgttccgggcggagaccgcttgtgctggagtcggagttgtaacgctccactgactgatagagcgaccggccgaccatggcgcccggagtggcccgcgggccgacgccgtactggaggttgcgcctcggtggcgccgcgctgctcctgctgctcatcccggtggccgccgcgcaggagcctcccggagctgcttgttctcagaacacaaacaaaacctgtgaagagtgcctgaagaacgtctcctgtctttggtgcaacactaacaaggcttgtctggactacccagttacaagcgtcttgccaccggcttccctttgtaaattgagctctgcacgctggggagtttgttgggtgaactttgaggcgctgatcatcaccatgtcggtagtcgggggaaccctcctcctgggcattgccatctgctgctgctgctgctgcaggaggaagaggagccggaagccggacaggagtgaggagaaggccatgcgtgagcgggaggagaggcggatacggcaggaggaacggagagcagagatgaagacaagacatgatgaaatcagaaaaaaatatggcctgtttaaagaagaaaacccgtatgctagatttgaaaacaactaaagcgctccagcacatcagtcccgacgcttcctgtgaggtgcacgctccgcagcccagcccagccgggagaccacgtggccattgcggtctcctgaccttggccagtgaacctgccagccttccaggacaggcggccggagagctgcccctgaaggacagtcctctcgtcttgcagactggtgaccttctattccctgttcatctctgtttctagatttagtcacttgaaataagaaatctttggggtttgggcttttttatactcttctcagtttgtgaaacgctaactgcacacgaagccgcctgacggcacccagcgctgtggctgtcattctcccagggcagaaccctgcgtttctctctgtccactaacaagcttcacacgcaacacagggaagtcggtttgacttttgtcatgaggagaactgaccagccctcatcattccccataaaaccacggacagcgtctgtgtgcgcatcttgagtcttcacacctgttgactcacacggcttttgctgatgacacggggctccagtacacagtctgataaggacttaacgtcctaacctcaattgtattaaatagcattggggaatagctaaacctttttaaaaaaatttattggattttcctccctgcttaaaagatttcaccagaaaaccttcatataaaaattcaggccctttttggacaatttttaaaatttgtatctttactagaacatgagaatctttttcccttggaagcttgaattataaatgtggtgtttggcctgcctcagcagcaccagttgactgctcgtgtgccagcggtgtggggaggacggggcaggacgctgcagctctctccagccctgttggcatcctcagtgcctgcaggcctctcgctgcctgttgggctgtctggggggtggccatttagggatcgtggggacggggtccaccccaagaagaaagaaaggcccgtccacaggcccggctctgggccacgtgccccggaagcaggtgtgtccagagtcagctgagggctctccccacaccacccagcaggcgctggtgctccttctgcctcatgggaccagtccagcttccagccgctctggctcgagggtggtctgagcacttccttctgagtgggcttctctgggagctctccagtggcactgctggacctgcccacgtttctgtaaaatcaggatacgtggctttagtaagcagaccaagcgcttcgtggcagggaaagcagcgtgcggggaagtcactgaaaagtgctgcctaaggaagtttggaaatagtccccgttccagattgccttgaattttaaaacattttgctttgggaaagtaggtcagcagcacctaagatcaaggaggctttattctgcaagcaatcaaataataaatctattctgctaagagatcacaa

SEQ ID NO: 307102 - DNA, 1306 bp, Homo sapiens
  misc_feature (484)..(484): n is a, c, g, or t
ggccgggctccttgtgcttcctggaaagggattgtgccattctagcacccttcacgcgatccaggaatcctctcttcaaacctgtccctgtccacaggcccgatgagcgcgttggaggatcgataggagggggcaataacctagaattggagaccccaggagggcttctctgaggatgtgcacgttcaggatcccccagatggagaaatgggaaggaacttgatcggggtgaaggaaccgcttgagcaaaggcaggaaggagtgtcggcgcccttcattctggaagttcctccttgctttcaggactcagtttcctgggttccccttcacggcccctcatctccttacagtccagggtctgagggtctccgcggtcccctccttactcagtcacgccattcttttgaaacgtacacgtgaccgcggcacttcttaaggagcgccccccttttcctcggtggctttcagtttcctcacctcccgnggagaccacggccatggtcatttatccacttgacaaacatttcacgagcccctgccggtccaagctgtggggaaagcagcgtgcggggaagtcactgaaaagtgctgcctaaggaagtttggaaatagtccccgttccagattgccttgaattttaaaacattttgctttgggaaagtaggtcagcagcacctaagatcaaggatgcgttccattttcacacttcacagtcatgaaaactgagaagactgtcttcagcgtgaactaaagttcacaggcagatcactgatccagaacacttcaagaactcgtcaaacagctcgataagcctttttgactgtgtacatctgtaccgggaataacattcctaggctgaaatttccacaaagaatagaacctgtacccagttcttcaggctgatttccctgacctcttgggcatttgtatttgtagtaaagtattgcagagattcctaagtattttatagcagccatcaaaattggactttgtattgtttattcataaaagacacttggtaatagacttcagtgaactctgtatgaatgcagtagtgtgcgtgcaaaatccgcttcctgagcgtagggtgctgagctggcgctagggctcggttgtgaaatacagcgtagtcagcccttgcgctcagtgtagaaacccacgtctgtaaggtcggtcttcgtccatctgcttttttctgaaatacactaagagcagccacaaaactgtaacctcaaggaaaccataaagcttggagtgccttaatttttaaccagtttccaataaaacggtttactacctgcgtgtg

SEQ ID NO: 307103 - DNA, 1248 bp, Homo sapiens
  misc_feature (1)..(1): n is a, c, g, or t
natcgcgcaggcgcactgaacctcagccgcgccgggaggcgagcccgttggcgaggggcggggcagatggcgagggagcggggcgagctgctttttgaggctgcgcactcgcatggccccacctcgcaggtccacttccggcgccgcggctgttccgggcggagaccgcttgtgctggagtcggagttgtaacgctccactgactgatagagcgaccggccgaccatggcgcccggagtggcccgcgggccgacgccgtactggaggttgcgcctcggtggcgccgcgctgctcctgctgctcatcccggtggccgccgcgcaggagcctcccggagctgcttgttctcagaacacaaacaaaacctgtgaagagtgcctgaagaacgtctcctgtctttggtgcaacactaacaaggcttgtctggactacccagttacaagcgtcttgccaccggcttccctttgtaaattgagctctgcacgctggggagtttgttgggtgaactttgaggcgctgatcatcaccatgtcggtagtcgggggaaccctcctcctgggcattgccatctgctgctgctgctgctgcaggaggaagaggagccggaagccggacaggagtgaggagaaggccatgcgtgagcgggaggagaggcggatacggcaggaggaacggagagcagagatgaagacaagacatgatgaaatcagaaaaaaatatggcctgtttaaagaagaaaacccgtatgctagatttgaaaacaactaaagcgctccagcacatcagtcccgacgcttcctgtgaggtgcacgctccgcagcccagcccagccgggagaccacgtggccattgcggtctcctgaccttggccagtgaacctgccagccttccaggacaggcggccggagagctgcccctgaaggacagtcctctcgtcttgcagactggtgaccttctattccctgttcatctctgtttctagatttagtcacttgaaataagaaatctttggggtttgggcttttttatactcttctcagtttgtgaaacgctaactgcacacgaagccgcctgacggcacccagcgctgtggctgtcattctcccagggcagaaccctgcgtttctctctgtccactaacaagcttcacacgccaaagatttcttatttcaagtgactaaatctggcttcactgctcaggtgattatcctgaacatccaggcaaataagcgcgggctatgcccctga

SEQ ID NO: 307104 - DNA, 1329 bp, Homo sapiens
  misc_feature (1)..(1): n is a, c, g, or t
natcgcgcaggcgcactgaacctcagccgcgccgggaggcgagcccgttggcgaggggcggggcagatggcgagggagcggggcgagctgctttttgaggctgcgcactcgcatggccccacctcgcaggtccacttccggcgccgcggctgttccgggcggagaccgcttgtgctggagtcggagttgtaacgctccactgactgatagagcgaccggccgaccatggcgcccggagtggcccgcgggccgacgccgtactggaggttgcgcctcggtggcgccgcgctgctcctgctgctcatcccggtggccgccgcgcaggagcctcccggagctgcttgttctcagaacacaaacaaaacctgtgaagagtgcctgaagaacgtctcctgtctttggtgcaacactaacaaggcttgtctggactacccagttacaagcgtcttgccaccggcttccctttgtaaattgagctctgcacgctggggagtttgttgggtgaactttgaggcgctgatcatcaccatgtcggtagtcgggggaaccctcctcctgggcattgccatctgctgctgctgctgctgcaggaggaagaggagccggaagccggacaggagtgaggagaaggccatgcgtgagcgggaggagaggcggatacggcaggaggaacggagagcagagatgaagacaagacatgatgaaatcagaaaaaaatatggcctgtttaaagaagaaaacccgtatgctagatttgaaaacaactaaagcgctccagcacatcagtcccgacgcttcctgtgaggtgcacgctccgcagcccagcccagccgggagaccacgtggccattgcggtctcctgaccttggccagtgaacctgccagccttccaggacaggcggccggagagctgcccctgaaggacagtcctctcgtcttgcagactggtgaccttctattccctgttcatctctgtttctagatttagtcacttgaaataagaaatctttggggtttgggcttttttatactcttctcagtttgtgaaacgctaactgcacacgaagccgcctgacggcacccagcgctgtggctgtcattctcccaggggtgctgagctggcgctagggctcggttgtgaaatacagcgtagtcagcccttgcgctcagtgtagaaacccacgtctgtaaggtcggtcttcgtccatctgcttttttctgaaatacactaagagcagccacaaaactgtaacctcaaggaaaccataaagcttggagtgccttaatttttaaccagtttccaataaaacggtttactacctgcgtgtg

SEQ ID NO: 307105 - DNA, 845 bp, Homo sapiens
  misc_feature (1)..(1): n is a, c, g, or t
natcgcgcaggcgcactgaacctcagccgcgccgggaggcgagcccgttggcgaggggcggggcagatggcgagggagcggggcgagctgctttttgaggctgcgcactcgcatggccccacctcgcaggtccacttccggcgccgcggctgttccgggcggagaccgcttgtgctggagtcggagttgtaacgctccactgactgatagagcgaccggccgaccatggcgcccggagtggcccgcgggccgacgccgtactggaggttgcgcctcggtggcgccgcgctgctcctgctgctcatcccggtggccgccgcgcaggagcctcccggagctgcttgttctcagaacacaaacaaaacctgtgaagagtgcctgaagaacgtctcctgtctttggtgcaacactaacaaggcttgtctggactacccagttacaagcgtcttgccaccggcttccctttgtaaattgagctctgcacgctggggagtttgttgggtgaactttgaggcgctgatcatcaccatgtcggtagtcgggggaaccctcctcctgggcattgccatctgctgctgctgctgctgcaggaggaagaggagccggaagccggacaggagtgaggagaaggccatgcgtgagcgggaggagaggcggatacggcaggaggaacggagagcagagatgaagacaagacatgatgaaatcagaaaaaaatatggcctgtttaaagaagaaaacccgtatgctagatttgaaaaactgtaacctcaaggaaaccataaagcttggagtgccttaatttttaaccagtttccaataaaacggtttactacctgcgtgtg

SEQ ID NO: 307106 - DNA, 808 bp, Homo sapiens
  misc_feature (1)..(1): n is a, c, g, or t
natcgcgcaggcgcactgaacctcagccgcgccgggaggcgagcccgttggcgaggggcggggcagatggcgagggagcggggcgagctgctttttgaggctgcgcactcgcatggccccacctcgcaggtccacttccggcgccgcggctgttccgggcggagaccgcttgtgctggagtcggagttgtaacgctccactgactgatagagcgaccggccgaccatggcgcccggagtggcccgcgggccgacgccgtactggaggttgcgcctcggtggcgccgcgctgctcctgctgctcatcccggtggccgccgcgcaggagcctcccggagctgcttgttctcagaacacaaacaaaacctgtgaagagtgcctgaagaacgtctcctgtctttggtgcaacactaacaaggcttgtctggactacccagttacaagcgtcttgccaccggcttccctttgtaaattgagctctgcacgctggggagtttgttgggtgaactttgaggcgctgatcatcaccatgtcggtagtcgggggaaccctcctcctgggcattgccatctgctgctgctgctgctgcaggaggaagaggagccggaagccggacaggagtgaggagaaggccatgcgtgagcgggaggagaggcggatacggcaggaggaacggagagcagagatgaagacaagacatgatgaaatcagaaaaaaatatgaaaactgtaacctcaaggaaaccataaagcttggagtgccttaatttttaaccagtttccaataaaacggtttactacctgcgtgtg

SEQ ID NO: 307107 - DNA, 352 bp, Homo sapiens
cagttattgaatcccaggcgtccaaaagtggattatgtctcagtctttcattgggcgacacttggtaatagacttcagtgaactctgtatgaatgcagtagtgtgcgtgcaaaatccgcttcctgagcgtagggtgctgagctggcgctagggctcggttgtgaaatacagcgtagtcagcccttgcgctcagtgtagaaacccacgtctgtaaggtcggtcttcgtccatctgcttttttctgaaatacactaagagcagccacaaaactgtaacctcaaggaaaccataaagcttggagtgccttaatttttaaccagtttccaataaaacggtttactacctgcgtgtg

SEQ ID NO: 307108 - DNA, 229 bp, Homo sapiens
tgttttatgaagatgaaacagggtggtgtgttagagtcatgactggggtgagggagggctgctctagattggaggtcagggatggctactccaggagctgatatttaatctgagaggagcagtgatgaggaactaccctctaacatcctggagaggaaccttccagtagagggaagggggcattcacttggcttgttcaaggagcagagagagggccaaggcagcacag

SEQ ID NO: 307109 - DNA, 3696 bp, Homo sapiens
cctcagactgaggcttggagacaggagcattccactcgccacttcggcgcgcccccatgccctcttgtgcgcgtgcgcagaggcggaccgcaaggctagggcgtgagggaagggcgggcgtacgcccttgcgtgcgtctcaggcagcgcgcacgccggcgtgagagggcacggggaaaaggtggctctggccggggtggctcggtttcctggggctatgtaactgagctcgtcgacttaggggtccttcttcgctgccctcgccgcgtgctagcagggagtttccgctcgggagagagactgtcctcacgcccgctgcgcctcctcgacggcagagcaggcttgctcgcccgtgggagcgtcccggccgagaagccctgaggggggaggggaggccattttgtcccgaccgactccccggaaccgggcggagcggctgggagaggctgcggagccgcggtcgccgccctcggaggcactggacgccgccactgtcggggcttcctcaaagctgttcgtaggtcgcccgcgccgtctcgagcctttttcccacgcttccccggtcctccggcctgagaacgcccgagtgaggagttggccgtagtgagagggaccgatcccttggggccgccggcggcgagagcccgagccgctcctcccaatggcgaagaagacgtacgacctgcttttcaagctgctcctgatcggggattccggagtggggaagacctgcgtcctttttcgtttttcggatgatgccttcaatactacctttatttccaccataggaatagacttcaagatcaaaacagttgaattacaaggaaagaagatcaagctacagatatgggatacagcaggccaggagcgatttcacaccatcacaacctcctactacagaggcgcaatgggtatcatgctagtatatgacatcaccaatggtaaaagttttgaaaacatcagcaaatggcttagaaacatagatgagcatgccaatgaagatgtggaaagaatgttactaggaaacaagtgtgatatggacgacaaaagagttgtacctaaaggaaaaggagaacagattgcaagggagcatggtattaggttttttgagactagtgcaaaagcaaatataaacatcgaaaaggcgttcctcacgttagctgaagatatccttcgaaagacccctgtaaaagagcccaacagtgaaaatgtagatatcagcagtggaggaggcgtgacaggctggaagagcaaatgctgctgagcattctcctgttccatcagttgccatccactaccccgttttctcttcttgctgcaaaataaaccactctgtccatttttaactctaaacagatatttttgtttctcatcttaactatccaagccacctattttatttgttctttcatctgtgactgcttgctgactttatcataattttcttcaaacaaaaaaatgtatagaaaaatcatgtctgtgacttcatttttaaatgtacttgctcagctcaactgcatttcagttgtattatagtccagttcttatcaacattaaaacctatagcaatcatttcaaatctattctgcaaattgtataagaataaagttagaattaacaattttattttgtacaacagtggaattttctgtcatggataatgtgcttgagtccctataatctatagacatgtgatagcaaaagaaacaaacaaaagccaggaaaacactcattttcgccttgaatatgtaaatgggattaattttgtcctgtgccttatgtggaaaggaacttctttggttttccttttttgttctggtggaagcatgtgcaggagacatatcatccaaacataaaccattaaaatgtttgtggtttgcttggctgtaattttcaaagtagttaattgaggacaaagggtaatgcagaagtgatagctttggtttgctgagtcttgttttaagtggccttgatatttaaaactattcctgccaccatttcttctccttggccacttcttccttgcgtctccctgcatgctgctttatttgcttctccctccccaaccacctcatggtatatttaagagtgaaagggacaaactagtaggtttgtcaagtttaatataaagcactgatgtaacttgctaggtaaacggaaagataagttctaactgcctactatccaatgtcagttaattggtgtcttcccccctcatttgctctcttccctaaaatgtgtcccagatgccttcatttgctgttttacttctatgttctgcttttcctcctctctttgttcccttcctgtctatccattgagtttatgaaatggaagagttaactgcatgcactagtgtttggagggtgttgtggtttgtctttctaattaggtgtatagcctattcactttcctagaataaatctcttaacctaaatttgagtagtctgcattttggcaactcctctagcagcttggtagcctagtacaggttgtttttttaaaaaaggaaaagcaggaaggaggagtgaattttattaacatgtttgccaaatgtattgagatttggcctctgaagaacactttttcagtgttaagtttctttaccttaagattcagaaatactttagaatattattaattttaagtcctgtctttacatccttttggaaaacttgtattaccatgagtttggaaaaaggacaacgaaaggcttttcatgtaaagataagatctttagctatctctaaccctgtccttttttcactgcattttttctagttttgcttcattgcttatcattaggatagggtaagtgaagtttgctatgctgctagcatcctaagatgatacctttgttgaaagaattgtgaatagcatgattcatttctagcagaggctgagtttaggacagcagcttccattgagaagtctttctgtgtcgtgaatagcattttaatgacctcttggctcacataagcaaacaacatagggacgtatctgctatgaaaatccacaaatttttcagatagtgccctaaaaacaattttatatgcctcactggttgttattcttaggttattcccacacttgactttatcattgtttactactagtaaaaagcagcattgccaaataatccctaattttccactaaaaatataatgaaatgatgttaagctttttgaaaagtttaggttaaacctactgttgttagattaatgtatttgttgcttccctttatctggaatgtggcattagcttttttattttaaccctctttaattcttattcaattccatgacttaaggttggagagctaaacactgggatttttggataacagactgacagttttgcataattataatcggcattgtacatagaaaggatatggctaccttttgttaaatctgcactttctaaatatcaaaaaagggaaatgaagtataaatcaatttttgtataatctgtttgaaacatgagttttatttgcttaatattagggctttgccccttttctgtaagtctcttgggatcctgtgtagaagctgttctcattaaacaccaaacagttaagtccattctctggtactagctacaaattcggtttcatattctacttaacaatttaaataaactgaaatatttctagatggtctacttctgttcatataaaaacaaaacttgatttcca

SEQ ID NO: 307110 - DNA, 3653 bp, Homo sapiens
cctcagactgaggcttggagacaggagcattccactcgccacttcggcgcgcccccatgccctcttgtgcgcgtgcgcagaggcggaccgcaaggctagggcgtgagggaagggcgggcgtacgcccttgcgtgcgtctcaggcagcgcgcacgccggcgtgagagggcacggggaaaaggtggctctggccggggtggctcggtttcctggggctatgtaactgagctcgtcgacttaggggtccttcttcgctgccctcgccgcgtgctagcagggagtttccgctcgggagagagactgtcctcacgcccgctgcgcctcctcgacggcagagcaggcttgctcgcccgtgggagcgtcccggccgagaagccctgaggggggaggggaggccattttgtcccgaccgactccccggaaccgggcggagcggctgggagaggctgcggagccgcggtcgccgccctcggaggcactggacgccgccactgtcggggcttcctcaaagctgttcgtaggtcgcccgcgccgtctcgagcctttttcccacgcttccccggtcctccggcctgagaacgcccgagtgaggagttggccgtagtgagagggaccgatcccttggggccgccggcggcgagagcccgagccgctcctcccaatggcgaagaagacgtacgacctgcttttcaagctgctcctgatcggggattccggagtggggaagacctgcgtcctttttcgtttttcggatgatgccttcaatactacctttatttccaccataggaatagacttcaagatcaaaacagttgaattacaaggaaagaagatcaagctacagatatgggatacagcaggccaggagcgatttcacaccatcacaacctcctactacagaggcgcaatgggtatcatgctagtatatgacatcaccaatggtaaaagttttgaaaacatcagcaaatggcttagaaacatagatgagcatgccaatgaagatgtggaaagaatgttactaggaaacaagtgtgatatggacgacaaaagagttgtacctaaaggaaaaggagaacagattgcaagggagcatggtattaggttttttgagactagtgcaaaagcaaatataaacatcgaaaaggcgttcctcacgttagctgaagatatccttcgaaagacccctgtaaaagagcccaacagtgaaaatgtagatatcagcagtggaggaggcgtgacaggctggaagagcaaatgctgctgagcattctcctgttccatcagttgccatccactaccccgttttctcttcttgctgcaaaataaaccactctgtccatttttaactctaaacagatatttttgtttctcatcttaactatccaagccacctattttatttgttctttcatctgtgactgcttgctgactttatcataattttcttcaaacaaaaaaatgtatagaaaaatcatgtctgtgacttcatttttaaatgtacttgctcagctcaactgcatttcagttgtattatagtccagttcttatcaacattaaaacctatagcaatcatttcaaatctattctgcaaattgtataagaataaagttagaattaacaattttattttgtacaacagtggaattttctgtcatggataatgtgcttgagtccctataatctatagacatgtgatagcaaaagaaacaaacaaaagccaggaaaacactcattttcgccttgaatatgtaaatgggattaattttgtcctgtgccttatgtggaaaggaacttctttggttttccttttttgttctggtggaagcatgtgcaggagacatatcatccaaacataaaccattaaaatgtttgtggtttgcttggctgtaattttcaaagtagttaattgaggacaaagggtaatgcagaagtgatagctttggtttgctgagtcttgttttaagtggccttgatatttaaaactattcctgccaccatttcttctccttggccacttcttccttgcgtctccctgcatgctgctttatttgcttctccctccccaaccacctcatggtatatttaagagtgaaagggacaaactagtaggtttgtcaagtttaatataaagcactgatgtaacttgctaggtaaacggaaagataagttctaactgcctactatccaatgtcagttaattggtgtcttcccccctcatttgctctcttccctaaaatgtgtcccagatgccttcatttgctgttttacttctatgttctgcttttcctcctctctttgttcccttcctgtctatccattgagtttatgaaatggaagagttaactgcatgcactagtgtttggagggtgttgtggtttgtctttctaattaggtgtatagcctattcactttcctagaataaatctcttaacctaaatttgagtagtctgcattttggcaactcctctagcagcttggtagcctagtacaggttgtttttttaaaaaaggaaaagcaggaaggaggagtgaattttattaacatgtttgccaaatgtattgagatttggcctctgaagaacactttttcagtgttaagtttctttaccttaagattcagaaatactttagaatattattaattttaagtcctgtctttacatccttttggaaaacttgtattaccatgagtttggaaaaaggacaacgaaaggcttttcatgtaaagataagatctttagctatctctaaccctgtccttttttcactgcattttttctagttttgcttcattgcttatcattaggatagggtaagtgaagtttgctatgctgctagcatcctaagatgatacctttgttgaaagaattgtgaatagcatgattcatttctagcagaggctgagtttaggacagcagcttccattgagaagtctttctgtgtcgtgaatagcattttaatgacctcttggctcacataagcaaacaacatagggacgtatctgctatgaaaatccacaaatttttcagatagtgccctaaaaacaattttatatgcctcactggttgttattcttaggttattcccacacttgactttatcattgtttactactagtaaaaagcagcattgccaaataatccctaattttccactaaaaatataatgaaatgatgttaagctttttgaaaagtttaggttaaacctactgttgttagattaatgtatttgttgcttccctttatctggaatgtggcattagcttttttattttaaccctctttaattcttattcaattccatgacttaaggttggagagctaaacactgggatttttggataacagactgacagttttgcataattataatcggcattgtacatagaaaggatatggctaccttttgttaaatctgcactttctaaatatcaaaaaagggaaatgaagtataaatcaatttttgtataatctgtttgaaacatgagttttatttgcttaatattagggctttgccccttttctgtaagtctcttgggatcctgtgtagaagctgttctcattaaacaccaaacagttaagtccattctctggtactagctacaaattcggtttcatattctacttaacaatttaaataaactgaaatatttcta

SEQ ID NO: 307111 - DNA, 1073 bp, Homo sapiens
cctcagactgaggcttggagacaggagcattccactcgccacttcggcgcgcccccatgccctcttgtgcgcgtgcgcagaggcggaccgcaaggctagggcgtgagggaagggcgggcgtacgcccttgcgtgcgtctcaggcagcgcgcacgccggcgtgagagggcacggggaaaaggtggctctggccggggtggctcggtttcctggggctatgtaactgagctcgtcgacttaggggtccttcttcgctgccctcgccgcgtgctagcagggagtttccgctcgggagagagactgtcctcacgcccgctgcgcctcctcgacggcagagcaggcttgctcgcccgtgggagcgtcccggccgagaagccctgaggggggaggggaggccattttgtcccgaccgactccccggaaccgggcggagcggctgggagaggctgcggagccgcggtcgccgccctcggaggcactggacgccgccactgtcggggcttcctcaaagctgttcgtaggtcgcccgcgccgtctcgagcctttttcccacgcttccccggtcctccggcctgagaacgcccgagtgaggagttggccgtagtgagagggaccgatcccttggggccgccggcggcgagagcccgagccgctcctcccaatggcgaagaagacgtacgacctgcttttcaagctgctcctgatcggggattccggagtggggaagacctgcgtcctttttcgtttttcggatgatgccttcaatactacctttatttccaccataggaatagacttcaagatcaaaacagttgaattacaaggaaagaagatcaagctacagatatgcatgccaatgaagatgtggaaagaatgttactaggaaacaagtgtgatatggacgacaaaagagttgtacctaaaggaaaaggagaacaggtaaaaatctgaattaaactgatactctgctctgtctttgtaaaggtaatgctacttttgattatttttatagtaatagtgatcgaacacactaagctaattacatagtttttaaaatgcttgttggaaataata

SEQ ID NO: 307112 - DNA, 1041 bp, Homo sapiens
cctcagactgaggcttggagacaggagcattccactcgccacttcggcgcgcccccatgccctcttgtgcgcgtgcgcagaggcggaccgcaaggctagggcgtgagggaagggcgggcgtacgcccttgcgtgcgtctcaggcagcgcgcacgccggcgtgagagggcacggggaaaaggtggctctggccggggtggctcggtttcctggggctatgtaactgagctcgtcgacttaggggtccttcttcgctgccctcgccgcgtgctagcagggagtttccgctcgggagagagactgtcctcacgcccgctgcgcctcctcgacggcagagcaggcttgctcgcccgtgggagcgtcccggccgagaagccctgaggggggaggggaggccattttgtcccgaccgactccccggaaccgggcggagcggctgggagaggctgcggagccgcggtcgccgccctcggaggcactggacgccgccactgtcggggcttcctcaaagctgttcgtaggtcgcccgcgccgtctcgagcctttttcccacgcttccccggtcctccggcctgagaacgcccgagtgaggagttggccgtagtgagagggaccgatcccttggggccgccggcggcgagagcccgagccgctcctcccaatggcgaagaagacgtacgacctgcttttcaagctgctcctgatcggggattccggagtggggaagacctgcgtcctttttcgtttttcggatgatgccttcaatactacctttatttccaccatagaataggacttaagatcaaaacagtttgattacaagggaagaagatcaagctccccatttgggatacaccggccaaggagcgattttacaccattacaacccttctactacaaaggcgccatggggattaaggcttgggtttgaccttacccatgggtaaaggttttgaaacacttacccaatgccttttaaccataaatggacccttgcccatatttggaaggatgtgtcctaggcggggggttttggccctcc

SEQ ID NO: 307113 - DNA, 535 bp, Homo sapiens
  misc_feature (394)..(394): n is a, c, g, or t
cctcagactgaggcttggagacaggagcattccactcgccacttcggcgcgcccccatgccctcttgtgcgcgtgcgcagaggcggaccgcaaggctagggcgtgagggaagggcgggcgtacgcccttgcgtgcgtctcaggcagcgcgcacgccggcgtgagagggcacggggaaaaggtggctctggccggggtggctcggtttcctggggctatgtaactgagctcgtcgacttaggggtccttcttcgctgccctcgccgcgtgctagcagggagtttccgctcgggagagagactgtcctcacgcccgctgcgcctcctcgacggcagagcaggcttgctcgcccgtgggagcgtcccggccgagaagccctgaggggggaggggttntttttataataaaaatatattattgtgaaaattgttgttgttgaagttatagattttatttatctgtgtataattataattttatgtaagtgtaatttgatattagtgtatggtggatgtggttttttgagatatttttaa

SEQ ID NO: 307114 - DNA, 3599 bp, Homo sapiens
cctcagactgaggcttggagacaggagcattccactcgccacttcggcgcgcccccatgccctcttgtgcgcgtgcgcagaggcggaccgcaaggctagggcgtgagggaagggcgggcgtacgcccttgcgtgcgtctcaggcagcgcgcacgccggcgtgagagggcacggggaaaaggtggctctggccggggtggctcggtttcctggggctatgtaactgagctcgtcgacttaggggtccttcttcgctgccctcgccgcgtgctagcagggagtttccgctcgggagagagactgtcctcacgcccgctgcgcctcctcgacggcagagcaggcttgctcgcccgtgggagcgtcccggccgagaagccctgaggggggaggggaggccattttgtcccgaccgactccccggaaccgggcggagcggctgggagaggctgcggagccgcggtcgccgccctcggaggcactggacgccgccactgtcggggcttcctcaaagctgttcgtaggtcgcccgcgccgtctcgagcctttttcccacgcttccccggtcctccggcctgagaacgcccgagtgaggagttggccgtagtgagagggaccgatcccttggggccgccggcggcgagagcccgagccgctcctcccaatggcgaagaagacgtacgacctgcttttcaagctgctcctgatcggggattccggagtggggaagacctgcgtcctttttcgtttttcggatgatgccttcaatactacctttatttccaccataggaatagacttcaagatcaaaacagttgaattacaaggaaagaagatcaagctacagatatgggatacagcaggccaggagcgatttcacaccatcacaacctcctactacagaggcgcaatgggtatcatgctagtatatgacatcaccaatggtaaaagttttgaaaacatcagcaaatggcttagaaacatagatgagcatgccaatgaagatgtggaaagaatgttactaggaaacaagtgtgatatggacgacaaaagagttgtacctaaaggaaaaggagaacagattgcaagggagcatggtattaggttttttgagactagtgcaaaagcaaatataaacatcgaaaaggcgttcctcacgttagctgaagatatccttcgaaagacccctgtaaaagagcccaacagtgaaaatgtagatatcagcagtggaggaggcgtgacaggctggaagagcaaatgctgctgagcattctcctgttccatcagttgccatccactaccccgttttctcttcttgctgcaaaataaaccactctgtccatttttaactctaaacagatatttttgtttctcatcttaactatccaagccacctattttatttgttctttcatctgtgactgcttgctgactttatcataattttcttcaaacaaaaaaatgtatagaaaaatcatgtctgtgacttcatttttaaatgtacttgctcagctcaactgcatttcagttgtattatagtccagttcttatcaacattaaaacctatagcaatcatttcaaatctattctgcaaattgtataagaataaagttagaattaacaattttattttgtacaacagtggaattttctgtcatggataatgtgcttgagtccctataatctatagacatgtgatagcaaaagaaacaaacaaaagccaggaaaacactcattttcgccttgaatatgtaaatgggattaattttgtcctgtgccttatgtggaaaggaacttctttggttttccttttttgttctggtggaagcatgtgcaggagacatatcatccaaacataaaccattaaaatgtttgtggtttgcttggctgtaattttcaaagtagttaattgaggacaaagggtaatgcagaagtgatagctttggtttgctgagtcttgttttaagtggccttgatatttctgcatgctgctttatttgcttctccctccccaaccacctcatggtatatttaagagtgaaagggacaaactagtaggtttgtcaagtttaatataaagcactgatgtaacttgctaggtaaacggaaagataagttctaactgcctactatccaatgtcagttaattggtgtcttcccccctcatttgctctcttccctaaaatgtgtcccagatgccttcatttgctgttttacttctatgttctgcttttcctcctctctttgttcccttcctgtctatccattgagtttatgaaatggaagagttaactgcatgcactagtgtttggagggtgttgtggtttgtctttctaattaggtgtatagcctattcactttcctagaataaatctcttaacctaaatttgagtagtctgcattttggcaactcctctagcagcttggtagcctagtacaggttgtttttttaaaaaaggaaaagcaggaaggaggagtgaattttattaacatgtttgccaaatgtattgagatttggcctctgaagaacactttttcagtgttaagtttctttaccttaagattcagaaatactttagaatattattaattttaagtcctgtctttacatccttttggaaaacttgtattaccatgagtttggaaaaaggacaacgaaaggcttttcatgtaaagataagatctttagctatctctaaccctgtccttttttcactgcattttttctagttttgcttcattgcttatcattaggatagggtaagtgaagtttgctatgctgctagcatcctaagatgatacctttgttgaaagaattgtgaatagcatgattcatttctagcagaggctgagtttaggacagcagcttccattgagaagtctttctgtgtcgtgaatagcattttaatgacctcttggctcacataagcaaacaacatagggacgtatctgctatgaaaatccacaaatttttcagatagtgccctaaaaacaattttatatgcctcactggttgttattcttaggttattcccacacttgactttatcattgtttactactagtaaaaagcagcattgccaaataatccctaattttccactaaaaatataatgaaatgatgttaagctttttgaaaagtttaggttaaacctactgttgttagattaatgtatttgttgcttccctttatctggaatgtggcattagcttttttattttaaccctctttaattcttattcaattccatgacttaaggttggagagctaaacactgggatttttggataacagactgacagttttgcataattataatcggcattgtacatagaaaggatatggctaccttttgttaaatctgcactttctaaatatcaaaaaagggaaatgaagtataaatcaatttttgtataatctgtttgaaacatgagttttatttgcttaatattagggctttgccccttttctgtaagtctcttgggatcctgtgtagaagctgttctcattaaacaccaaacagttaagtccattctctggtactagctacaaattcggtttcatattctacttaacaatttaaataaactgaaatatttcta

SEQ ID NO: 307115 - DNA, 4400 bp, Homo sapiens
cctcagactgaggcttggagacaggagcattccactcgccacttcggcgcgcccccatgccctcttgtgcgcgtgcgcagaggcggaccgcaaggctagggcgtgagggaagggcgggcgtacgcccttgcgtgcgtctcaggcagcgcgcacgccggcgtgagagggcacggggaaaaggtggctctggccggggtggctcggtttcctggggctatgtaactgagctcgtcgacttaggggtccttcttcgctgccctcgccgcgtgctagcagggagtttccgctcgggagagagactgtcctcacgcccgctgcgcctcctcgacggcagagcaggcttgctcgcccgtgggagcgtcccggccgagaagccctgaggggggaggggaggccattttgtcccgaccgactccccggaaccgggcggagcggctgggagaggctgcggagccgcggtcgccgccctcggaggcactggacgccgccactgtcggggcttcctcaaagctgttcgtaggtcgcccgcgccgtctcgagcctttttcccacgcttccccggtcctccggcctgagaacgcccgagtgaggagttggccgtagtgagagggaccgatcccttggggccgccggcggcgagagcccgagccgctcctcccaatggcgaagaagacgtacgacctgcttttcaagctgctcctgatcggggattccggagtggggaagacctgcgtcctttttcgtttttcggatgatgccttcaatactacctttatttccaccataggaatagacttcaagatcaaaacagttgaattacaaggaaagaagatcaagctacagatatgggatacagcaggccaggagcgatttcacaccatcacaacctcctactacagaggcgcaatgggtatcatgctagtatatgacatcaccaatggtaaaagttttgaaaacatcagcaaatggcttagaaacatagatgagcatgccaatgaagatgtggaaagaatgttactaggaaacaagtgtgatatggacgacaaaagagttgtacctaaaggaaaaggagaacagattgcaagggagcatggtattaggttttttgagactagtgcaaaagcaaatataaacatcgaaaaggcgttcctcacgttagctgaagatatccttcgaaagacccctgtaaaagagcccaacagtgaaaatgtagatatcagcagtggaggaggcgtgacaggctggaagagcaaatgctgctgagcattctcctgttccatcagttgccatccactaccccgttttctcttcttgctgcaaaataaaccactctgtccatttttaactctaaacagatatttttgtttctcatcttaactatccaagccacctattttatttgttctttcatctgtgactgcttgctgactttatcataattttcttcaaacaaaaaaatgtatagaaaaatcatgtctgtgacttcatttttaaatgtacttgctcagctcaactgcatttcagttgtattatagtccagttcttatcaacattaaaacctatagcaatcatttcaaatctattctgcaaattgtataagaataaagttagaattaacaattttattttgtacaacagtggaattttctgtcatggataatgtgcttgagtccctataatctatagacatgtgatagcaaaagaaacaaacaaaagccaggaaaacactcattttcgccttgaatatgtaaatgggattaattttgtcctgtgccttatgtggaaaggaacttctttggttttccttttttgttctggtggaagcatgtgcaggagacatatcatccaaacataaaccattaaaatgtttgtggtttgcttggctgtaattttcaaagtagttaattgaggacaaagggtaatgcagaagtgatagctttggtttgctgagtcttgttttaagtggccttgatatttaaaactattcctgccaccatttcttctccttggccacttcttccttgcgtctccctgcatgctgctttatttgcttctccctccccaaccacctcatggtatatttaagagtgaaagggacaaactagtaggtttgtcaagtttaatataaagcactgatgtaacttgctaggtaaacggaaagataagttctaactgcctactatccaatgtcagttaattggtgtcttcccccctcatttgctctcttccctaaaatgtgtcccagatgccttcatttgctgttttacttctatgttctgcttttcctcctctctttgttcccttcctgtctatccattgagtttatgaaatggaagagttaactgcatgcactagtgtttggagggtgttgtggtttgtctttctaattaggtgtatagcctattcactttcctagaataaatctcttaacctaaatttgagtagtctgcattttggcaactcctctagcagcttggtagcctagtacaggttgtttttttaaaaaaggaaaagcaggaaggaggagtgaattttattaacatgtttgccaaatgtattgagatttggcctctgaagaacactttttcagtgttaagtttctttaccttaagattcagaaatactttagaatattattaattttaagtcctgtctttacatccttttggaaaacttgtattaccatgagtttggaaaaaggacaacgaaaggcttttcatgtaaagataagatctttagctatctctaaccctgtccttttttcactgcattttttctagttttgcttcattgcttatcattaggatagggtaagtgaagtttgctatgctgctagcatcctaagatgatacctttgttgaaagaattgtgaatagcatgattcatttctagcagaggctgagtttaggacagcagcttccattgagaagtctttctgtgtcgtgaatagcattttaatgacctcttggctcacataagcaaacaacatagggacgtatctgctatgaaaatccacaaatttttcagatagtgccctaaaaacaattttatatgcctcactggttgttattcttaggttattcccacacttgactttatcattgtttactactagtaaaaagcagcattgccaaataatccctaattttccactaaaaatataatgaaatgatgttaagctttttgaaaagtttaggttaaacctactgttgttagattaatgtatttgttgcttccctttatctggaatgtggcattagcttttttattttaaccctctttaattcttattcaattccatgacttaaggttggagagctaaacactgggatttttggataacagactgacagttttgcataattataatcggcattgtacatagaaaggatatggctaccttttgttaaatctgcactttctaaatatcaaaaaagggaaatgaagtataaatcaatttttgtataatctgtttgaaacatgagttttatttgcttaatattagggctttgccccttttctgtaagtctcttgggatcctgtgtagaagctgttctcattaaacaccaaacagttaagtccattctctggtactagctacaaattcggtttcatattctacttaacaatttaaataaactgaaatatttctagatggtctacttctgttcatataaaaacaaaacttgatttccagctgtgtggtttggttttcatttatttatggaattggaagattacttctgaaaaaaatgtggaatcgcaaactcaaagagttgacaaaaatgggaaatcactgtcaacctatggaaaactggaaaggcaatttcaagaactgtctttgctgagaaactacattaaaaaatagaattatctctgggatcctaaagcggaatcatccttgtgccaaaataggagatgccacgatcctaatcacacctggcttacactagttggatgtgcctaaggccactacagctgaggtcacctgattcctcagggggaccaagctgggctcctcatactggagggtaaatccttgttttagcagcagctggcctcttactaagaaacaaagtatggccaggtgcggtggctcatgcctgtaatcccagcactttgggaggtcaaggcggacggatcacgaagtcaggagatggagaccatcctggctaacgtggtaaaaccccgtctctattaaaaatacaaaaaaattagccgggcgtggtggcgggcgcctgtagtcccagctactcgggaggctgaggcaggagaatggcgtgaacccgggaggaggaggaggaggctgcagtgagccgagatagcgccactgcactccagcctgggcgacagagcaagactccgtctcaaaaaaaaaaaaaaaaaaaaaaaagtattgg

SEQ ID NO: 307116 - DNA, 3882 bp, Homo sapiens
  misc_feature (3722)..(3722): n is a, c, g, or t
cctcagactgaggcttggagacaggagcattccactcgccacttcggcgcgcccccatgccctcttgtgcgcgtgcgcagaggcggaccgcaaggctagggcgtgagggaagggcgggcgtacgcccttgcgtgcgtctcaggcagcgcgcacgccggcgtgagagggcacggggaaaaggtggctctggccggggtggctcggtttcctggggctatgtaactgagctcgtcgacttaggggtccttcttcgctgccctcgccgcgtgctagcagggagtttccgctcgggagagagactgtcctcacgcccgctgcgcctcctcgacggcagagcaggcttgctcgcccgtgggagcgtcccggccgagaagccctgaggggggaggggaggccattttgtcccgaccgactccccggaaccgggcggagcggctgggagaggctgcggagccgcggtcgccgccctcggaggcactggacgccgccactgtcggggcttcctcaaagctgttcgtaggtcgcccgcgccgtctcgagcctttttcccacgcttccccggtcctccggcctgagaacgcccgagtgaggagttggccgtagtgagagggaccgatcccttggggccgccggcggcgagagcccgagccgctcctcccaatggcgaagaagacgtacgacctgcttttcaagctgctcctgatcggggattccggagtggggaagacctgcgtcctttttcgtttttcggatgatgccttcaatactacctttatttccaccataggaatagacttcaagatcaaaacagttgaattacaaggaaagaagatcaagctacagatatgggatacagcaggccaggagcgatttcacaccatcacaacctcctactacagaggcgcaatgggtatcatgctagtatatgacatcaccaatggtaaaagttttgaaaacatcagcaaatggcttagaaacatagatgagcatgccaatgaagatgtggaaagaatgttactaggaaacaagtgtgatatggacgacaaaagagttgtacctaaaggaaaaggagaacagattgcaagggagcatggtattaggttttttgagactagtgcaaaagcaaatataaacatcgaaaaggcgttcctcacgttagctgaagatatccttcgaaagacccctgtaaaagagcccaacagtgaaaatgtagatatcagcagtggaggaggcgtgacaggctggaagagcaaatgctgctgagcattctcctgttccatcagttgccatccactaccccgttttctcttcttgctgcaaaataaaccactctgtccatttttaactctaaacagatatttttgtttctcatcttaactatccaagccacctattttatttgttctttcatctgtgactgcttgctgactttatcataattttcttcaaacaaaaaaatgtatagaaaaatcatgtctgtgacttcatttttaaatgtacttgctcagctcaactgcatttcagttgtattatagtccagttcttatcaacattaaaacctatagcaatcatttcaaatctattctgcaaattgtataagaataaagttagaattaacaattttattttgtacaacagtggaattttctgtcatggataatgtgcttgagtccctataatctatagacatgtgatagcaaaagaaacaaacaaaagccaggaaaacactcattttcgccttgaatatgtaaatgggattaattttgtcctgtgccttatgtggaaaggaacttctttggttttccttttttgttctggtggaagcatgtgcaggagacatatcatccaaacataaaccattaaaatgtttgtggtttgcttggctgtaattttcaaagtagttaattgaggacaaagggtaatgcagaagtgatagctttggtttgctgagtcttgttttaagtggccttgatatttaaaactattcctgccaccatttcttctccttggccacttcttccttgcgtctccctgcatgctgctttatttgcttctccctccccaaccacctcatggtatatttaagagtgaaagggacaaactagtaggtttgtcaagtttaatataaagcactgatgtaacttgctaggtaaacggaaagataagttctaactgcctactatccaatgtcagttaattggtgtcttcccccctcatttgctctcttccctaaaatgtgtcccagatgccttcatttgctgttttacttctatgttctgcttttcctcctctctttgttcccttcctgtctatccattgagtttatgaaatggaagagttaactgcatgcactagtgtttggagggtgttgtggtttgtctttctaattaggtgtatagcctattcactttcctagaataaatctcttaacctaaatttgagtagtctgcattttggcaactcctctagcagcttggtagcctagtacaggttgtttttttaaaaaaggaaaagcaggaaggaggagtgaattttattaacatgtttgccaaatgtattgagatttggcctctgaagaacactttttcagtgttaagtttctttaccttaagattcagaaatactttagaatattattaattttaagtcctgtctttacatccttttggaaaacttgtattaccatgagtttggaaaaaggacaacgaaaggcttttcatgtaaagataagatctttagctatctctaaccctgtccttttttcactgcattttttctagttttgcttcattgcttatcattaggatagggtaagtgaagtttgctatgctgctagcatcctaagatgatacctttgttgaaagaattgtgaatagcatgattcatttctagcagaggctgagtttaggacagcagcttccattgagaagtctttctgtgtcgtgaatagcattttaatgacctcttggctcacataagcaaacaacatagggacgtatctgctatgaaaatccacaaatttttcagatagtgccctaaaaacaattttatatgcctcactggttgttattcttaggttattcccacacttgactttatcattgtttactactagtaaaaagcagcattgccaaataatccctaattttccactaaaaatataatgaaatgatgttaagctttttgaaaagtttaggttaaacctactgttgttagattaatgtatttgttgcttccctttatctggaatgtggcattagcttttttattttaaccctctttaattcttattcaattccatgacttaaggttggagagctaaacactgggatttttggataacagactgacagttttgcataattataatcggcattgtacatagaaaggatatggctaccttttgttaaatctgcactttctaaatatcaaaaaagggaaatgaagtataaatcaatttttgtataatctgtttgaaacatgagttttatttgcttaatattagggctttgccccttttctgtaagtctcttgggatcctgtgtagaagctgttctcattaaacaccaaacagttaagtccattctctggtactagctacaaattcggtttcatattctacttaacaatttaaataaactgaaatatttctagatggtctacttctgttcatataaaaacaaaacttgatttccaaaaaaaaaaaaaaaaaaaaaccaggnatatatttaaccagaacaatcacaactttggtggaacacccgataattttgcagtggggccagtgaaccagtttgactatcaggtgaaagatattttgttgctttaatattgtaggtgttgcacgtaatcccttccttgggggtgtctcatcaagaatac

SEQ ID NO: 307117 - DNA, 3687 bp, Homo sapiens
  misc_feature (3662)..(3662): n is a, c, g, or t
cctcagactgaggcttggagacaggagcattccactcgccacttcggcgcgcccccatgccctcttgtgcgcgtgcgcagaggcggaccgcaaggctagggcgtgagggaagggcgggcgtacgcccttgcgtgcgtctcaggcagcgcgcacgccggcgtgagagggcacggggaaaaggtggctctggccggggtggctcggtttcctggggctatgtaactgagctcgtcgacttaggggtccttcttcgctgccctcgccgcgtgctagcagggagtttccgctcgggagagagactgtcctcacgcccgctgcgcctcctcgacggcagagcaggcttgctcgcccgtgggagcgtcccggccgagaagccctgaggggggaggggaggccattttgtcccgaccgactccccggaaccgggcggagcggctgggagaggctgcggagccgcggtcgccgccctcggaggcactggacgccgccactgtcggggcttcctcaaagctgttcgtaggtcgcccgcgccgtctcgagcctttttcccacgcttccccggtcctccggcctgagaacgcccgagtgaggagttggccgtagtgagagggaccgatcccttggggccgccggcggcgagagcccgagccgctcctcccaatggcgaagaagacgtacgacctgcttttcaagctgctcctgatcggggattccggagtggggaagacctgcgtcctttttcgtttttcggatgatgccttcaatactacctttatttccaccataggaatagacttcaagatcaaaacagttgaattacaaggaaagaagatcaagctacagatatgggatacagcaggccaggagcgatttcacaccatcacaacctcctactacagaggcgcaatgggtatcatgctagtatatgacatcaccaatggtaaaagttttgaaaacatcagcaaatggcttagaaacatagatgagcatgccaatgaagatgtggaaagaatgttactaggaaacaagtgtgatatggacgacaaaagagttgtacctaaaggaaaaggagaacagattgcaagggagcatggtattaggttttttgagactagtgcaaaagcaaatataaacatcgaaaaggcgttcctcacgttagctgaagatatccttcgaaagacccctgtaaaagagcccaacagtgaaaatgtagatatcagcagtggaggaggcgtgacaggctggaagagcaaatgctgctgagcattctcctgttccatcagttgccatccactaccccgttttctcttcttgctgcaaaataaaccactctgtccatttttaactctaaacagatatttttgtttctcatcttaactatccaagccacctattttatttgttctttcatctgtgactgcttgctgactttatcataattttcttcaaacaaaaaaatgtatagaaaaatcatgtctgtgacttcatttttaaatgtacttgctcagctcaactgcatttcagttgtattatagtccagttcttatcaacattaaaacctatagcaatcatttcaaatctattctgcaaattgtataagaataaagttagaattaacaattttattttgtacaacagtggaattttctgtcatggataatgtgcttgagtccctataatctatagacatgtgatagcaaaagaaacaaacaaaagccaggaaaacactcattttcgccttgaatatgtaaatgggattaattttgtcctgtgccttatgtggaaaggaacttctttggttttccttttttgttctggtggaagcatgtgcaggagacatatcatccaaacataaaccattaaaatgtttgtggtttgcttggctgtaattttcaaagtagttaattgaggacaaagggtaatgcagaagtgatagctttggtttgctgagtcttgttttaagtggccttgatatttaaaactattcctgccaccatttcttctccttggccacttcttccttgcgtctccctgcatgctgctttatttgcttctccctccccaaccacctcatggtatatttaagagtgaaagggacaaactagtaggtttgtcaagtttaatataaagcactgatgtaacttgctaggtaaacggaaagataagttctaactgcctactatccaatgtcagttaattggtgtcttcccccctcatttgctctcttccctaaaatgtgtcccagatgccttcatttgctgttttacttctatgttctgcttttcctcctctctttgttcccttcctgtctatccattgagtttatgaaatggaagagttaactgcatgcactagtgtttggagggtgttgtggtttgtctttctaattaggtgtatagcctattcactttcctagaataaatctcttaacctaaatttgagtagtctgcattttggcaactcctctagcagcttggtagcctagtacaggttgtttttttaaaaaaggaaaagcaggaaggaggagtgaattttattaacatgtttgccaaatgtattgagatttggcctctgaagaacactttttcagtgttaagtttctttaccttaagattcagaaatactttagaatattattaattttaagtcctgtctttacatccttttggaaaacttgtattaccatgagtttggaaaaaggacaacgaaaggcttttcatgtaaagataagatctttagctatctctaaccctgtccttttttcactgcattttttctagttttgcttcattgcttatcattaggatagggtaagtgaagtttgctatgctgctagcatcctaagatgatacctttgttgaaagaattgtgaatagcatgattcatttctagcagaggctgagtttaggacagcagcttccattgagaagtctttctgtgtcgtgaatagcattttaatgacctcttggctcacataagcaaacaacatagggacgtatctgctatgaaaatccacaaatttttcagatagtgccctaaaaacaattttatatgcctcactggttgttattcttaggttattcccacacttgactttatcattgtttactactagtaaaaagcagcattgccaaataatccctaattttccactaaaaatataatgaaatgatgttaagctttttgaaaagtttaggttaaacctactgttgttagattaatgtatttgttgcttccctttatctggaatgtggcattagcttttttattttaaccctctttaattcttattcaattccatgacttaaggttggagagctaaacactgggatttttggataacagactgacagttttgcataattataatcggcattgtacatagaaaggatatggctaccttttgttaaatctgcactttctaaatatcaaaaaagggaaatgaagtataaatcaatttttgtataatctgtttgaaacatgagttttatttgcttaatattagggctttgccccttttctgtaagtctcttgggatcctgtgtagaagctgttctcattaaacaccaaacagttaagtccattctctggtactagctacaaattcggtttcatattctacttaacaatttaaataaactgaaatatttctaaaaaaaaanaaaactgatagaagataatcttgtg

SEQ ID NO: 307118 - DNA, 3811 bp, Homo sapiens
cctcagactgaggcttggagacaggagcattccactcgccacttcggcgcgcccccatgccctcttgtgcgcgtgcgcagaggcggaccgcaaggctagggcgtgagggaagggcgggcgtacgcccttgcgtgcgtctcaggcagcgcgcacgccggcgtgagagggcacggggaaaaggtggctctggccggggtggctcggtttcctggggctatgtaactgagctcgtcgacttaggggtccttcttcgctgccctcgccgcgtgctagcagggagtttccgctcgggagagagactgtcctcacgcccgctgcgcctcctcgacggcagagcaggcttgctcgcccgtgggagcgtcccggccgagaagccctgaggggggaggggaggccattttgtcccgaccgactccccggaaccgggcggagcggctgggagaggctgcggagccgcggtcgccgccctcggaggcactggacgccgccactgtcggggcttcctcaaagctgttcgtaggtcgcccgcgccgtctcgagcctttttcccacgcttccccggtcctccggcctgagaacgcccgagtgaggagttggccgtagtgagagggaccgatcccttggggccgccggcggcgagagcccgagccgctcctcccaatggcgaagaagacgtacgacctgcttttcaagctgctcctgatcggggattccggagtggggaagacctgcgtcctttttcgtttttcggatgatgccttcaatactacctttatttccaccataggaatagacttcaagatcaaaacagttgaattacaaggaaagaagatcaagctacagatatgggatacagcaggccaggagcgatttcacaccatcacaacctcctactacagaggcgcaatgggtatcatgctagtatatgacatcaccaatggtaaaagttttgaaaacatcagcaaatggcttagaaacatagatgagagatggggactcgcagtgttgcccaggctggtctcaaactccaggggtcaagtgattcttccttctcagcctcccaagaagctgggattacagcctactcaatttgaagacattgaggatgaagacctttatgatgatccacttccacttaataaatacatgccaatgaagatgtggaaagaatgttactaggaaacaagtgtgatatggacgacaaaagagttgtacctaaaggaaaaggagaacagattgcaagggagcatggtattaggttttttgagactagtgcaaaagcaaatataaacatcgaaaaggcgttcctcacgttagctgaagatatccttcgaaagacccctgtaaaagagcccaacagtgaaaatgtagatatcagcagtggaggaggcgtgacaggctggaagagcaaatgctgctgagcattctcctgttccatcagttgccatccactaccccgttttctcttcttgctgcaaaataaaccactctgtccatttttaactctaaacagatatttttgtttctcatcttaactatccaagccacctattttatttgttctttcatctgtgactgcttgctgactttatcataattttcttcaaacaaaaaaatgtatagaaaaatcatgtctgtgacttcatttttaaatgtacttgctcagctcaactgcatttcagttgtattatagtccagttcttatcaacattaaaacctatagcaatcatttcaaatctattctgcaaattgtataagaataaagttagaattaacaattttattttgtacaacagtggaattttctgtcatggataatgtgcttgagtccctataatctatagacatgtgatagcaaaagaaacaaacaaaagccaggaaaacactcattttcgccttgaatatgtaaatgggattaattttgtcctgtgccttatgtggaaaggaacttctttggttttccttttttgttctggtggaagcatgtgcaggagacatatcatccaaacataaaccattaaaatgtttgtggtttgcttggctgtaattttcaaagtagttaattgaggacaaagggtaatgcagaagtgatagctttggtttgctgagtcttgttttaagtggccttgatatttaaaactattcctgccaccatttcttctccttggccacttcttccttgcgtctccctgcatgctgctttatttgcttctccctccccaaccacctcatggtatatttaagagtgaaagggacaaactagtaggtttgtcaagtttaatataaagcactgatgtaacttgctaggtaaacggaaagataagttctaactgcctactatccaatgtcagttaattggtgtcttcccccctcatttgctctcttccctaaaatgtgtcccagatgccttcatttgctgttttacttctatgttctgcttttcctcctctctttgttcccttcctgtctatccattgagtttatgaaatggaagagttaactgcatgcactagtgtttggagggtgttgtggtttgtctttctaattaggtgtatagcctattcactttcctagaataaatctcttaacctaaatttgagtagtctgcattttggcaactcctctagcagcttggtagcctagtacaggttgtttttttaaaaaaggaaaagcaggaaggaggagtgaattttattaacatgtttgccaaatgtattgagatttggcctctgaagaacactttttcagtgttaagtttctttaccttaagattcagaaatactttagaatattattaattttaagtcctgtctttacatccttttggaaaacttgtattaccatgagtttggaaaaaggacaacgaaaggcttttcatgtaaagataagatctttagctatctctaaccctgtccttttttcactgcattttttctagttttgcttcattgcttatcattaggatagggtaagtgaagtttgctatgctgctagcatcctaagatgatacctttgttgaaagaattgtgaatagcatgattcatttctagcagaggctgagtttaggacagcagcttccattgagaagtctttctgtgtcgtgaatagcattttaatgacctcttggctcacataagcaaacaacatagggacgtatctgctatgaaaatccacaaatttttcagatagtgccctaaaaacaattttatatgcctcactggttgttattcttaggttattcccacacttgactttatcattgtttactactagtaaaaagcagcattgccaaataatccctaattttccactaaaaatataatgaaatgatgttaagctttttgaaaagtttaggttaaacctactgttgttagattaatgtatttgttgcttccctttatctggaatgtggcattagcttttttattttaaccctctttaattcttattcaattccatgacttaaggttggagagctaaacactgggatttttggataacagactgacagttttgcataattataatcggcattgtacatagaaaggatatggctaccttttgttaaatctgcactttctaaatatcaaaaaagggaaatgaagtataaatcaatttttgtataatctgtttgaaacatgagttttatttgcttaatattagggctttgccccttttctgtaagtctcttgggatcctgtgtagaagctgttctcattaaacaccaaacagttaagtccattctctggtactagctacaaattcggtttcatattctacttaacaatttaaataaactgaaatatttcta

SEQ ID NO: 307119 - DNA, 3599 bp, Homo sapiens
cctcagactgaggcttggagacaggagcattccactcgccacttcggcgcgcccccatgccctcttgtgcgcgtgcgcagaggcggaccgcaaggctagggcgtgagggaagggcgggcgtacgcccttgcgtgcgtctcaggcagcgcgcacgccggcgtgagagggcacggggaaaaggtggctctggccggggtggctcggtttcctggggctatgtaactgagctcgtcgacttaggggtccttcttcgctgccctcgccgcgtgctagcagggagtttccgctcgggagagagactgtcctcacgcccgctgcgcctcctcgacggcagagcaggcttgctcgcccgtgggagcgtcccggccgagaagccctgaggggggaggggaggccattttgtcccgaccgactccccggaaccgggcggagcggctgggagaggctgcggagccgcggtcgccgccctcggaggcactggacgccgccactgtcggggcttcctcaaagctgttcgtaggtcgcccgcgccgtctcgagcctttttcccacgcttccccggtcctccggcctgagaacgcccgagtgaggagttggccgtagtgagagggaccgatcccttggggccgccggcggcgagagcccgagccgctcctcccaatggcgaagaagacgtacgacctgcttttcaagctgctcctgatcggggattccggagtggggaagacctgcgtcctttttcgtttttcggatgatgccttcaatactacctttatttccaccataggaatagacttcaagatcaaaacagttgaattacaaggaaagaagatcaagctacagatatgggatacagcaggccaggagcgatttcacaccatcacaacctcctactacagaggcgcaatgggtatcatgctagtatatgacatcaccaatggtaaaagttttgaaaacatcagcaaatggcttagaaacatagatgagcatgccaatgaagatgtggaaagaatgttactaggaaacaagtgtgatatggacgacaaaagagttgtacctaaaggaaaaggagaacagattgcaagggagcatggtattaggttttttgagactagtgcaaaagcaaatataaacatcgaaaaggcgttcctcacgttagctgaagatatccttcgaaagacccctgtaaaagagcccaacagtgaaaatgtagatatcagcagtggaggaggcgtgacaggctggaagagcaaatgctgctgagcattctcctgttccatcagttgccatccactaccccgttttctcttcttgctgcaaaataaaccactctgtccatttttaactctaaacagatatttttgtttctcatcttaactatccaagccacctattttatttgttctttcatctgtgactgcttgctgactttatcataattttcttcaaacaaaaaaatgtatagaaaaatcatgtctgtgacttcatttttaaatgtacttgctcagctcaactgcatttcagttgtattatagtccagttcttatcaacattaaaacctatagcaatcatttcaaatctattctgcaaattgtataagaataaagttagaattaacaattttattttgtacaacagtggaattttctgtcatggataatgtgcttgagtccctataatctatagacatgtgatagcaaaagaaacaaacaaaagccaggaaaacactcattttcgccttgaatatgtaaatgggattaattttgtcctgtgccttatgtggaaaggaacttctttggttttccttttttgttctggtggaagcatgtgcaggagacatatcatccaaacataaaccattaaaatgtttgtggtttgcttggctgtaattttcaaagtagttaattgaggacaaagggtaatgcagaagtgatagctttggtttgctgagtcttgttttaagtggccttgatatttaaaactattcctgccaccatttcttctccttggccacttcttccttgcgtctccctgcatgctgctttatttgcttctccctccccaaccacctcatggtatatttaagagtgaaagggacaaactagtaggtttgtcaagtttaatataaagcactgatgtaacttgctaggtaaacggaaagataagttctaactgcctactatccaatgtcagttaattggtgtcttcccccctcatttgctctcttccctaaaatgtgtcccagatgccttcatttgctgttttacttctatgttctgcttttcctcctctctttgttcccttcctgtctatccattgagtttatgaaatggaagagttaactgcatgcactagtgtttggagggtgttgtggtttgtctttctaattaggtgtatagcctattcactttcctagaataaatctcttaacctaaatttgagtagtctgcattttggcaactcctctagcagcttggtagcctagtacaggttgtttttttaaaaaaggaaaagcaggaaggaggagtgaattttattaacatgtttgccaaatgtattgagatttggcctctgaagaacactttttcagtgttaagtttctttaccttaagattcagaaatactttagaatattattaattttaagtcctgtctttacatccttttggaaaacttgtattaccatgagtttggaacctgtccttttttcactgcattttttctagttttgcttcattgcttatcattaggatagggtaagtgaagtttgctatgctgctagcatcctaagatgatacctttgttgaaagaattgtgaatagcatgattcatttctagcagaggctgagtttaggacagcagcttccattgagaagtctttctgtgtcgtgaatagcattttaatgacctcttggctcacataagcaaacaacatagggacgtatctgctatgaaaatccacaaatttttcagatagtgccctaaaaacaattttatatgcctcactggttgttattcttaggttattcccacacttgactttatcattgtttactactagtaaaaagcagcattgccaaataatccctaattttccactaaaaatataatgaaatgatgttaagctttttgaaaagtttaggttaaacctactgttgttagattaatgtatttgttgcttccctttatctggaatgtggcattagcttttttattttaaccctctttaattcttattcaattccatgacttaaggttggagagctaaacactgggatttttggataacagactgacagttttgcataattataatcggcattgtacatagaaaggatatggctaccttttgttaaatctgcactttctaaatatcaaaaaagggaaatgaagtataaatcaatttttgtataatctgtttgaaacatgagttttatttgcttaatattagggctttgccccttttctgtaagtctcttgggatcctgtgtagaagctgttctcattaaacaccaaacagttaagtccattctctggtactagctacaaattcggtttcatattctacttaacaatttaaataaactgaaatatttcta

SEQ ID NO: 307120 - DNA, 3599 bp, Homo sapiens
cctcagactgaggcttggagacaggagcattccactcgccacttcggcgcgcccccatgccctcttgtgcgcgtgcgcagaggcggaccgcaaggctagggcgtgagggaagggcgggcgtacgcccttgcgtgcgtctcaggcagcgcgcacgccggcgtgagagggcacggggaaaaggtggctctggccggggtggctcggtttcctggggctatgtaactgagctcgtcgacttaggggtccttcttcgctgccctcgccgcgtgctagcagggagtttccgctcgggagagagactgtcctcacgcccgctgcgcctcctcgacggcagagcaggcttgctcgcccgtgggagcgtcccggccgagaagccctgaggggggaggggaggccattttgtcccgaccgactccccggaaccgggcggagcggctgggagaggctgcggagccgcggtcgccgccctcggaggcactggacgccgccactgtcggggcttcctcaaagctgttcgtaggtcgcccgcgccgtctcgagcctttttcccacgcttccccggtcctccggcctgagaacgcccgagtgaggagttggccgtagtgagagggaccgatcccttggggccgccggcggcgagagcccgagccgctcctcccaatggcgaagaagacgtacgacctgcttttcaagctgctcctgatcggggattccggagtggggaagacctgcgtcctttttcgtttttcggatgatgccttcaatactacctttatttccaccataggaatagacttcaagatcaaaacagttgaattacaaggaaagaagatcaagctacagatatgggatacagcaggccaggagcgatttcacaccatcacaacctcctactacagaggcgcaatgggtatcatgctagtatatgacatcaccaatggtaaaagttttgaaaaaatgttactaggaaacaagtgtgatatggacgacaaaagagttgtacctaaaggaaaaggagaacagattgcaagggagcatggtattaggttttttgagactagtgcaaaagcaaatataaacatcgaaaaggcgttcctcacgttagctgaagatatccttcgaaagacccctgtaaaagagcccaacagtgaaaatgtagatatcagcagtggaggaggcgtgacaggctggaagagcaaatgctgctgagcattctcctgttccatcagttgccatccactaccccgttttctcttcttgctgcaaaataaaccactctgtccatttttaactctaaacagatatttttgtttctcatcttaactatccaagccacctattttatttgttctttcatctgtgactgcttgctgactttatcataattttcttcaaacaaaaaaatgtatagaaaaatcatgtctgtgacttcatttttaaatgtacttgctcagctcaactgcatttcagttgtattatagtccagttcttatcaacattaaaacctatagcaatcatttcaaatctattctgcaaattgtataagaataaagttagaattaacaattttattttgtacaacagtggaattttctgtcatggataatgtgcttgagtccctataatctatagacatgtgatagcaaaagaaacaaacaaaagccaggaaaacactcattttcgccttgaatatgtaaatgggattaattttgtcctgtgccttatgtggaaaggaacttctttggttttccttttttgttctggtggaagcatgtgcaggagacatatcatccaaacataaaccattaaaatgtttgtggtttgcttggctgtaattttcaaagtagttaattgaggacaaagggtaatgcagaagtgatagctttggtttgctgagtcttgttttaagtggccttgatatttaaaactattcctgccaccatttcttctccttggccacttcttccttgcgtctccctgcatgctgctttatttgcttctccctccccaaccacctcatggtatatttaagagtgaaagggacaaactagtaggtttgtcaagtttaatataaagcactgatgtaacttgctaggtaaacggaaagataagttctaactgcctactatccaatgtcagttaattggtgtcttcccccctcatttgctctcttccctaaaatgtgtcccagatgccttcatttgctgttttacttctatgttctgcttttcctcctctctttgttcccttcctgtctatccattgagtttatgaaatggaagagttaactgcatgcactagtgtttggagggtgttgtggtttgtctttctaattaggtgtatagcctattcactttcctagaataaatctcttaacctaaatttgagtagtctgcattttggcaactcctctagcagcttggtagcctagtacaggttgtttttttaaaaaaggaaaagcaggaaggaggagtgaattttattaacatgtttgccaaatgtattgagatttggcctctgaagaacactttttcagtgttaagtttctttaccttaagattcagaaatactttagaatattattaattttaagtcctgtctttacatccttttggaaaacttgtattaccatgagtttggaaaaaggacaacgaaaggcttttcatgtaaagataagatctttagctatctctaaccctgtccttttttcactgcattttttctagttttgcttcattgcttatcattaggatagggtaagtgaagtttgctatgctgctagcatcctaagatgatacctttgttgaaagaattgtgaatagcatgattcatttctagcagaggctgagtttaggacagcagcttccattgagaagtctttctgtgtcgtgaatagcattttaatgacctcttggctcacataagcaaacaacatagggacgtatctgctatgaaaatccacaaatttttcagatagtgccctaaaaacaattttatatgcctcactggttgttattcttaggttattcccacacttgactttatcattgtttactactagtaaaaagcagcattgccaaataatccctaattttccactaaaaatataatgaaatgatgttaagctttttgaaaagtttaggttaaacctactgttgttagattaatgtatttgttgcttccctttatctggaatgtggcattagcttttttattttaaccctctttaattcttattcaattccatgacttaaggttggagagctaaacactgggatttttggataacagactgacagttttgcataattataatcggcattgtacatagaaaggatatggctaccttttgttaaatctgcactttctaaatatcaaaaaagggaaatgaagtataaatcaatttttgtataatctgtttgaaacatgagttttatttgcttaatattagggctttgccccttttctgtaagtctcttgggatcctgtgtagaagctgttctcattaaacaccaaacagttaagtccattctctggtactagctacaaattcggtttcatattctacttaacaatttaaataaactgaaatatttcta

SEQ ID NO: 307121 - DNA, 3592 bp, Homo sapiens
cctcagactgaggcttggagacaggagcattccactcgccacttcggcgcgcccccatgccctcttgtgcgcgtgcgcagaggcggaccgcaaggctagggcgtgagggaagggcgggcgtacgcccttgcgtgcgtctcaggcagcgcgcacgccggcgtgagagggcacggggaaaaggtggctctggccggggtggctcggtttcctggggctatgtaactgagctcgtcgacttaggggtccttcttcgctgccctcgccgcgtgctagcagggagtttccgctcgggagagagactgtcctcacgcccgctgcgcctcctcgacggcagagcaggcttgctcgcccgtgggagcgtcccggccgagaagccctgaggggggaggggaggccattttgtcccgaccgactccccggaaccgggcggagcggctgggagaggctgcggagccgcggtcgccgccctcggaggcactggacgccgccactgtcggggcttcctcaaagctgttcgtaggtcgcccgcgccgtctcgagcctttttcccacgcttccccggtcctccggcctgagaacgcccgagtgaggagttggccgtagtgagagggaccgatcccttggggccgccggcggcgagagcccgagccgctcctcccaatggcgaagaagacgtacgacctgcttttcaagctgctcctgatcggggattccggagtggggaagacctgcgtcctttttcgtttttcggatgatgccttcaatactacctttatttccaccatagggatacagcaggccaggagcgatttcacaccatcacaacctcctactacagaggcgcaatgggtatcatgctagtatatgacatcaccaatggtaaaagttttgaaaacatcagcaaatggcttagaaacatagatgagcatgccaatgaagatgtggaaagaatgttactaggaaacaagtgtgatatggacgacaaaagagttgtacctaaaggaaaaggagaacagattgcaagggagcatggtattaggttttttgagactagtgcaaaagcaaatataaacatcgaaaaggcgttcctcacgttagctgaagatatccttcgaaagacccctgtaaaagagcccaacagtgaaaatgtagatatcagcagtggaggaggcgtgacaggctggaagagcaaatgctgctgagcattctcctgttccatcagttgccatccactaccccgttttctcttcttgctgcaaaataaaccactctgtccatttttaactctaaacagatatttttgtttctcatcttaactatccaagccacctattttatttgttctttcatctgtgactgcttgctgactttatcataattttcttcaaacaaaaaaatgtatagaaaaatcatgtctgtgacttcatttttaaatgtacttgctcagctcaactgcatttcagttgtattatagtccagttcttatcaacattaaaacctatagcaatcatttcaaatctattctgcaaattgtataagaataaagttagaattaacaattttattttgtacaacagtggaattttctgtcatggataatgtgcttgagtccctataatctatagacatgtgatagcaaaagaaacaaacaaaagccaggaaaacactcattttcgccttgaatatgtaaatgggattaattttgtcctgtgccttatgtggaaaggaacttctttggttttccttttttgttctggtggaagcatgtgcaggagacatatcatccaaacataaaccattaaaatgtttgtggtttgcttggctgtaattttcaaagtagttaattgaggacaaagggtaatgcagaagtgatagctttggtttgctgagtcttgttttaagtggccttgatatttaaaactattcctgccaccatttcttctccttggccacttcttccttgcgtctccctgcatgctgctttatttgcttctccctccccaaccacctcatggtatatttaagagtgaaagggacaaactagtaggtttgtcaagtttaatataaagcactgatgtaacttgctaggtaaacggaaagataagttctaactgcctactatccaatgtcagttaattggtgtcttcccccctcatttgctctcttccctaaaatgtgtcccagatgccttcatttgctgttttacttctatgttctgcttttcctcctctctttgttcccttcctgtctatccattgagtttatgaaatggaagagttaactgcatgcactagtgtttggagggtgttgtggtttgtctttctaattaggtgtatagcctattcactttcctagaataaatctcttaacctaaatttgagtagtctgcattttggcaactcctctagcagcttggtagcctagtacaggttgtttttttaaaaaaggaaaagcaggaaggaggagtgaattttattaacatgtttgccaaatgtattgagatttggcctctgaagaacactttttcagtgttaagtttctttaccttaagattcagaaatactttagaatattattaattttaagtcctgtctttacatccttttggaaaacttgtattaccatgagtttggaaaaaggacaacgaaaggcttttcatgtaaagataagatctttagctatctctaaccctgtccttttttcactgcattttttctagttttgcttcattgcttatcattaggatagggtaagtgaagtttgctatgctgctagcatcctaagatgatacctttgttgaaagaattgtgaatagcatgattcatttctagcagaggctgagtttaggacagcagcttccattgagaagtctttctgtgtcgtgaatagcattttaatgacctcttggctcacataagcaaacaacatagggacgtatctgctatgaaaatccacaaatttttcagatagtgccctaaaaacaattttatatgcctcactggttgttattcttaggttattcccacacttgactttatcattgtttactactagtaaaaagcagcattgccaaataatccctaattttccactaaaaatataatgaaatgatgttaagctttttgaaaagtttaggttaaacctactgttgttagattaatgtatttgttgcttccctttatctggaatgtggcattagcttttttattttaaccctctttaattcttattcaattccatgacttaaggttggagagctaaacactgggatttttggataacagactgacagttttgcataattataatcggcattgtacatagaaaggatatggctaccttttgttaaatctgcactttctaaatatcaaaaaagggaaatgaagtataaatcaatttttgtataatctgtttgaaacatgagttttatttgcttaatattagggctttgccccttttctgtaagtctcttgggatcctgtgtagaagctgttctcattaaacaccaaacagttaagtccattctctggtactagctacaaattcggtttcatattctacttaacaatttaaataaactgaaatatttcta

SEQ ID NO: 307122 - DNA, 3061 bp, Homo sapiens
gaacccctgacctcatgtgatccacccacctcagcctcccaaagtgctggctttacaggcgtgagccaccacatgcggtataatttttctttgttaagcttgtgattctactaagggtatcgtccttgcaacaaaagagttgtttcctccctaatcccacctttgtctacccccttttaaactgtcattgacccttgaactgcaggttcacttacacatggatatttttgtttaaagagatggggactcgcagtgttgcccaggctggtctcaaactccaggggtcaagtgattcttccttctcagcctcccaagaagctgggattacagcctactcaatttgaagacattgaggatgaagacctttatgatgatccacttccacttaataaatacatgccaatgaagatgtggaaagaatgttactaggaaacaagtgtgatatggacgacaaaagagttgtacctaaaggaaaaggagaacagattgcaagggagcatggtattaggttttttgagactagtgcaaaagcaaatataaacatcgaaaaggcgttcctcacgttagctgaagatatccttcgaaagacccctgtaaaagagcccaacagtgaaaatgtagatatcagcagtggaggaggcgtgacaggctggaagagcaaatgctgctgagcattctcctgttccatcagttgccatccactaccccgttttctcttcttgctgcaaaataaaccactctgtccatttttaactctaaacagatatttttgtttctcatcttaactatccaagccacctattttatttgttctttcatctgtgactgcttgctgactttatcataattttcttcaaacaaaaaaatgtatagaaaaatcatgtctgtgacttcatttttaaatgtacttgctcagctcaactgcatttcagttgtattatagtccagttcttatcaacattaaaacctatagcaatcatttcaaatctattctgcaaattgtataagaataaagttagaattaacaattttattttgtacaacagtggaattttctgtcatggataatgtgcttgagtccctataatctatagacatgtgatagcaaaagaaacaaacaaaagccaggaaaacactcattttcgccttgaatatgtaaatgggattaattttgtcctgtgccttatgtggaaaggaacttctttggttttccttttttgttctggtggaagcatgtgcaggagacatatcatccaaacataaaccattaaaatgtttgtggtttgcttggctgtaattttcaaagtagttaattgaggacaaagggtaatgcagaagtgatagctttggtttgctgagtcttgttttaagtggccttgatatttaaaactattcctgccaccatttcttctccttggccacttcttccttgcgtctccctgcatgctgctttatttgcttctccctccccaaccacctcatggtatatttaagagtgaaagggacaaactagtaggtttgtcaagtttaatataaagcactgatgtaacttgctaggtaaacggaaagataagttctaactgcctactatccaatgtcagttaattggtgtcttcccccctcatttgctctcttccctaaaatgtgtcccagatgccttcatttgctgttttacttctatgttctgcttttcctcctctctttgttcccttcctgtctatccattgagtttatgaaatggaagagttaactgcatgcactagtgtttggagggtgttgtggtttgtctttctaattaggtgtatagcctattcactttcctagaataaatctcttaacctaaatttgagtagtctgcattttggcaactcctctagcagcttggtagcctagtacaggttgtttttttaaaaaaggaaaagcaggaaggaggagtgaattttattaacatgtttgccaaatgtattgagatttggcctctgaagaacactttttcagtgttaagtttctttaccttaagattcagaaatactttagaatattattaattttaagtcctgtctttacatccttttggaaaacttgtattaccatgagtttggaaaaaggacaacgaaaggcttttcatgtaaagataagatctttagctatctctaaccctgtccttttttcactgcattttttctagttttgcttcattgcttatcattaggatagggtaagtgaagtttgctatgctgctagcatcctaagatgatacctttgttgaaagaattgtgaatagcatgattcatttctagcagaggctgagtttaggacagcagcttccattgagaagtctttctgtgtcgtgaatagcattttaatgacctcttggctcacataagcaaacaacatagggacgtatctgctatgaaaatccacaaatttttcagatagtgccctaaaaacaattttatatgcctcactggttgttattcttaggttattcccacacttgactttatcattgtttactactagtaaaaagcagcattgccaaataatccctaattttccactaaaaatataatgaaatgatgttaagctttttgaaaagtttaggttaaacctactgttgttagattaatgtatttgttgcttccctttatctggaatgtggcattagcttttttattttaaccctctttaattcttattcaattccatgacttaaggttggagagctaaacactgggatttttggataacagactgacagttttgcataattataatcggcattgtacatagaaaggatatggctaccttttgttaaatctgcactttctaaatatcaaaaaagggaaatgaagtataaatcaatttttgtataatctgtttgaaacatgagttttatttgcttaatattagggctttgccccttttctgtaagtctcttgggatcctgtgtagaagctgttctcattaaacaccaaacagttaagtccattctctggtactagctacaaattcggtttcatattctacttaacaatttaaataaactgaaatatttcta

SEQ ID NO: 307123 - DNA, 2359 bp, Homo sapiens
cctcagactgaggcttggagacaggagcattccactcgccacttcggcgcgcccccatgccctcttgtgcgcgtgcgcagaggcggaccgcaaggctagggcgtgagggaagggcgggcgtacgcccttgcgtgcgtctcaggcagcgcgcacgccggcgtgagagggcacggggaaaaggtggctctggccggggtggctcggtttcctggggctatgtaactgagctcgtcgacttaggggtccttcttcgctgccctcgccgcgtgctagcagggagtttccgctcgggagagagactgtcctcacgcccgctgcgcctcctcgacggcagagcaggcttgctcgcccgtgggagcgtcccggccgagaagccctgaggggggaggggaggccattttgtcccgaccgactccccggaaccgggcggagcggctgggagaggctgcggagccgcggtcgccgccctcggaggcactggacgccgccactgtcggggcttcctcaaagctgttcgtaggtcgcccgcgccgtctcgagcctttttcccacgcttccccggtcctccggcctgagaacgcccgagtgaggagttggccgtagtgagagggaccgatcccttggggccgccggcggcgagagcccgagccgctcctcccaatggcgaagaagacgtacgacctgcttttcaagctgctcctgatcggggattccggagtggggaagacctgcgtcctttttcgtttttcggatgatgccttcaatactacctttatttccaccataggaatagacttcaagatcaaaacagttgaattacaaggaaagaagatcaagctacagatatgggatacagcaggccaggagcgatttcacaccatcacaacctcctactacagaggcgcaatgggtatcatgctagtatatgacatcaccaatggtaaaagttttgaaaacatcagcaaatggcttagaaacatagatgagcatgccaatgaagatgtggaaagaatgttactaggaaacaagtgtgatatggacgacaaaagagttgtacctaaaggaaaaggagaacagattgcaagggagcatggtattaggttttttgagactagtgcaaaagcaaatataaacatcgaaaaggcgttcctcacgttagctgaagatatccttcgaaagacccctgtaaaagagcccaacagtgaaaatgtagatatcagcagtggaggaggcgtgacaggctggaagagcaaatgctgctgagcattctcctgttccatcagttgccatccactaccccgttttctcttcttgctgcaaaataaaccactctgtccatttttaactctaaacagatatttttgtttctcatcttaactatccaagccacctattttatttgttctttcatctgtgactgcttgctgactttatcataattttcttcaaacaaaaaaatgtatagaaaaatcatgtctgtgacttcatttttaaatgtacttgctcagctcaactgcatttcagttgtattatagtccagttcttatcaacattaaaacctatagcaatcatttcaaatctattctgcaaattgtataagaataaagttagaattaacaattttattttgtacaacagtggaattttctgtcatggataatgtgcttgagtccctataatctatagacatgtgatagcaaaagaaacaaacaaaagccaggaaaacactcattttcgccttgaatatgtaaatgggattaattttgtcctgtgccttatgtggaaaggaacttctttggttttccttttttgttctggtggaagcatgtgcaggagacatatcatccaaacataaaccattaaaatgtttgtggtttgcttggctgtaattttcaaagtagttaattgaggacaaagggtaatgcagaagtgatagctttggtttgctgagtcttgttttaagtggccttgatatttaaaactattcctgccaccatttcttctccttggccacttcttccttgcgtctccctgcatgctgctttatttgcttctccctccccaaccacctcatggtatatttaagagtgaaagggacaaactagtaggtttgtcaagtttaatataaagcactgatgtaacttgctaggtaaacggaaagataagttctaactgcctactatccaatgtcagttaattggtgtcttcccccctcatttgctctcttccctaaaatgtgtcccagatgccttcatttgctgttttacttctatgttctgcttttcctcctctctttgttcccttcctgggcatcctttggggttagaaaaagggaagaaataactccctccccctaagt

SEQ ID NO: 307124 - DNA, 2270 bp, Homo sapiens
  misc_feature (2099)..(2099): n is a, c, g, or t
  misc_feature (2207)..(2207): n is a, c, g, or t
  misc_feature (2243)..(2243): n is a, c, g, or t
cctcagactgaggcttggagacaggagcattccactcgccacttcggcgcgcccccatgccctcttgtgcgcgtgcgcagaggcggaccgcaaggctagggcgtgagggaagggcgggcgtacgcccttgcgtgcgtctcaggcagcgcgcacgccggcgtgagagggcacggggaaaaggtggctctggccggggtggctcggtttcctggggctatgtaactgagctcgtcgacttaggggtccttcttcgctgccctcgccgcgtgctagcagggagtttccgctcgggagagagactgtcctcacgcccgctgcgcctcctcgacggcagagcaggcttgctcgcccgtgggagcgtcccggccgagaagccctgaggggggaggggaggccattttgtcccgaccgactccccggaaccgggcggagcggctgggagaggctgcggagccgcggtcgccgccctcggaggcactggacgccgccactgtcggggcttcctcaaagctgttcgtaggtcgcccgcgccgtctcgagcctttttcccacgcttccccggtcctccggcctgagaacgcccgagtgaggagttggccgtagtgagagggaccgatcccttggggccgccggcggcgagagcccgagccgctcctcccaatggcgaagaagacgtacgacctgcttttcaagctgctcctgatcggggattccggagtggggaagacctgcgtcctttttcgtttttcggatgatgccttcaatactacctttatttccaccataggaatagacttcaagatcaaaacagttgaattacaaggaaagaagatcaagctacagatatgggatacagcaggccaggagcgatttcacaccatcacaacctcctactacagaggcgcaatgggtatcatgctagtatatgacatcaccaatggtaaaagttttgaaaacatcagcaaatggcttagaaacatagatgagcatgccaatgaagatgtggaaagaatgttactaggaaacaagtgtgatatggacgacaaaagagttgtacctaaaggaaaaggagaacagattgcaagggagcatggtattaggttttttgagactagtgcaaaagcaaatataaacatcgaaaaggcgttcctcacgttagctgaagatatccttcgaaagacccctgtaaaagagcccaacagtgaaaatgtagatatcagcagtggaggaggcgtgacaggctggaagagcaaatgctgctgagcattctcctgttccatcagttgccatccactaccccgttttctcttcttgctgcaaaataaaccactctgtccatttttaactctaaacagatatttttgtttctcatcttaactatccaagccacctattttatttgttctttcatctgtgactgcttgctgactttatcataattttcttcaaacaaaaaaatgtatagaaaaatcatgtctgtgacttcatttttaaatgtacttgctcagctcaactgcatttcagttgtattatagtccagttcttatcaacattaaaacctatagcaatcatttcaaatctattctgcaaattgtataagaataaagttagaattaacaattttattttgtacaacagtggaattttctgtcatggataatgtgcttgagtccctataatctatagacatgtgatagcaaaagaaacaaacaaaagccaggaaaacactcattttcgccttgaatatgtaaatgggattaattttgtcctgtgccttatgtggaaaggaacttctttggttttccttttttgttctggtggaagcatgtgcaggagacatatcatccaaacataaaccattaaaatgtttgtggtttgcttggctgtaattttcaaagtagttaattgaggacaaagggtaatgcagaagtgatagctttggtttgctgagtcttgttttaagtggccttgatatttaaaactattcctgccaccatttcttcacatttgtttttcctttttttttcagctggcttttttttttacttttttattttttaatttttttttaagtattaatggatgatcctggggtgtcnctcggagagggggattgggcagggtcataggacaatagtggagggaaggtcagcagatgaacaagtgaacaagggtctcgggttttcctaggcagaggacccgggggncttccgcagggttggtgtcccgggatactggagatnagggaggggtgatgactcttaagaagc

SEQ ID NO: 307125 - DNA, 1570 bp, Homo sapiens
cctcagactgaggcttggagacaggagcattccactcgccacttcggcgcgcccccatgccctcttgtgcgcgtgcgcagaggcggaccgcaaggctagggcgtgagggaagggcgggcgtacgcccttgcgtgcgtctcaggcagcgcgcacgccggcgtgagagggcacggggaaaaggtggctctggccggggtggctcggtttcctggggctatgtaactgagctcgtcgacttaggggtccttcttcgctgccctcgccgcgtgctagcagggagtttccgctcgggagagagactgtcctcacgcccgctgcgcctcctcgacggcagagcaggcttgctcgcccgtgggagcgtcccggccgagaagccctgaggggggaggggaggccattttgtcccgaccgactccccggaaccgggcggagcggctgggagaggctgcggagccgcggtcgccgccctcggaggcactggacgccgccactgtcggggcttcctcaaagctgttcgtaggtcgcccgcgccgtctcgagcctttttcccacgcttccccggtcctccggcctgagaacgcccgagtgaggagttggccgtagtgagagggaccgatcccttggggccgccggcggcgagagcccgagccgctcctcccaatggcgaagaagacgtacgacctgcttttcaagctgctcctgatcggggattccggagtggggaagacctgcgtcctttttcgtttttcggatgatgccttcaatactacctttatttccaccataggaatagacttcaagatcaaaacagttgaattacaaggaaagaagatcaagctacagatatgggatacagcaggccaggagcgatttcacaccatcacaacctcctactacagaggcgcaatgggtatcatgctagtatatgacatcaccaatggtaaaagttttgaaaacatcagcaaatggcttagaaacatagatgagcatgccaatgaagatgtggaaagaatgttactaggaaacaagtgtgatatggacgacaaaagagttgtacctaaaggaaaaggagaacagattgcaagggagcatggtattaggttttttgagactagtgcaaaagcaaatataaacatcgaaaaggcgttcctcacgttagctgaagatatccttcgaaagacccctgtaaaagagcccaacagtgaaaatgtagatatcagcagtggaggaggcgtgacaggctggaagagcaaatgctgctgagcattctcctgttccatcagttgccatccactaccccgttttctcttcttgctgcaaaataaaccactctgtccatttttaactctaaacagatatttttgtttctcatcttaactatccaagccacctattttatttgttctttcatctgtgactgcttgctgactttatcataattttcttcaaacaaaaaaatgtatagaaaaatcatgtctgtgacttcatttttaaatgtacttgctcagctcaactgcatttcagttgtattatagtccagttcttatcaacattaaaacctatagcaatc

SEQ ID NO: 307126 - DNA, 1619 bp, Homo sapiens
cctcagactgaggcttggagacaggagcattccactcgccacttcggcgcgcccccatgccctcttgtgcgcgtgcgcagaggcggaccgcaaggctagggcgtgagggaagggcgggcgtacgcccttgcgtgcgtctcaggcagcgcgcacgccggcgtgagagggcacggggaaaaggtggctctggccggggtggctcggtttcctggggctatgtaactgagctcgtcgacttaggggtccttcttcgctgccctcgccgcgtgctagcagggagtttccgctcgggagagagactgtcctcacgcccgctgcgcctcctcgacggcagagcaggcttgctcgcccgtgggagcgtcccggccgagaagccctgaggggggaggggaggccattttgtcccgaccgactccccggaaccgggcggagcggctgggagaggctgcggagccgcggtcgccgccctcggaggcactggacgccgccactgtcggggcttcctcaaagctgttcgtaggtcgcccgcgccgtctcgagcctttttcccacgcttccccggtcctccggcctgagaacgcccgagtgaggagttggccgtagtgagagggaccgatcccttggggccgccggcggcgagagcccgagccgctcctcccaatggcgaagaagacgtacgacctgcttttcaagctgctcctgatcggggattccggagtggggaagacctgcgtcctttttcgtttttcggatgatgccttcaatactacctttatttccaccataggaatagacttcaagatcaaaacagttgaattacaaggaaagaagatcaagctacagatatgggatacagcaggccaggagcgatttcacaccatcacaacctcctactacagaggcgcaatgggtatcatgctagtatatgacatcaccaatggtaaaagttttgaaaacatcagcaaatggcttagaaacatagatgagcatgccaatgaagatgtggaaagaatgttactaggaaacaagtgtgatatggacgacaaaagagttgtacctaaaggaaaaggagaacagattgcaagggagcatggtattaggttttttgagactagtgcaaaagcaaatataaacatcgaaaaggcgttcctcacgttagctgaagatatccttcgaaagacccctgtaaaagagcccaacagtgaaaatgtagatatcagcagtggaggaggcgtgacaggctggaagagcaaatgctgctgagcattctcctgttccatcagttgccatccactaccccgttttctcttcttgctgcaaaataaaccactctgtccatttttaactctaaacagatatttttgtttctcatcttaactatccaagccacctattttatttgttctttcatctgtgactgcttgctgactttatcataattttcttcaaacaaaaaaatgtatagaaaaatcatgtctgtgacttcatttttaaatgtacttgctcagctcaactgcatttcagttgtattatagtccagttcttatcaacattaaaacctatagcaatcatttcaaatctattctgcaaattgtataagaataaagttagaattaaca

SEQ ID NO: 307127 - DNA, 1819 bp, Homo sapiens
cctcagactgaggcttggagacaggagcattccactcgccacttcggcgcgcccccatgccctcttgtgcgcgtgcgcagaggcggaccgcaaggctagggcgtgagggaagggcgggcgtacgcccttgcgtgcgtctcaggcagcgcgcacgccggcgtgagagggcacggggaaaaggtggctctggccggggtggctcggtttcctggggctatgtaactgagctcgtcgacttaggggtccttcttcgctgccctcgccgcgtgctagcagggagtttccgctcgggagagagactgtcctcacgcccgctgcgcctcctcgacggcagagcaggcttgctcgcccgtgggagcgtcccggccgagaagccctgaggggggaggggaggccattttgtcccgaccgactccccggaaccgggcggagcggctgggagaggctgcggagccgcggtcgccgccctcggaggcactggacgccgccactgtcggggcttcctcaaagctgttcgtaggtcgcccgcgccgtctcgagcctttttcccacgcttccccggtcctccggcctgagaacgcccgagtgaggagttggccgtagtgagagggaccgatcccttggggccgccggcggcgagagcccgagccgctcctcccaatggcgaagaagacgtacgacctgcttttcaagctgctcctgatcggggattccggagtggggaagacctgcgtcctttttcgtttttcggatgatgccttcaatactacctttatttccaccataggaatagacttcaagatcaaaacagttgaattacaaggaaagaagatcaagctacagatatgggatacagcaggccaggagcgatttcacaccatcacaacctcctactacagaggcgcaatgggtatcatgctagtatatgacatcaccaatggtaaaagttttgaaaacatcagcaaatggcttagaaacatagatgagagatggggactcgcagtgttgcccaggctggtctcaaactccaggggtcaagtgattcttccttctcagcctcccaagaagctgggattacaggtgtgtgccaccacacccagctctataaacaggtttttaaaaacaaatcttttggaaaaaatgttagagacttgcaacaatttgaaaaactcacagacaagccacataacctagaaatattgggcgggggggaaattaagaaaaagttaagtatattatgaatgtctaaagtatatgtagatactagtctattttattactaccataaaacatacacagatctattattaaaagtttaaatttattaacactcaaacacacagagcccatacaaggcaccttttgcatcaagagaaatgtaacagagatgcagtattaaatcataattgcataaaaataactaatacatactgtactactgtgataattttgtagccacctcctgttgctattttggtgagctcgtatgtttccaagtgtctgcttaaaacaccatgtgatgtggatcatctccccgtgaacagtttgtgtctccagtaaatcccatattgcaatcaagaaaaaaaaaccgtaaaaaatttcctatccataatttgtctatgaccaccaatttataaatgcttataatgtaaacacccactttttaatgaataaatatccgtaaactagcctgtactttatccgtgtagagctattgaatgtttgggcaggtttatctatatcctacggtggcatttctctgttagtggtccaacctttttatatgagttgttttttttattgtaccctgtgttacccc

SEQ ID NO: 307128 - DNA, 1049 bp, Homo sapiens
cctcagactgaggcttggagacaggagcattccactcgccacttcggcgcgcccccatgccctcttgtgcgcgtgcgcagaggcggaccgcaaggctagggcgtgagggaagggcgggcgtacgcccttgcgtgcgtctcaggcagcgcgcacgccggcgtgagagggcacggggaaaaggtggctctggccggggtggctcggtttcctggggctatgtaactgagctcgtcgacttaggggtccttcttcgctgccctcgccgcgtgctagcagggagtttccgctcgggagagagactgtcctcacgcccgctgcgcctcctcgacggcagagcaggcttgctcgcccgtgggagcgtcccggccgagaagccctgaggggggaggggaggccattttgtcccgaccgactccccggaaccgggcggagcggctgggagaggctgcggagccgcggtcgccgccctcggaggcactggacgccgccactgtcggggcttcctcaaagctgttcgtaggtcgcccgcgccgtctcgagcctttttcccacgcttccccggtcctccggcctgagaacgcccgagtgaggagttggccgtagtgagagggaccgatcccttggggccgccggcggcgagagcccgagccgctcctcccaatggcgaagaagacgtacgacctgcttttcaagctgctcctgatcggggattccggagtggggaagacctgcgtcctttttcgtttttcggatgatgccttcaatactacctttatttccaccataggagcaaaactgaatctcgaaagataaatgaagtttaccaggaaaagaaaactgggatgaggagaggatttacgaagtagcatatgctaaacgagagacatgagaaaacatgatgatcagggatgtcatgtagactgaagactttgatactaagaggcattttcacaattttatcctgaaagcatagagaaaacaaatcaacttgtcattttcaaaaacttaccctggctgtaatctcaataaaaggacatcttttaaagtca

SEQ ID NO: 307129 - DNA, 1123 bp, Homo sapiens
cctcagactgaggcttggagacaggagcattccactcgccacttcggcgcgcccccatgccctcttgtgcgcgtgcgcagaggcggaccgcaaggctagggcgtgagggaagggcgggcgtacgcccttgcgtgcgtctcaggcagcgcgcacgccggcgtgagagggcacggggaaaaggtggctctggccggggtggctcggtttcctggggctatgtaactgagctcgtcgacttaggggtccttcttcgctgccctcgccgcgtgctagcagggagtttccgctcgggagagagactgtcctcacgcccgctgcgcctcctcgacggcagagcaggcttgctcgcccgtgggagcgtcccggccgagaagccctgaggggggaggggaggccattttgtcccgaccgactccccggaaccgggcggagcggctgggagaggctgcggagccgcggtcgccgccctcggaggcactggacgccgccactgtcggggcttcctcaaagctgttcgtaggtcgcccgcgccgtctcgagcctttttcccacgcttccccggtcctccggcctgagaacgcccgagtgaggagttggccgtagtgagagggaccgatcccttggggccgccggcggcgagagcccgagccgctcctcccaatggcgaagaagacgtacgacctgcttttcaagctgctcctgatcggggattccggagtggggaagacctgcgtcctttttcgtttttcggatgatgccttcaatactacctttatttccaccataggagcaaaactgaatctcgaaagataaatgaagtttaccaggaaaagaaaactgggatgaggagaggatttacgaagtagcatatgctaaacgagagacatgagaaaacatgatgatcagggatgtcatgtagactgaagactttgatactaagaggcattttcacaattttatcctgaaagcatagagaaaacaaatcaacttgtcattttcaaaaacttaccctggctgtaatctcaataaaaggacatcttttaaagtcaagctttatgaaaaatttactaccttgtttttgtttttctcatgttttttatttattttgaggagtggggtgtta

SEQ ID NO: 307130 - DNA, 1092 bp, Homo sapiens
  misc_feature (726)..(726): n is a, c, g, or t
  misc_feature (730)..(730): n is a, c, g, or t
cctcagactgaggcttggagacaggagcattccactcgccacttcggcgcgcccccatgccctcttgtgcgcgtgcgcagaggcggaccgcaaggctagggcgtgagggaagggcgggcgtacgcccttgcgtgcgtctcaggcagcgcgcacgccggcgtgagagggcacggggaaaaggtggctctggccggggtggctcggtttcctggggctatgtaactgagctcgtcgacttaggggtccttcttcgctgccctcgccgcgtgctagcagggagtttccgctcgggagagagactgtcctcacgcccgctgcgcctcctcgacggcagagcaggcttgctcgcccgtgggagcgtcccggccgagaagccctgaggggggaggggaggccattttgtcccgaccgactccccggaaccgggcggagcggctgggagaggctgcggagccgcggtcgccgccctcggaggcactggacgccgccactgtcggggcttcctcaaagctgttcgtaggtcgcccgcgccgtctcgagcctttttcccacgcttccccggtcctccggcctgagaacgcccgagtgaggagttggccgtagtgagagggaccgatcccttggggccgccggcggcgagagcccgagccgctcctcccaatggcgaagaagacgtacgacctgcttttcaagctgctcctgatcggggatttcctcccccccggngggnaaagtttgggggggggaaaagaaccccggagtggggaagacctgcgtcctttttcgtttttcggatgatgccttcaatactacctttatttccaccataggagcaaaactgaatctcgaaagataaatgaagtttaccaggaaaagaaaactgggatgaggagaggatttacgaagtagcatatgctaaacgagagacatgagaaaacatgatgatcagggatgtcatgtagactgaagactttgatactaagaggcattttcacaattttatcctgaaagcatagagaaaacaaatcaacttgtcattttcaaaaacttaccctggctgtaatctcaataaaaggacatcttttaaagtca

SEQ ID NO: 307131 - DNA, 1293 bp, Homo sapiens
  misc_feature (191)..(191): n is a, c, g, or t
ccaaaatatcttccaaaccagctgcatctttctacaattctaccagcaatatatgagggttacaatttctctccatctttgtgaacgcttgttagagtctgtcctcttttcttccattctgtgggttggctttttactttctaaatggtagaaccttcaaagcacaaaggttttaaatttgatgtagcccnatttatccatttcttttcttttgccacttcatggctttagatcttacatgtaggtccatgatcctttttggttttttttcttttttttgagacagagtctcactctgttgcccaggctggagtgcagtcatgcaatcatggctcactgcagcctcgacctcccgggctcaagtgatcccacctcagcctcccagatagctggaaccacaagtgcataccaccatacccgactaattttttttttttttttatggatatttttgtttaaagagatggggactcgcagtgttgcccaggctggtctcaaactccaggggtcaagtgattcttccttctcagcctcccaagaagctgggattacaggtgtgtgccaccacacccagctctataaacaggtttttaaaaacaaatcttttggaaaaaatgttagagacttgcaacaatttgaaaaactcacagacaagccacataacctagaaatattgggcgggggggaaattaagaaaaagttaagtatattatgaatgtctaaagtatatgtagatactagtctattttattactaccataaaacatacacagatctattattaaaagtttaaatttattaacactcaaacacacagagcccatacaaggcaccttttgcatcaagagaaatgtaacagagatgcagtattaaatcataattgcataaaaataactaatacatactgtactactgtgataattttgtagccacctcctgttgctattttggtgagctcgtatgtttccaagtgtctgcttaaaacaccatgtgatgtggatcatctccccgtgaacagtttgtgtctccagtaaatcccatattgcaatcaagaaaaaaaaaccgtaaaaaatttcctatccataatttgtctatgaccaccaatttataaatgcttataatgtaaacacccactttttaatgaataaatatccgtaaactagcctgtactttatccgtgtagagctattgaatgtttgggcaggtttatctatatcctacggtggcatttctctgttagtggtccaacctttttatatgagttgttttttttattgtaccctgtgttacccc

SEQ ID NO: 307132 - DNA, 1624 bp, Homo sapiens
agggttttgccatgttggtcaggctggtctcaaactcctggcttcaagtgaatcacccatttcggcctcccagagtgctgggattacaggtgtgagccactgtgccaagccagcccctccagactcttgagactagtgttatttgctcagatgttgccagtgaaagtgtgagctacatccactggataaagcagctacttcatcccttgactcagccacagcagattatgaaatactgctttaagatatggagtagaaattcttgagtcaagatgaaaatcctgggatagggtttttacaagcagtgaagcataaattacaatgaagttacattgaggaagccacctgttaaagtggcttccttttttaaaatttggaacttggggcaatcttcccaagcagggtttactgcacgaggaacttaagccacagtcccagttatacagtggatcattggcaaagctgggaataggacccaggacgtctgcttccaatatgctactttttttttttttttgagacgtcttgccctgttgcccaggctagtatgcagtggcacagtcacagcttcctgcagccttgaccttctggctccagcaatcctcccagcttagcactccgtctcaaaaaacaaaaaaaaaatatcaatcctaagagagggaaggaggagactgaaagcataaagagggtagaaaagtcataaaatccacagggatacacaatggtctggattcttgcagtcacagtgttacataggaaagctcactctgggacaacagccctggagctcctgtagctagatagggacagtgtcacttgtaatcccagctacttggtaggcagaggttgcagtgagcagagatcaccccactgcactccagcctgggccacagagtgagactctgtctcaaaaaaaagaaaaacaaagatgggcagtgtcagggtggtttttcagaccctgaattgttgaatagatgggggatccagagccaactcaggcccccctactcccaaatgtcatcaaacagattgaattcctaagggcagatgggagcaatgggacgccttgacctctcagtctcttcacttgcagtcatcatgtggaaccgtggcctgtaccaaaacagtacctgatgaaagctgccattacagtatacaactgcaccccaggcctgcctcataccaaatcattctccttcctttccaggtacgagtgcttccatatccatttacccaccattggcaatttgaaaggaccatccagacccccataggatccacatggaacacccagagggctttccaaaagctgactactcccaaggtcgtcaccaagccaggccatatcattaaccccataaaagcagaagacgtgggctaccggtcttcctcaaggtcggacctgtctgtcatacagaggaatccaaaacgaatcaccacacgtcacaaaaaacagctgaagaaatgctctgtagattgagttgctggaggagtgacagccaggagccctgacttcacttcctttggtccagttttactctgatacagggtggattccaaaactggctcagtacattgcatgtagttaagccacattttaaaaataaaggcattttttaatcta

SEQ ID NO: 307133 - DNA, 2540 bp, Homo sapiens
aaattgctttgcggcccgcacggaaattgctttccttcggcttccgttcttggtccatgtgagagaagctggctgctgaaatgactgcgaaccggcttgcagagagccttctggctttgagccaacaggaagaactagcggatttgccaaaagactacctcttgagtgagagtgaagatgagggggacaatgatggagagagaaagcatcaaaagcttctggaagcaatcagttcccttgatggaaagaataggcggaaattggctgagaggtctgaggctagtctgaaggtgtcagagttcaatgtcagttctgaaggatcaggagaaaagctggtccttgcagatctgcttgagcctgttaaaacttcatcttctttggccactgtgaaaaagcaactgagtagagtcaaatcaaagaagacagtggagttacctctgaacaaagaagagattgaacggatccacagagaagtagcattcaataaaaccgcacaagtcctctccaaatgggaccctgtcgtcctgaagaaccggcaggcagagcagctggtttttcccctggagaaagaggagccagccattgctcccattgaacatgtgctcagtggctggaaggcaagaactcccctggagcaggaaattttcaacctcctccataagaacaagcagccagtgacagaccctttactgacccctgtggaaaaggcctctctccgagccatgagcctagaagaggcaaagatgcgacgagcagagcttcagagggctcgggctctgcagtcctactatgaggccaaggctcgaagagagaagaaaatcaaaagtaaaaagtatcacaaagtcgtgaagaaaggaaaggccaagaaagccctaaaagagtttgagcagctgcggaaggttaatccagctgcagcactagaagaactggaaaaaattgaaaaggccagaatgatggaaagaatgagccttaagcaccaaaacagtgggaaatgggccaagtcaaaggcaattatggccaaatatgacctggaggctcgccaagctatgcaggaacagttgtctaagaacaaagaactgacacagaaactccaggtagcctctgagagtgaggaagaggagggaggcacagaagatgtggaagaactccttgtccctgatgtagtgaatgaagtgcagatgaatgcagatgggccgaatccctggatgctcaggagctgcaccagtgacaccaaagaggctgcaacccaggaggaccctgagcaactgccagagcttgaggcccatggagtttctgaaagtgagggagaagaaagaccagtggcagaagaagaaattttgttgagagaatttgaggaaaggcgatcccttagaaaaagatctgagctcagccaagatgctgagccagcaggcagtcaagaaacaaaagattctggcagccaggaggtgctgtctgaattgagagtactatctcagaaattgaaggaaaaccatcagtccaggaagcaaaaagcaagttcagaggggactattccccaggtccagagagaggaacctgccccagaagaagaggagcccctgttgctacagagaccagagagagtacagacgctggaagagctagaagagctgggaaaagaagaatgttttcaaaataaggagcttcccagacctgtgttagaagggcagcagtcagagaggaccccaaataatcgccctgatgcccctaaggagaagaaaaagaaggagcaaatgatcgacctacagaacctcctaaccacacaatctccctccgtgaagtctttggcagttcccacaatagaggagctggaagatgaagaggagagaaaccataggcagatgataaaggaagcttttgctggggatgatgtcatcagagatttcttgaaagagaagagggaagctgtggaggcgagtaagccaaaggacgtggacctgacactacctggctggggcgagtggggtggtgtgggcctaaagcccagtgccaagaaaagacgccggtttctcattaaagcccctgagggtcctccaagaaaagataagaatttgccaaatgtgattatcaatgagaagcgcaacatccacgcagctgctcatcaggtacgagtgcttccatatccatttacccaccattggcaatttgaaaggaccatccagacccccataggatccacatggaacacccagagggctttccaaaagctgactactcccaaggtcgtcaccaagccaggccatatcattaaccccataaaagcagaagacgtgggctaccggtcttcctcaaggtcggacctgtctgtcatacagaggaatccaaaacgaatcaccacacgtcacaaaaaacagctgaagaaatgctctgtagattgagttgctggaggagtgacagccaggagccctgacttcacttcctttggtccagttttactctgatacagggtggattccaaaactggctcagtacattgcatgtagttaagccacattttaaaaataaaggcattttttaatcta

SEQ ID NO: 307134 - DNA, 2438 bp, Homo sapiens
aaattgctttgcggcccgcacggaaattgctttccttcggcttccgttcttggtccatgtgagagaagctggctgctgaaatgactgcgaaccggcttgcagagagccttctggctttgagccaacaggaagaactagcggatttgccaaaagactacctcttgagtgagagtgaagatgagggggacaatgatggagagagaaagcatcaaaagcttctggaagcaatcagttcccttgatggaaagaataggcggaaattggctgagaggtctgaggctagtctgaaggtgtcagagttcaatgtcagttctgaaggatcaggagaaaagctggtccttgcagatctgcttgagcctgttaaaacttcatcttctttggccactgtgaaaaagcaactgagtagagtcaaatcaaagaagacagtggagttacctctgaacaaagaagagattgaacggatccacagagaagtagcattcaataaaaccgcacaagtcctctccaaatgggaccctgtcgtcctgaagaaccggcaggcagagcagctggtttttcccctggagaaagaggagccagccattgctcccattgaacatgtgctcagtggctggaaggcaagaactcccctggagcaggaaattttcaacctcctccataagaacaagcagccagtgacagaccctttactgacccctgtggaaaaggcctctctccgagccatgagcctagaagaggcaaagatgcgacgagcagagcttcagagggctcgggctctgcagtcctactatgaggccaaggctcgaagagagaagaaaatcaaaagtaaaaagtatcacaaagtcgtgaagaaaggaaaggccaagaaagccctaaaagagtttgagcagctgcggaaggttaatccagctgcagcactagaagaactggaaaaaattgaaaaggccagaatgatggaaagaatgagccttaagcaccaaaacagtgggaaatgggccaagtcaaaggcaattatggccaaatatgacctggaggctcgccaagctatgcaggaacagttgtctaagaacaaagaactgacacagaaactccaggtagcctctgagagtgaggaagaggagggaggcacagaagatgtggaagaactccttgaccctgagcaactgccagagcttgaggcccatggagtttctgaaagtgagggagaagaaagaccagtggcagaagaagaaattttgttgagagaatttgaggaaaggcgatcccttagaaaaagatctgagctcagccaagatgctgagccagcaggcagtcaagaaacaaaagattctggcagccaggaggtgctgtctgaattgagagtactatctcagaaattgaaggaaaaccatcagtccaggaagcaaaaagcaagttcagaggggactattccccaggtccagagagaggaacctgccccagaagaagaggagcccctgttgctacagagaccagagagagtacagacgctggaagagctagaagagctgggaaaagaagaatgttttcaaaataaggagcttcccagacctgtgttagaagggcagcagtcagagaggaccccaaataatcgccctgatgcccctaaggagaagaaaaagaaggagcaaatgatcgacctacagaacctcctaaccacacaatctccctccgtgaagtctttggcagttcccacaatagaggagctggaagatgaagaggagagaaaccataggcagatgataaaggaagcttttgctggggatgatgtcatcagagatttcttgaaagagaagagggaagctgtggaggcgagtaagccaaaggacgtggacctgacactacctggctggggcgagtggggtggtgtgggcctaaagcccagtgccaagaaaagacgccggtttctcattaaagcccctgagggtcctccaagaaaagataagaatttgccaaatgtgattatcaatgagaagcgcaacatccacgcagctgctcatcaggtacgagtgcttccatatccatttacccaccattggcaatttgaaaggaccatccagacccccataggatccacatggaacacccagagggctttccaaaagctgactactcccaaggtcgtcaccaagccaggccatatcattaaccccataaaagcagaagacgtgggctaccggtcttcctcaaggtcggacctgtctgtcatacagaggaatccaaaacgaatcaccacacgtcacaaaaaacagctgaagaaatgctctgtagattgagttgctggaggagtgacagccaggagccctgacttcacttcctttggtccagttttactctgatacagggtggattccaaaactggctcagtacattgcatgtagttaagccacattttaaaaataaaggcattttttaatcta

SEQ ID NO: 307135 - DNA, 2507 bp, Homo sapiens
aaattgctttgcggcccgcacggaaattgctttccttcggcttccgttcttggtccatgtgagagaagctggctgctgaaatgactgcgaaccggcttgcagagagccttctggctttgagccaacaggaagaactagcggatttgccaaaagactacctcttgagtgagagtgaagatgagggggacaatgatggagagagaaagcatcaaaagcttctggaagcaatcagttcccttgatggaaagaataggcggaaattggctgagaggtctgaggctagtctgaaggtgtcagagttcaatgtcagttctgaaggatcaggagaaaagctggtccttgcagatctgcttgagcctgttaaaacttcatcttctttggccactgtgaaaaagcaactgagtagagtcaaatcaaagaagacagtggagttacctctgaacaaagaagagattgaacggatccacagagaagtagcattcaataaaaccgcacaagtcctctccaaatgggaccctgtcgtcctgaagaaccggcaggcagagcagctggtttttcccctggagaaagaggagccagccattgctcccattgaacatgtgctcagtggctggaaggcaagaactcccctggagcaggaaattttcaacctcctccataagaacaagcagccagtgacagaccctttactgacccctgtggaaaaggcctctctccgagccatgagcctagaagaggcaaagatgcgacgagcagagcttcagagggctcgggctctgcagtcctactatgaggccaaggctcgaagagagaagaaaatcaaaagtaaaaagtatcacaaagtcgtgaagaaaggaaaggccaagaaagccctaaaagagtttgagcagctgcggaaggttaatccagctgcagcactagaagaactggaaaaaattgaaaaggccagaatgatggaaagaatgagccttaagcaccaaaacagtgggaaatgggccaagtcaaaggcaattatggccaaatatgacctggaggctcgccaagctatgcaggaacagttgtctaagaacaaagaactgacacagaaactccaggtagcctctgagagtgaggaagaggagggaggcacagaagatgtggaagaactccttgtccctgatgtagtgaatgaagtgcagatgaatgcagatgggccgaatccctggatgctcaggagctgcaccagtgacaccaaagaggctgcaacccaggaggaccctgagcaactgccagagcttgaggcccatggagtttctgaaagtgagggagaagaaagaccagtggcagaagaagaaattttgttgagagaatttgaggaaaggcgatcccttagaaaaagatctgagctcagccaagatgctgagccagcaggcagtcaagaaacaaaagattctggcagccaggaggtgctgtctgaattgagagtactatctcagaaattgaaggaaaaccatcagtccaggaagcaaaaagcaagttcagaggggactattccccaggtccagagagaggaacctgccccagaagaagaggagcccctgttgctacagagaccagagagagtacagacgctggaagagctagaagagctgggaaaagaagaatgttttcaaaataaggagcttcccagacctgtgttagaagggcagcagtcagagaggaccccaaataatcgccctgatgcccctaaggagaagaaaaagaaggagcaaatgatcgacctacagaacctcctaaccacacaatctccctccgtgaagtctttggcagttcccacaatagaggagctggaagatgaagaggagagaaaccataggcagatgataaaggaagcttttgctggggatgatgtcatcagagatttcttgaaagagaagagggaagctgtggaggcgagtaagccaaaggacgtggacctgacactacctggctggggcgagtggggtggtgtgggcctaaagcccagtgccaagaaaagacgccgaaaagataagaatttgccaaatgtgattatcaatgagaagcgcaacatccacgcagctgctcatcaggtacgagtgcttccatatccatttacccaccattggcaatttgaaaggaccatccagacccccataggatccacatggaacacccagagggctttccaaaagctgactactcccaaggtcgtcaccaagccaggccatatcattaaccccataaaagcagaagacgtgggctaccggtcttcctcaaggtcggacctgtctgtcatacagaggaatccaaaacgaatcaccacacgtcacaaaaaacagctgaagaaatgctctgtagattgagttgctggaggagtgacagccaggagccctgacttcacttcctttggtccagttttactctgatacagggtggattccaaaactggctcagtacattgcatgtagttaagccacattttaaaaataaaggcattttttaatcta

SEQ ID NO: 307136 - DNA, 1370 bp, Homo sapiens
  misc_feature (1130)..(1130): n is a, c, g, or t
  misc_feature (1173)..(1173): n is a, c, g, or t
  misc_feature (1216)..(1216): n is a, c, g, or t
aaattgctttgcggcccgcacggaaattgctttccttcggcttccgttcttggtccatgtgagagaagctggctgctgaaatgactgcgaaccggcttgcagagagccttctggctttgagccaacaggaagaactagcggatttgccaaaagactacctcttgagtgagagtgaagatgagggggacaatgatggagagagaaagcatcaaaagcttctggaagcaatcagttcccttgatggaaagaataggcggaaattggctgagaggtctgaggctagtctgaaggtgtcagagttcaatgtcagttctgaaggatcaggagaaaagctggtccttgcagatctgcttgagcctgttaaaacttcatcttctttggccactgtgaaaaagcaactgagtagagtcaaatcaaagaagacagtggagttacctctgaacaaagaagagattgaacggatccacagagaagtagcattcaataaaaccgcacaagtcctctccaaatgggaccctgtcgtcctgaagaaccggcaggcagagcagctggtttttcccctggagaaagaggagccagccattgctcccattgaacatgtgctcagtggctggaaggcaagaactcccctggagcaggaaattttcaacctcctccataagaacaagcagccagtgacagaccctttactgacccctgtggaaaaggcctctctccgagccatgagcctagaagaggcaaagatgcgacgagcagagcttcagagggctcgggctctgcagtcctactatgaggccaaggctcgaagagagaagaaaatcaaaagtaaaaagtatcacaaagtcgtgaagaaaggaaaggccaagaaagccctaaaagagtttgagcagctgcggaaggttaatccagctgcagcactagaagaacgaagaaaagaggaaagaaggaggaggagaaagaagaagaacaaggagaagaagaaagaagaagggagaaggagaagaaaagaaggagaagaggaaaaggaagaaggagaaagaaaaggagaaggaaaaggaaaagaaggagaagaaagaagaactaagaagaaggagaggaagaataagaaggaaagaagaaagaaaaaagtnaaagaagaagaaagaaggaagaaggaaagaagaggaagaactnagaagaagaaagaggaggaaagaagaaagaagaataaggaacnagaaagaaggagaagaaagaataagaagaggaagaagaaaaagaagaaaagaagaaggaaagaaggagaaaaaggaagaaaaaaggaagaagaaagtagaaagcggaagaaagaaaagaaagtataagaaggaagaagaagaaagaaggaaaaa

SEQ ID NO: 307137 - DNA, 794 bp, Homo sapiens
taaccagtggttatttccaggatgaagagtgtgtgcgccttgataaagagagattggctgcccgtttggagggtcacaaagaagggattgtacagactgaacagattaggtctttgtctgaagctatgtcagtggaaaaaattgctgcaatcaaagccaaaattatggctaagaaaagatctactatcaagactgatctagatgatgacataactgcccttaaacagaggagttttgtggatgctgaggtagatgtgacccgagatattgtcagcagagagagagtatggaggacacgaacaactatcttacaaagcacaggaaagaatttttccaagaacatttttgcaattcttcaatctgtaaaagccagagaagaagggcgtgcacctgaacagcgacctgccccaaatgcagcacctgtggatcccactttgcgcaccaaacagcctatcccagctgcctctgctccctctgaaaaaaaaaaaaaaaaaaaaaaaaaaaaaaaaaaaaaaaaaaaaaaaaaaaaaaaaaaaagaaaaaaaaaaaaaaaaaaaaaaagagacaaaagaagaatcaaaagaagagcaacaaaacaagaaaaaccaaaaaagagactagaaaaaagaggaaagaagaaaaaacacagaagacaaaaaagacaacaagagaacgaaaaaaaagaaaagaagaggagaaaaaaaaagaagaagaaaggaacacaaccataaaaaaaaaaagaacagaaaagacgacgagagaagaggcaaaaaaagaaggggaaaaaaccaaaa

SEQ ID NO: 307138 - DNA, 430 bp, Homo sapiens
  misc_feature (390)..(390): n is a, c, g, or t
tggttagtgctgctgctgttggttcgtcgcggcggcgaaggaggaggaggaagagggcgaggcgacaagagaagaaggaggcaggcgcggcggcagcggcggcgccccgagccggcggaggcgaggggggggaagatggcggacgtgcttagcgtcctgcgacagtacaacatccagaagaaggagattgtggtgaagggagacgaagtgatcttcggggagttctcctggcccaagaatgtgaagaccaactatgttgtttgggggactggaaaggaaggccaacccagagagtactacacattggattccattttatttctacttaataacgtgcacctttctcatcctgtttatgtccgacgtgcagctacttaaaaaaaaccgttnttttaaaaaacgcataactaaaataactacaattaaagcg

SEQ ID NO: 307139 - DNA, 2760 bp, Homo sapiens
tggttagtgctgctgctgttggttcgtcgcggcggcgaaggaggaggaggaagagggcgaggcgacaagagaagaaggaggcaggcgcggcggcagcggcggcgccccgagccggcggaggcgaggggggggaagatggcggacgtgcttagcgtcctgcgacagtacaacatccagaagaaggagattgtggtgaagggagacgaagtgatcttcggggagttctcctggcccaagaatgtgaagaccaactatgttgtttgggggactggaaaggaaggccaacccagagagtactacacattggattccattttatttctacttaataacgtgcacctttctcatcctgtttatgtccgacgtgcagctactgaaaatattcctgtggttagaagacctgatcgaaaagatctacttggatatctcaatggtgaagcgtcaacatcggcaagtatagacagaagcgctcccttagaaataggtcttcagcgatctactcaagtcaaacgagctgcagatgaagttttagcagaagcaaagaaaccacgaattgaggatgaagagtgtgtgcgccttgataaagagagattggctgcccgtttggagggtcacaaagaagggattgtacagactgaacagattaggtctttgtctgaagctatgtcagtggaaaaaattgctgcaatcaaagccaaaattatggctaagaaaagatctactatcaagactgatctagatgatgacataactgcccttaaacagaggagttttgtggatgctgaggtagatgtgacccgagatattgtcagcagagagagagtatggaggacacgaacaactatcttacaaagcacaggaaagaatttttccaagaacatttttgcaattcttcaatctgtaaaagccagagaagaagggcgtgcacctgaacagcgacctgccccaaatgcagcacctgtggatcccactttgcgcaccaaacagcctatcccagctgcctataacagatacgatcaggaaagattcaaaggaaaagaagaaacggaaggcttcaaaattgacactatgggaacctaccatggtatgacactgaaatctgtaacggagggtgcatctgcccggaagactcagactcctgcagcccagccagtaccaagaccagtttctcaagcaagacctcccccaaatcagaagaaaggatctcgaacacccattatcataattcctgcagctaccacctctttaataaccatgcttaatgcaaaagaccttctacaggacctgaaatttgtcccatcagatgaaaagaagaaacaaggttgtcaacgagaaaatgaaactctaatacaaagaagaaaagaccagatgcaaccagggggcactgcaattagtgttacagtaccttatagagtagtagaccagccccttaaacttatgcctcaagactgggaccgcgttgtagccgtttttgtgcagggtcctgcatggcagttcaaaggttggccatggcttttgcctgatggatcaccagttgatatatttgctaaaattaaagccttccatctgaagtatgatgaagttcgtctggatccaaatgttcagaaatgggatgtaacagtattagaactcagctatcacaaacgtcatttggatagaccagtgttcttacggttttgggaaacattggacaggtacatggtaaagcataaatcgcacttgagattctgaattatttggctcctccatttctggaaattgagactcaagctttatgaatttatcaagaacttaaaaatgaagaaggtcacagattgatcttttataagaccttatttgatgctttgtgcttcaaggagatgatacctgtcatccatataagcaaactttttggcttacaactatttttttaatattagccttctagtctgtaatggaaattgtatattttgatagaagttttttctccattggttaaattagcattacttaaaatttgtttctttagaaaataaatgcaggttataaatgtgtgtatatttagagattataaggctctctgagccatcttctgatttttcattgctctataattctttttactgaaaatactatgttatgaatggtattaaattttagtctctggaacatccaaaaccaagcaaagggatgtgactattttgaatgaatcagaatgtcaacttgtatgtacactatatctacacttactcattatttaaaaagaataatgaaaaatctagatcaattcttcaatttgattgaactgttcagccttttcaagatttctttatttacaaatgattacatttaaatgaatgtacattcttctcactgactttggtgattttgaaacctagaatgatgtgtttctatctgtaatatctttccatttgaaaaaaatctcaaaacacagattaaaaccacaataggctgtagtattttttattttgggagccagagtatgatttgggggaagaatatgtatcagccctattgcagtataactttaagctccttttctctttagtccacttttgattgtaatttttatggtataggattttgaatcttctattttaggcttgtcagtcttggagttcttatcttccattatccctaaatattgataaactcccaggcaccaaagaaaacatttgcttaattgtctgaaaagaaacaagagaaaaacactggtatttttatgtctgtattcaatatggtataaaatataaaaactat

SEQ ID NO: 307140 - DNA, 3800 bp, Homo sapiens
tggttagtgctgctgctgttggttcgtcgcggcggcgaaggaggaggaggaagagggcgaggcgacaagagaagaaggaggcaggcgcggcggcagcggcggcgccccgagccggcggaggcgaggggggggaagatggcggacgtgcttagcgtcctgcgacagtacaacatccagaagaaggagattgtggtgaagggagacgaagtgatcttcggggagttctcctggcccaagaatgtgaagaccaactatgttgtttgggggactggaaaggaaggccaacccagagagtactacacattggattccattttatttctacttaataacgtgcacctttctcatcctgtttatgtccgacgtgcagctactgaaaatattcctgtggttagaagacctgatcgaaaagatctacttggatatctcaatggtgaagcgtcaacatcggcaagtatagacagaagcgctcccttagaaataggtcttcagcgatctactcaagtcaaacgagctgcagatgaagttttagcagaagcaaagaaaccacgaattgaggatgaagagtgtgtgcgccttgataaagagagattggctgcccgtttggagggtcacaaagaagggattgtacagactgaacagattaggtctttgtctgaagctatgtcagtggaaaaaattgctgcaatcaaagccaaaattatggctaagaaaagatctactatcaagactgatctagatgatgacataactgcccttaaacagaggagttttgtggatgctgaggtagatgtgacccgagatattgtcagcagagagagagtatggaggacacgaacaactatcttacaaagcacaggaaagaatttttccaagaacatttttgcaattcttcaatctgtaaaagccagagaagaagggcgtgcacctgaacagcgacctgccccaaatgcagcacctgtggatcccactttgcgcaccaaacagcctatcccagctgcctataacagatacgatcaggaaagattcaaaggaaaagaagaaacggaaggcttcaaaattgacactatgggaacctaccatggtatgacactgaaatctgtaacggagggtgcatctgcccggaagactcagactcctgcagcccagccagtaccaagaccagtttctcaagcaagacctcccccaaatcagaagaaaggatctcgaacacccattatcataattcctgcagctaccacctctttaataaccatgcttaatgcaaaagaccttctacaggacctgaaatttgtcccatcagatgaaaagaagaaacaaggttgtcaacgagaaaatgaaactctaatacaaagaagaaaagaccagatgcaaccagggggcactgcaattagtgttacagtaccttatagagtagtagaccagccccttaaacttatgcctcaagactgggaccgcgttgtagccgtttttgtgcagggtcctgcatggcagttcaaaggttggccatggcttttgcctgatggatcaccagttgatatatttgctaaaattaaagccttccatctgaagtatgatgaagttcgtctggatccaaatgttcagaaatgggatgtaacagtattagaactcagctatcacaaacgtcatttggatagaccagtgttcttacggttttgggaaacattggacaggtacatggtaaagcataaatcgcacttgagattctgaattatttggctcctccatttctggaaattgagactcaagctttatgaatttatcaagaacttaaaaatgaagaaggtcacagattgatcttttataagaccttatttgatgctttgtgcttcaaggagatgatacctgtcatccatataagcaaactttttggcttacaactatttttttaatattagccttctagtctgtaatggaaattgtatattttgatagaagttttttctccattggttaaattagcattacttaaaatttgtttctttagaaaataaatgcaggttataaatgtgtgtatatttagagattataaggctctctgagccatcttctgatttttcattgctctataattctttttactgaaaatactatgttatgaatggtattaaattttagtctctggaacatccaaaaccaagcaaagggatgtgactattttgaatgaatcagaatgtcaacttgtatgtacactatatctacacttactcattatttaaaaagaataatgaaaaatctagatcaattcttcaatttgattgaactgttcagccttttcaagatttctttatttacaaatgattacatttaaatgaatgtacattcttctcactgactttggtgattttgaaacctagaatgatgtgtttctatctgtaatatctttccatttgaaaaaaatctcaaaacacagattaaaaccacaaaaaaaaaaaaaaaactcgagactagttctctccctcgtgccgaattcggcacgaggcctcgtgccgtctctctgggtttcttgttcactaaggagtaacacagaggtcaggcagagaatgggggtctcgcaggctagggacctcagggagaggcctctgttgcccttttcagcaaggctggaaatgggatatgggcaggggacgtcttctctgacttcaccctagaccttctggctccaaatggggcccatggccttgagcacctgggaccagctctttccaccacagggcattgggcactgggcactttcttatcgagatagtcactcccacgtctggttcgtgatgggcttggccctccagctcagcacaactgcaagaatggattttgtattctctagacggacactgtccaagatggtagccattggccacatgcgacacatttttaatgaattaaaattaatcaagactggaaatgtcggccaggcctggtggctcatgcctgtaatcccagcactttgggaggccatagagggcggatgacttgaggtcaggagtttaagaccagcctggccaacatggtgaaacccatttctactaaaaacacaaaaattagctgggcatggtggtgtgttcctgtaatcccagctgcttgggaggctgaggcaggagaatcgcttgaacccaggaggcagagattggagtgagctgagatcatgccactgccctccagtggccaccacatccggcaaggcagatgggaccatttccttcatccagaacgttctgtggacatcactgctctaggttcctcccttatggagtctcacaagactgtctagccagcaagatctcttttccaaccaggccaggagcacctctccacccactgctgctggtctgaccgccttcctggaagtccctcttgaggcaggccctggagttagaagctgggcagaggcacccacagccttatcctttgccaatctctgactcaatgccacggccactgtagtgagctgaaccacctccagcagtcccctggcagaagcacctggaaaacatgcaatgggaaccttcaccctgaggccaggcccttcccatgctacccaacagtagacaggacaccctgtgttgttggctgcaccggggtgctgggatctgtggatccctggggcctggaagccactctcagcacatacagccactgtgttccgaggtccagtcagctggccgggaaggaattcaacacagccaaggacagaggtccatatgatgacgggtggatgctcgtgtgactttgctgaccttttatgttttctatgggcaataaaggccaagagagctccc

SEQ ID NO: 307141 - DNA, 3376 bp, Homo sapiens
tggttagtgctgctgctgttggttcgtcgcggcggcgaaggaggaggaggaagagggcgaggcgacaagagaagaaggaggcaggcgcggcggcagcggcggcgccccgagccggcggaggcgaggggggggaagatggcggacgtgcttagcgtcctgcgacagtacaacatccagaagaaggagattgtggtgaagggagacgaagtgatcttcggggagttctcctggcccaagaatgtgaagaccaactatgttgtttgggggactggaaaggaaggccaacccagagagtactacacattggattccattttatttctacttaataacgtgcacctttctcatcctgtttatgtccgacgtgcagctactgaaaatattcctgtggttagaagacctgatcgaaaagatctacttggatatctcaatggtgaagcgtcaacatcggcaagtatagacagaagcgctcccttagaaataggtcttcagcgatctactcaagtcaaacgagctgcagatgaagttttagcagaagcaaagaaaccacgaattgaggatgaagagtgtgtgcgccttgataaagagagattggctgcccgtttggagggtcacaaagaagggattgtacagactgaacagattaggtctttgtctgaagctatgtcagtggaaaaaattgctgcaatcaaagccaaaattatggctaagaaaagatctactatcaagactgatctagatgatgacataactgcccttaaacagaggagttttgtggatgctgaggtagatgtgacccgagatattgtcagcagagagagagtatggaggacacgaacaactatcttacaaagcacaggaaagaatttttccaagaacatttttgcaattcttcaatctgtaaaagccagagaagaagggcgtgcacctgaacagcgacctgccccaaatgcagcacctgtggatcccactttgcgcaccaaacagcctatcccagctgcctataacagatacgatcaggaaagattcaaaggaaaagaagaaacggaaggcttcaaaattgacactatgggaacctaccatggtatgacactgaaatctgtaacggagggtgcatctgcccggaagactcagactcctgcagcccagccagtaccaagaccagtttctcaagcaagacctcccccaaatcagaagaaaggatctcgaacacccattatcataattcctgcagctaccacctctttaataaccatgcttaatgcaaaagaccttctacaggacctgaaatttgtcccatcagatgaaaagaagaaacaaggttgtcaacgagaaaatgaaactctaatacaaagaagaaaagaccagatgcaaccagggggcactgcaattagtgttacagtaccttatagagtagtagaccagccccttaaacttatgcctcaagactgggaccgcgttgtagccgtttttgtgcagggtcctgcatggcagttcaaaggttggccatggcttttgcctgatggatcaccagttgatatatttgctaaaattaaagccttccatctgaagtatgatgaagttcgtctggatccaaatgttcagaaatgggatgtaacagtattagaactcagctatcacaaacgtcatttggatagaccagtgttcttacggttttgggaaacattggacaggtacatggtaaagcataaatcgcacttgagattctgaattatttggctcctccatttctggaaattgagactcaagctttatgaatttatcaagaacttaaaaatgaagaaggtcacagattgatcttttataagaccttatttgatgctttgtgcttcaaggagatgatacctgtcatccatataagcaaactttttggcttacaactatttttttaatattagccttctagtctgtaatggaaattgtatattttgatagaagttttttctccattggttaaattagcattacttaaaatttgtttctttagaaaataaatgcaggttataaatgtgtgtatatttagagattataaggctctctgagccatcttctgatttttcattgctctataattctttttactgaaaatactatgttatgaatggtattaaattttagtctctggaacatccaaaaccaagcaaagggatgtgactattttgaatgaatcagaatgtcaacttgtatgtacactatatctacacttactcattatttaaaaagaataatgaaaaatctagatcaattcttcaatttgattgaactgttcagccttttcaagatttctttatttacaaatgattacatttaaatgaatgtacattcttctcactgactttggtgattttgaaacctagaatgatgtgtttctatctgtaatatctttccatttgaaaaaaatctcaaaacacagattaaaaccacaataggctgtagtattttttattttgggagccagagtatgatttgggggaagaatatgtatcagccctattgcagtataactttaagctccttttctctttagtccacttttgattgtaatttttatggtataggattttgaatcttctattttaggcttgtcagtcttggagttcttatcttccattatccctaaatattgataaactcccaggcaccaaagaaaacatttgcttaattgtctgaaaagaaacaagagaaaaacactggtatttttatgtctgtattcaatatggtataaaatataaaaactatattttaacttagtgaaatattttactatttctctacttcagacaaaatgttgcatccaaggtacatcaagtgaccatttgccttgaaccttgatttcactttgttttttttttttccttaaaggcaactaggaagctttactttcctaaagtgtttttgccattggaatttttgctgatcacagtcttatgtcatttttttctctgtttttattcccagcaattttctcctaggttaacatatttttggtgaacgtttaggcctttcataggtattaagctgacattatctagcttcttaatgaaatttaacactgtcacaaaaatgagaagttattattttttaagtgatcacatagttcataccactagtaactagaaaagatatttattcacatgatatttacaaggctcttcagaagggaacagtcagcattttaaattactagattttagcatacttaacaaggtttgaacagattctacccctattttcctccctttttagcgtcttctttccttaaagataaaagaaaactcaaatttgtttacattaggctttcttagcatataaatatatttccaaaataaattacatgttgtgtaaactttctcca

SEQ ID NO: 307142 - DNA, 3275 bp, Homo sapiens
tggttagtgctgctgctgttggttcgtcgcggcggcgaaggaggaggaggaagagggcgaggcgacaagagaagaaggaggcaggcgcggcggcagcggcggcgccccgagccggcggaggcgaggggggggaagatggcggacgtgcttagcgtcctgcgacagtacaacatccagaagaaggagattgtggtgaagggagacgaagtgatcttcggggagttctcctggcccaagaatgtgaagaccaactatgttgtttgggggactggaaaggaaggccaacccagagagtactacacattggattccattttatttctacttaataacgtgcacctttctcatcctgtttatgtccgacgtgcagctactgaaaatattcctgtggttagaagacctgatcgaaaagatctacttggatatctcaatggtgaagcgtcaacatcggcaagtatagacagaagcgctcccttagaaataggtcttcagcgatctactcaagtcaaacgagctgcagatgaagttttagcagaagcaaagaaaccacgaattgaggatgaagagtgtgtgcgccttgataaagagagattggctgcccgtttggagggtcacaaagaagggattgtacagactgaacagattaggtctttgtctgaagctatgtcagtggaaaaaattgctgcaatcaaagccaaaattatggctaagaaaagatctactatcaagactgatctagatgatgacataactgcccttaaacagaggagttttgtggatgctgaggtagatgtgacccgagatattgtcagcagagagagagtatggaggacacgaacaactatcttacaaagcacaggaaagaatttttccaagaacatttttgcaattcttcaatctgtaaaagccagagaagaagggcgtgcacctgaacagcgacctgccccaaatgcagcacctgtggatcccactttgcgcaccaaacagcctatcccagctgcctataacagatacgatcaggaaagattcaaaggaaaagaagaaacggaaggcttcaaaattgacactatgggaacctaccatggtatgacactgaaatctgtaacggagggtgcatctgcccggaagactcagactcctgcagcccagccagtaccaagaccagtttctcaagcaagacctcccccaaatcagaagaaaggatctcgaacacccattatcataattcctgcagctaccacctctttaataaccatgcttaatgcaaaagaccttctacaggacctgaaatttgtcccatcagatgaaaagaagaaacaaggttgtcaacgagaaaatgaaactctaatacaaagaagaaaagaccagatgcaaccagggggcactgcaattagtgttacagtaccttatagagtagtagaccagccccttaaacttatgcctcaagactgttaaagccttccatctgaagtatgatgaagttcgtctggatccaaatgttcagaaatgggatgtaacagtattagaactcagctatcacaaacgtcatttggatagaccagtgttcttacggttttgggaaacattggacaggtacatggtaaagcataaatcgcacttgagattctgaattatttggctcctccatttctggaaattgagactcaagctttatgaatttatcaagaacttaaaaatgaagaaggtcacagattgatcttttataagaccttatttgatgctttgtgcttcaaggagatgatacctgtcatccatataagcaaactttttggcttacaactatttttttaatattagccttctagtctgtaatggaaattgtatattttgatagaagttttttctccattggttaaattagcattacttaaaatttgtttctttagaaaataaatgcaggttataaatgtgtgtatatttagagattataaggctctctgagccatcttctgatttttcattgctctataattctttttactgaaaatactatgttatgaatggtattaaattttagtctctggaacatccaaaaccaagcaaagggatgtgactattttgaatgaatcagaatgtcaacttgtatgtacactatatctacacttactcattatttaaaaagaataatgaaaaatctagatcaattcttcaatttgattgaactgttcagccttttcaagatttctttatttacaaatgattacatttaaatgaatgtacattcttctcactgactttggtgattttgaaacctagaatgatgtgtttctatctgtaatatctttccatttgaaaaaaatctcaaaacacagattaaaaccacaataggctgtagtattttttattttgggagccagagtatgatttgggggaagaatatgtatcagccctattgcagtataactttaagctccttttctctttagtccacttttgattgtaatttttatggtataggattttgaatcttctattttaggcttgtcagtcttggagttcttatcttccattatccctaaatattgataaactcccaggcaccaaagaaaacatttgcttaattgtctgaaaagaaacaagagaaaaacactggtatttttatgtctgtattcaatatggtataaaatataaaaactatattttaacttagtgaaatattttactatttctctacttcagacaaaatgttgcatccaaggtacatcaagtgaccatttgccttgaaccttgatttcactttgttttttttttttccttaaaggcaactaggaagctttactttcctaaagtgtttttgccattggaatttttgctgatcacagtcttatgtcatttttttctctgtttttattcccagcaattttctcctaggttaacatatttttggtgaacgtttaggcctttcataggtattaagctgacattatctagcttcttaatgaaatttaacactgtcacaaaaatgagaagttattattttttaagtgatcacatagttcataccactagtaactagaaaagatatttattcacatgatatttacaaggctcttcagaagggaacagtcagcattttaaattactagattttagcatacttaacaaggtttgaacagattctacccctattttcctccctttttagcgtcttctttccttaaagataaaagaaaactcaaatttgtttacattaggctttcttagcatataaatatatttccaaaataaattacatgttgtgtaaactttctcca

SEQ ID NO: 307143 - DNA, 1254 bp, Homo sapiens
atcaattcttcaatttgattgaactagatttttcattattcttttcaaataatgagataagtgtagatatagtgtacatacaatgttgacattatatctacacttactcattatttaaaaagaataatgaaaaatctagatcaattcttcaatttgattgaactgttcagccttttcaagatttctttatttacaaatgattacatttaaatgaatgtacattcttctcactgactttggtgattttgaaacctagaatgatgtgtttctatctgtaatatctttccatttgaaaaaaatctcaaaacacagattaaaaccacaataggctgtagtattttttattttgggagccagagtatgatttgggggaagaatatgtatcagccctattgcagtataactttaagctccttttctctttagtccacttttgattgtaatttttatggtataggattttgaatcttctattttaggcttgtcagtcttggagttcttatcttccattatccctaaatattgataaactcccaggcaccaaagaaaacatttgcttaattgtctgaaaagaaacaagagaaaaacactggtatttttatgtctgtattcaatatggtataaaatataaaaactatattttaacttagtgaaatattttactatttctctacttcagacaaaatgttgcatccaaggtacatcaagtgaccatttgccttgaaccttgatttcactttgttttttttttttccttaaaggcaactaggaagctttactttcctaaagtgtttttgccattggaatttttgctgatcacagtcttatgtcatttttttctctgtttttattcccagcaattttctcctaggttaacatatttttggtgaacgtttaggcctttcataggtattaagctgacattatctagcttcttaatgaaatttaacactgtcacaaaaatgagaagttattattttttaagtgatcacatagttcataccactagtaactagaaaagatatttattcacatgatatttacaaggctcttcagaagggaacagtcagcattttaaattactagattttagcatacttaacaaggtttgaacagattctacccctattttcctccctttttagcgtcttctttccttaaagataaaagaaaactcaaatttgtttacattaggctttcttagcatataaatatatttccaaaataaattacatgttgtgtaaactttctcca

SEQ ID NO: 307144 - DNA, 268 bp, Homo sapiens
gacacgaacaactatcttacaaagcacaggaaaggtaattaaaatattttactcattcattggagtgagagagagagagagagagtgcgtttaatctgtggttatagaattggttaaactttgcttttaggtggaagtttcaagttttatctctttgaaagctcagtaataatgtagatttccagatggccatttttaccattccattcttgaatatggttgttagacatcagagatgctgatgaaaaagtaggaatcaaaatgcaag

SEQ ID NO: 307145 - DNA, 633 bp, Homo sapiens
tatgggcctgatgccaagacttaaatgcacctggaaatgctaattaattggtagatatcagtagatatactcctagagaagcagggctggaaacggaacaattacatttgcaggagagtattacttgacttcttatattgccttctgccattttcctggttaatttctaaagactcttcttactgctttggtaaataaattattcttagaccaatgatgctcagagtgtgcagtaattatccctaacaaatgtaacaaacgagttttgaattttgttctattgtgttgatgttgtcatgttttgtttcttttgcaagcaatagaatctttcttggcccaatgttcaaataacctttttcttatttgagcacatataaacacacaatcaataaaatttcccaagaaggaacaacataaatattttaaaaatatatcatagatactttacataaaatgtaatacctatgggactatttaaaacttattagttatttgattagattttcatttatttatgtggcaaattgaaattaaggaaactaagcatttgaattgagtgtaggaatattccctttcttcctttttttttttttttttaccatttatattgtcaaggtgaatccaagataatga

SEQ ID NO: 307146 - DNA, 883 bp, Homo sapiens
ctcgggagtaggtcataccacatacatgtatttgcattttatatttactattcaaatttatcacaaggcttgtctgatgcatttaatgatccacaaaattctccttgtgtttcaggatagaataaataagtcattcatattaaagagtataattactgtgattttaatgtgagctacacctttgtatttttacttttcactttattctctatcggtgattgtcagcatgcacagcttgccctcattacacagcggcacacactctcccctcgcacttgactctccgagggctaggagtttgtcaccctcttcagttcctgatctcttgtcctccgtcctggctgcgctcattcctcccacttcagtgctctatgagctgtgtgcccacacctgatggaagtgaatgctgaacctccccagatgccagcactctgtgttaaactgaagggctaggccatggttggtgaccatgttaggaaagaagacttcgtgcaccagtgtccccagcttccggtgagagtgaagtgctccagagagactagttgggccgtcatgcaacaaaggttgcctcgttctttatctgtttatgcagtgaattgaacagtctgattctttatggcttgccaagtgaagccttaagtgtatttaatattttcccaaattgtggacccatagccaccagcaaggctacttacataaagatttctttaaaatggcataaaatgagttctcttgcaacttttactagaagttttattcaaaatgatttattggaaggactcaaaattactcagtttttatctaatttgcagaactaaaataaaatagggaaggatgtctcttgtaattcttgacctccctgtcccccagtgtcttcacatgt

SEQ ID NO: 307147 - DNA, 731 bp, Homo sapiens
gttagagagggagtggagaacgcataagcaagctggtttgaccagaaacagaactgcctgtgacagattaagagacaagcaaggcttggaatctgagagcaagcaaagagagtggaaatttacagctgccctatgaggcaacctctattaaatggacgataaaggctacttcatctaaagtgctttgagctcaagaaagagctgtcttcagcacctcaccatgtgtctacattttgttgcttagaaaagcctaggcatttctgtaacatttgcattccatattggaagaagagatttctacacatgaaaaaaatgcctttgtttagtaaatcacacaaaaatccagcagaaattgtgaaaatcctgaaagacaatttggccattttggaaaagcaagacaaaaagacagacaaggtaagagctaaaacagtaacattatgattaaagtacatgcatcgcaatgccaaaaaccaatgtaaaagcttaatgaagaattcaaaatatggtctgtgatgtgcacatagaccctctataaatagatttaagttgatttcaggttttatgcaactgattattatttagtctgttgtgatgaactttaggttcactctctagagactctgaccacaccggatccctctagactacacagcttaaagatctaaaaggttatactggtgtgtaatgttacatttacatgaaaggtaaaaagtttttatttaaagattgac

SEQ ID NO: 307148 - DNA, 3564 bp, Homo sapiens
ccgcagtggcgcccgagcgcgccgcctcccgattgactgctagcgctctcggcttgtctcgcgcactgtagctgagccaatggagttactcgtagtcgagaggccggcatcactggagtggtggcgcagctgtttcctccggatatccatcaaatattgagaagaaagaatatcaggagcaaagtgttctaagttgctgctcagaacgtaaagatgcgaaccccaaatcagtggtttgttcattcttcatgcaagagcaatgcactaaaggagagaagcaagctgtggtgatcagtgactttggtgaaagctaagaaggttcaaacaaatttgcaaatgatatacaacttctaagcattccatattggaagaagagatttctacacatgaaaaaaatgcctttgtttagtaaatcacacaaaaatccagcagaaattgtgaaaatcctgaaagacaatttggccattttggaaaagcaagacaaaaagacagacaaggcttcagaagaagtgtctaaatcactgcaagcaatgaaagaaattctgtgtggtacaaacgagaaagaacccccaacagaagcagtggctcagctagcacaagaactctacagcagtggcctgctggtgacactgatagctgacctgcagctgatagactttgagggaaaaaaagatgtgacccagatatttaacaacatcttgagaagacagataggcactcggagtcctactgtggagtatattagtgctcatcctcatatcctgtttatgctcctcaaaggatatgaagccccacagattgccttacgttgtgggattatgctgagagaatgtattcgacatgaaccacttgccaaaatcatcctcttttctaatcaattcagagatttctttaagtacgtggagttgtcaacatttgatattgcttcagatgcctttgctactttcaaggatttactaaccagacataaagtgttggtagcagacttcttagaacaaaattacgacactatttttgaagactatgagaaattgcttcagtctgagaattatgttactaagagacagtctttaaagctgctaggggagctgatcctggaccgtcacaactttgccatcatgacaaagtatatcagcaagccggagaacctgaaactcatgatgaacctccttcgggataaaagtcccaacatccagtttgaagcctttcatgtttttaaggtgtttgtggccagtcctcacaaaacacagcctattgtggagatcctgttaaaaaatcagcccaaactcattgagtttctgagcagcttccaaaaagaaaggacggatgatgagcagttcgctgacgagaagaactacttgattaaacagatccgagacttgaagaaaacggccccttgaagagctccccggcccctgtcacagtcagtcgtctcatttgtccagtttgtacagtgtgtcatttcagaaagtcatcattcttgggaagactttggaggtgcctattttttctgctgtaattgttctgggtagatggagtataaacatttgaatggaaaaaaattaacctagaataatatattcattttagtcaagtctgtgattatttatgtgaaatgagaaccattgtatcagatgttgataaaagcaattttaacttgcagatgtgagcccctgggcacaatgagccgctaaatgggagctcaattgacaggcatcaccaagtcttcaaggaggactgagttctcaggggagaactgggaatggggccagggtgcaaaaatgctttgcccatctgtaggtagacacacagatcgctcagggcactgagagatcccagaaggtaacgttaatgttttcagtcattgtgtgtcctttgttgctgccaatgtctttggactgtaatcagtgcatccacacctcccaggatccagtgctccctctcagctcagtctcccctctctccctgtcctgcattccatcccagctcctcagcatggcctcagtgggcgcacccatgcctcccgcagtccaggtgagcaggggagcaactgagcaggaagaggatggatcaacaagggtcacggggaataggggacccacggggtgtgacctgcttgctagagaactgtgaacatgtggctctggatagagtgactgctgctccatattagcttccagagggtgagtgagggacagaatatttccttcataatggtcatgggtgaatgctttctgctgtaagtgtcttttagagtaggaatcagcatagtgggatgcccagcaggcacaaaccatgggtccagggagtctcagcggggaacttctatcagtatcaataaccattggaaggagaaatgattcatgtgtgaaaaaattctcagatccatcaataaatttttttcagagccattgtatcagatgttgataaaagcaatttttttctaataagctgtcattctataattgcccatcacagtctttagtgaacacatagaaagcctatacagttttggtcctgaatagtctcttgtgactaggatgattgaggtgttaattcctcttccttataaaaaggcttggaatcaaaaatattttaaaaggccgtggtttcgtttcagacatcaaccatctaaaacgggattttaaagcgatattttacaagaatgaaaggcacaattgttgatctgtattttttacacttcagtttctaaatcatgaatcgttgccttccacaggaaccctcccttatacattacttgagtgttgtgtagtttttcttcagccaggtatttctctgcctagagaggggaagagaaatgtgttctccaggactgatcccctttgtagattttgtacctgaagagttacctggcagggcaccacccttggctaggcccaggtgtatgtttctttcttgcctggcatggaccccgaggcaggtgatgtggggcctggcgcacctccccgctttggcagctgtggcctccctggccagtgcccttgcaggaggccggccggcagcctgatgacccgcactctttagtcactgacgtcagattatttttataacgttccctgacagttcagagtcccttcgaattgcacttttctggtttcgcttatttaattaaaagagatgagtgtaagtataaaaaatgaaggtgaaataaccattggaattgtatttggttacttaatactgttccacaacatcttgggacgtctgttttcctttggagagtgaggccttgttattattcttttctgataaagaaaacattttatttcctttgggcttgcattagctctttcctagcaacccattatcccagctcagtacctttcaaacagaaaactagagtctggggttttgttgtgatctgaatttgtaagttattaatgtgaaagggggagcaggaagctccccctttgcacaaagggggatttgtttgcacaaagttcactgtaaatactgtgagaattgaattctgaaaaggtcatatttagtgatttcaaaagcacacatttaaatgaagactgactaaataaaaggtaccacaca

SEQ ID NO: 307149 - DNA, 3605 bp, Homo sapiens
gttagagagggagtggagaacgcataagcaagctggtttgaccagaaacagaactgcctgtgacagattaagagacaagcaaggcttggaatctgagagcaagcaaagagagtggaaatttacagctgccctatgtgagtgttcaagtgatcattttctggtaacgttttccagtggtaactgttactcttcaaaaagagggacagaaagtcaagacctaattgtggaaactcttttctctgccacgcttggtaataggaggcaacctctattaaatggacgataaaggctacttcatctaaagtgctttgagctcaagaaagagctgtcttcagcacctcaccatgtgtctacattttgttgcttagaaaagcctaggcatttctgtaacatttgcattccatattggaagaagagatttctacacatgaaaaaaatgcctttgtttagtaaatcacacaaaaatccagcagaaattgtgaaaatcctgaaagacaatttggccattttggaaaagcaagacaaaaagacagacaaggcttcagaagaagtgtctaaatcactgcaagcaatgaaagaaattctgtgtggtacaaacgagaaagaacccccaacagaagcagtggctcagctagcacaagaactctacagcagtggcctgctggtgacactgatagctgacctgcagctgatagactttgagggaaaaaaagatgtgacccagatatttaacaacatcttgagaagacagataggcactcggagtcctactgtggagtatattagtgctcatcctcatatcctgtttatgctcctcaaaggatatgaagccccacagattgccttacgttgtgggattatgctgagagaatgtattcgacatgaaccacttgccaaaatcatcctcttttctaatcaattcagagatttctttaagtacgtggagttgtcaacatttgatattgcttcagatgcctttgctactttcaaggatttactaaccagacataaagtgttggtagcagacttcttagaacaaaattacgacactatttttgaagactatgagaaattgcttcagtctgagaattatgttactaagagacagtctttaaagctgctaggggagctgatcctggaccgtcacaactttgccatcatgacaaagtatatcagcaagccggagaacctgaaactcatgatgaacctccttcgggataaaagtcccaacatccagtttgaagcctttcatgtttttaaggtgtttgtggccagtcctcacaaaacacagcctattgtggagatcctgttaaaaaatcagcccaaactcattgagtttctgagcagcttccaaaaagaaaggacggatgatgagcagttcgctgacgagaagaactacttgattaaacagatccgagacttgaagaaaacggccccttgaagagctccccggcccctgtcacagtcagtcgtctcatttgtccagtttgtacagtgtgtcatttcagaaagtcatcattcttgggaagactttggaggtgcctattttttctgctgtaattgttctgggtagatggagtataaacatttgaatggaaaaaaattaacctagaataatatattcattttagtcaagtctgtgattatttatgtgaaatgagaaccattgtatcagatgttgataaaagcaattttaacttgcagatgtgagcccctgggcacaatgagccgctaaatgggagctcaattgacaggcatcaccaagtcttcaaggaggactgagttctcaggggagaactgggaatggggccagggtgcaaaaatgctttgcccatctgtaggtagacacacagatcgctcagggcactgagagatcccagaaggtaacgttaatgttttcagtcattgtgtgtcctttgttgctgccaatgtctttggactgtaatcagtgcatccacacctcccaggatccagtgctccctctcagctcagtctcccctctctccctgtcctgcattccatcccagctcctcagcatggcctcagtgggcgcacccatgcctcccgcagtccaggtgagcaggggagcaactgagcaggaagaggatggatcaacaagggtcacggggaataggggacccacggggtgtgacctgcttgctagagaactgtgaacatgtggctctggatagagtgactgctgctccatattagcttccagagggtgagtgagggacagaatatttccttcataatggtcatgggtgaatgctttctgctgtaagtgtcttttagagtaggaatcagcatagtgggatgcccagcaggcacaaaccatgggtccagggagtctcagcggggaacttctatcagtatcaataaccattggaaggagaaatgattcatgtgtgaaaaaattctcagatccatcaataaatttttttcagagccattgtatcagatgttgataaaagcaatttttttctaataagctgtcattctataattgcccatcacagtctttagtgaacacatagaaagcctatacagttttggtcctgaatagtctcttgtgactaggatgattgaggtgttaattcctcttccttataaaaaggcttggaatcaaaaatattttaaaaggccgtggtttcgtttcagacatcaaccatctaaaacgggattttaaagcgatattttacaagaatgaaaggcacaattgttgatctgtattttttacacttcagtttctaaatcatgaatcgttgccttccacaggaaccctcccttatacattacttgagtgttgtgtagtttttcttcagccaggtatttctctgcctagagaggggaagagaaatgtgttctccaggactgatcccctttgtagattttgtacctgaagagttacctggcagggcaccacccttggctaggcccaggtgtatgtttctttcttgcctggcatggaccccgaggcaggtgatgtggggcctggcgcacctccccgctttggcagctgtggcctccctggccagtgcccttgcaggaggccggccggcagcctgatgacccgcactctttagtcactgacgtcagattatttttataacgttccctgacagttcagagtcccttcgaattgcacttttctggtttcgcttatttaattaaaagagatgagtgtaagtataaaaaatgaaggtgaaataaccattggaattgtatttggttacttaatactgttccacaacatcttgggacgtctgttttcctttggagagtgaggccttgttattattcttttctgataaagaaaacattttatttcctttgggcttgcattagctctttcctagcaacccattatcccagctcagtacctttcaaacagaaaactagagtctggggttttgttgtgatctgaatttgtaagttattaatgtgaaagggggagcaggaagctccccctttgcacaaagggggatttgtttgcacaaagttcactgtaaatactgtgagaattgaattctgaaaaggtcatatttagtgatttcaaaagcacacatttaaatgaagactgactaaataaaaggtaccacaca

SEQ ID NO: 307150 - DNA, 3510 bp, Homo sapiens
ccgcagtggcgcccgagcgcgccgcctcccgattgactgctagcgctctcggcttgtctcgcgcactgtagctgagccaatggagttactcgtagtcgagaggccggcatcactggagtggtggcgcagctgtttcctccggatatccatcaaatattgagaagaaagaatatcaggagcaaagtgttctaagttgctgctcagaacgtaaagatgcgaaccccaaatcagtggtttgttcattcttcatgcaagagcaatgcactaaaggagagaagcaagctgtggtgatcagtgactttggtgaaagctaagaaggttcaaacaaatttgcaaatgatatacaacttctaagcattccatattggaagaagagatttctacacatgaaaaaaatgcctttgtttagtaaatcacacaaaaatccagcagaaattgtgaaaatcctgaaagacaatttggccattttggaaaagcaagacaaaaagacagacaaggcttcagaagaagtgtctaaatcactgcaagcaatgaaagaaattctgtgtggtacaaacgagaaagaacccccaacagaagcagtggctcagctagcacaagaactctacagcagtggcctgctggtgacactgatagctgacctgcagctgatagactttgagggaaaaaaagatgtgacccagatatttaacaacatcttgagaagacagataggcactcggagtcctactgtggagtatattagtgctcatcctcatatcctgtttatgctcctcaaaggatatgaagccccacagattgccttacgttgtgggattatgctgagagaatgtattcgacatgaaccacttgccaaaatcatcctcttttctaatcaattcagagatttctttaagtacgtggagttgtcaacatttgatattgcttcagatgcctttgctactttcaaggatttactaaccagacataaagtgttggtagcagacttcttagaacaaaattacgacactatttttgaagactatgagaaattgcttcagtctgagaattatgttactaagagacagtctttaaagctgctaggggagctgatcctggaccgtcacaactttgccatcatgacaaagtatatcagcaagccggagaacctgaaactcatgatgaacctccttcgggataaaagtcccaacatccagtttgaagcctttcatgtttttaaggtgtttgtggccagtcctcacaaaacacagcctattgtggagatcctgttaaaaaatcagcccaaactcattgagtttctgagcagcttccaaaaagaaaggacggatgatgagcagttcgctgacgagaagaactacttgattaaacagatccgagacttgaagaaaacggccccttgaagagctccccggcccctgtcacagtcagtcgtctcatttgtccagtttgtacagtgtgtcatttcagaaagtcatcattcttgggaagactttggaggtgcctattttttctgctgtaattgttctgggtagatggagtataaacatttgaatggaaaaaaattaacctagaataatatattcattttagtcaagtctgtgattatttatgtgaaatgagaaccattgtatcagatgttgataaaagcaattttaacttgcagatgtgagcccctgggcacaatgagccgctaaatgggagctcaattgacaggcatcaccaagtcttcaaggaggactgagttctcaggggagaactgggaatggggccagggtgcaaaaatgctttgcccatctgtaggtagacacacagatcgctcagggcactgagagatcccagaaggtaacgttaatgttttcagtcattgtgtgtcctttgttgctgccaatgtctttggactgtaatcagtgcatccacacctcccaggatccagtgctccctctcagctcagtctcccctctctccctgtcctgcattccatcccagctcctcagcatggcctcagtgggcgcacccatgcctcccgcagtccaggtgagcaggggagcaactgagcaggaagaggatggatcaacaagggtcacggggaataggggacccacggggtgtgacctgcttgctagagaactgtgaacatgtggctctggatagagtgactgctgctccatattagcttccagagggtgagtgagggacagaatatttccttcataatggtcatgggtgaatgctttctgctgtaagtgtcttttagagtaggaatcagcatagtgggatgcccagcaggcacaaaccatgggtccagggagtctcagcggggaacttctatcagtatcaataaccattggaaggagaaatgattcatgtgtgaaaaaattctcagatccatcaataaatttttttcagagccattgtatcagatgttgattagtgaacacatagaaagcctatacagttttggtcctgaatagtctcttgtgactaggatgattgaggtgttaattcctcttccttataaaaaggcttggaatcaaaaatattttaaaaggccgtggtttcgtttcagacatcaaccatctaaaacgggattttaaagcgatattttacaagaatgaaaggcacaattgttgatctgtattttttacacttcagtttctaaatcatgaatcgttgccttccacaggaaccctcccttatacattacttgagtgttgtgtagtttttcttcagccaggtatttctctgcctagagaggggaagagaaatgtgttctccaggactgatcccctttgtagattttgtacctgaagagttacctggcagggcaccacccttggctaggcccaggtgtatgtttctttcttgcctggcatggaccccgaggcaggtgatgtggggcctggcgcacctccccgctttggcagctgtggcctccctggccagtgcccttgcaggaggccggccggcagcctgatgacccgcactctttagtcactgacgtcagattatttttataacgttccctgacagttcagagtcccttcgaattgcacttttctggtttcgcttatttaattaaaagagatgagtgtaagtataaaaaatgaaggtgaaataaccattggaattgtatttggttacttaatactgttccacaacatcttgggacgtctgttttcctttggagagtgaggccttgttattattcttttctgataaagaaaacattttatttcctttgggcttgcattagctctttcctagcaacccattatcccagctcagtacctttcaaacagaaaactagagtctggggttttgttgtgatctgaatttgtaagttattaatgtgaaagggggagcaggaagctccccctttgcacaaagggggatttgtttgcacaaagttcactgtaaatactgtgagaattgaattctgaaaaggtcatatttagtgatttcaaaagcacacatttaaatgaagactgactaaataaaaggtaccacaca

SEQ ID NO: 307151 - DNA, 1597 bp, Homo sapiens
gttagagagggagtggagaacgcataagcaagctggtttgaccagaaacagaactgcctgtgacagattaagagacaagcaaggcttggaatctgagagcaagcaaagagagtggaaatttacagctgccctatgtgagtgttcaagtgatcattttctggtaacgttttccagtggtaactgttactcttcaaaaagagggacagaaagtcaagacctaattgtggaaactcttttctctgccacgcttggtaataggaggcaacctctattaaatggacgataaaggctacttcatctaaagtgctttgagctcaagaaagagctgtcttcagcacctcaccatgtgtctacattttgttgcttagaaaagcctaggcatttctgtaacatttgcattccatattggaagaagagatttctacacatgaaaaaaatgcctttgtttagtaaatcacacaaaaatccagcagaaattgtgaaaatcctgaaagacaatttggccattttggaaaagcaagacaaaaagacagacaaggcttcagaagaagtgtctaaatcactgcaagcaatgaaagaaattctgtgtggtacaaacgagaaagaacccccaacagaagcagtggctcagctagcacaagaactctacagcagtggcctgctggtgacactgatagctgacctgcagctgatagactttgagggaaaaaaagatgtgacccagatatttaacaacatcttgagaagacagataggcactcggagtcctactgtggagtatattagtgctcatcctcatatcctgtttatgctcctcaaaggatatgaagccccacagattgccttacgttgtgggattatgctgagagaatgtattcgacatgaaccacttgccaaaatcatcctcttttctaatcaattcagagatttctttaagtacgtggagttgtcaacatttgatattgcttcagatgcctttgctactttcaaggatttactaaccagacataaagtgttggtagcagacttcttagaacaaaattacgacactatttttgaagactatgagaaattgcttcagtctgagaattatgttactaagagacagtctttaaagctgctaggggagctgatcctggaccgtcacaactttgccatcatgacaaagtatatcagcaagccggagaacctgaaactcatgatgaacctccttcgggataaaagtcccaacatccagtttgaagcctttcatgtttttaaggtgtttgtggccagtcctcacaaaacacagcctattgtggagatcctgttaaaaaatcagcccaaactcattgagtttctgagcagcttccaaaaagaaaggacggatgatgagcagttcgctgacgagaagaactacttgattaaacagatccgagacttgaagaaaacggccccttgaagagctccccggcccctgtcacagtcagtcgtctcatttgtccagtttgtacagtgtgtcatttcagaaagtcatcattcttgggaagactttggaggtgcctattttttctgctgtaattgttctgggtagatggagtataaacatttgaatgga

SEQ ID NO: 307152 - DNA, 845 bp, Homo sapiens
gaacagtctgattctttatggcttgccaagtgaagccttaagtgtatttaatattttcccaaattgtggacccatagccaccagcaaggctacttacataaagatttctttaaaatggcataaaatgagttctcttgcaacttttactagaagttttattcaaaatgatttattggaaggactcaaaattactcagtttttatctaatttgcagaactaaaataaaatagggaaggatgtctcttgtaattcttgacctccctgtcccccagtgtcttcacatgtaaagaaggatggtaaaatggccagaagttgggaatttgctcctgaaaaagaaagcaagccagcctaatacggagaatccactgctgcttttacactctaatgtgtattttcttttcattagatttttgaagactatgagaaattgcttcagtctgagaattatgttactaagagacagtctttaaaggtaatatcaaatttctttaagtcagtgtccccgtaagtttatatctcattagcaaatgacgggtctattagtatatgagtaaacacagaaaaattaaaatatcctttttttaaataacttgagaagtatttactatattttatgttatgactgtattttatagcaaaataatgtaagtgtcctgtcctgcttttggaagtaacaatataagtacatgataagtaaaatttagaatatttctgctgaggccaggcatcttggcttacgcctgtaatcccagcactttgggaggccgaagtgggcggatcacctgaggtcaggagttcgagaccagcctggccaacatggcaaaaccccatctctactaaaaata

SEQ ID NO: 307153 - DNA, 192 bp, Homo sapiens
atatgaagccccacagattgccttacgttgtgggattatgctgagagaatgtattcgacatgaaccacttgccaaaatcatcctcttttctaatcaattcagagatttctttaagtacgtggagttgtcaacatttgatattgcttcagatgcctttgctactttcaaggtaattttttttttccaactcag

SEQ ID NO: 307154 - DNA, 4397 bp, Homo sapiens
tgtttctgtgcagtattttgaggtctttttcaacctattgtatttaatctgttattccttataacactgacaatcggtatgattgatccggattttgcagataagcctaaattaccagaaaactacacagatgaaacctggcaaaaactgaaagaagcagtggaagctattcagaatagtacttcaattaagtacaatttagaagaactctaccaggctgtagaaaatctctgttcttacaagatttctgcaaacttgtacaaacagctgagacagatctgcgaagatcacatcaaagcacagattcatcaattcagagaggattcattggatagcgttctttttttaaagaagattgatagatgctggcaaaaccattgcagacaaatgatcatgatcaggagcatttttttgtttctggatagaacttacgttcttcagaattcaatgctaccctccatttgggacatgggactggagttatttagggctcatattataagtgatcagaaagtgcagaataagacaattgatggcattcttctcttgattgagagggaaaggaatggtgaagcaattgatagaagtttacttcgaagccttttaagcatgctgtctgatttgcaaatttatcaagattcttttgaacaacgatttttggaagaaactaaccggctctatgcagctgaaggccaaaaattaatgcaagaaagagaggttcctgaatatctacatcatgttaacaaacgtctagaagaagaagcagacagacttattacttacttagatcagaccacccagaagtcattaattgctactgtagaaaaacaacttctaggtgaacacttaacagcaattcttcagaaaggtttaaataacctccttgatgaaaaccgaattcaagatttgtctcttctgtatcagctcttcagtagagttcgaggtggagttcaggttcttttgcagcagtggatcgaatatatcaaggcatttggcagcactattgtaattaatcctgaaaaagataaaaccatggttcaagaattgctggattttaaagataaggttgaccatataattgatatctgctttctgaagaatgagaaatttatcaatgccatgaaagaagcatttgaaacgttcattaacaaaagaccaaataaaccagctgaacttatagctaagtatgtagattcaaaacttcgtgcaggcaacaaagaagctacagatgaagaacttgagaaaatgttggataaaattatgatcatatttagatttatctatggcaaggatgtttttgaggccttctataagaaagatttagccaagcgcctgttagtcggaaagagtgcatctgtagatgctgaaaaatcaatgctgtccaaacttaaacatgaatgcggagctgctttcaccagcaaacttgaaggaatgtttaaagacatggaactttctaaagacatcatgattcagttcaaacagtatatgcagaatcagaatgttccgggaaatattgagttaactgtgaatatcctgacaatgggctattggccgacatatgtgcctatggaagttcatttaccaccagagatggtaaaacttcaggagattttcaagacattttacctaggcaaacatagtggcaggaaacttcagtggcagtcaaccctaggacactgtgtgttaaaagcagaatttaaagagggtaaaaaggaactccaggtctctctttttcaaacactggtgctgctaatgtttaatgagggagaggagttcagtttagaagagatcaagcaggcaactggaatagaggatggagagttaaggagaacactgcagtcattagcctgtggcaaagctagagttctggcgaaaaatccaaagggcaaagacattgaagatggtgacaagttcatttgtaatgatgatttcaaacataaacttttcaggataaagatcaatcaaatccagatgaaagaaacggttgaagaacaagcaagcactacagaaagagtatttcaagacagacagtatcaaattgatgctgcaattgttcgaattatgaagatgagaaagacacttagccacaatctccttgtttcagaagtgtacaaccagttgaaatttccagtaaagcctgctgatcttaagaagagaatagaatctttaattgaccgggactacatggaaagagataaagaaaatccaaaccagtacaactatattgcatagaatgttggccttgcagcatttggtgtcatatgcagtagccagtggataaactaacctgttgattcaatattatttgactccttttttactaccgatgaccaaatgaagcagtgtaattaatggaaatagttgagtggactttttctcagtggttaacatgcccattttaaagagtaatacttacctttaagaagaatgttgttgaactctttgcatgttatttagtatgatgtgcagaaaacacttaagaacgtacctggtcttcatgaattcctctttggaactgggaaagagatccctgtggctattaaaaaggggggagggttcttacacaccattaattatgaagcaaaaggtttatttgcttaaaatgtcatttaaagatacttaaactgcatgcaaactttatttactgtacagagttctggatgtatttatcaaatagaaaaaccacccttgacttggttgttcacccgttttgtgatttcccttgaaaagagaaatgaattgtcatagctattgatattttactaggtgatgttctgttacactgaaagggatgttttttaaaaaaaattatttggaaacaagttttcaagtagggggacagttgcttacataatatcttgtatattcacatcctaaaaattttcatttatgagtatgggatgtgtgtatatggcttagccccaagttaactgtgctgattaacaagtacttataaaaatagctaaagtagaaaattaatgatcagttgtactagaggaacatcatagaagagaaaaatccaactctttatattaaaaatgaatacaataagaaaattgcaaaagagaccaaaatgaacgtgttttgtaaattgttacaggagcaaaaactttgcaactagttttcaacatactttagactttaaatgttgtttggacagttttgtcttcaacttggaccaattgtagattgttacaggcttcctaggatttagcattcctattttctctaccaaagttttttttagaagcatcccaactcttctctttgttgataaataagcctttcctgtcatcttcattttaacttgctaaaaccctagatacaaaggtcctccctcatttttcccacagagcccctgtttgggaatttgagattctgtgtcatgctggttttcctttcagaattgcttgaaatcgagttctcttagccactggacacctagttttcaggagaatgtcccaagattgtttatatatacaaaatggcaaaagtactgtttttcgaattgataattcaagcaaaggcttctctttactgtcactgatttttttttgtttttattttgtttccttgtttctatttccttgaagctttgaagggaggagaagcagaaaattttggtttatgtttgttaaaaatcagaactacttaatgctttttgccacagcatatttccttgcctgttggagccgttaggaagattacctatgtcctaatcttcaacctgagaagatttttgactcttgtgtctactgttgattgtttgcttgagttctcaaagacctgtggccaggtattttaaaaagtcgtctatttctttctagttgcatcaacttgcacactggtgtctaactatatgtggtattcggaacttgtaattcttattgagcagccattgcctatattttctcagctcctcactgatttctttatatgagctcagctgacaagcaaatgcagctattttgtttaccctctcttcataccggaccatcaacaacagtgttctaactcatccctgatggtctgtgagatgtagactattacacaagattcaagttactcgtaagcaacttttagatagagttggtcctgttaggaggagactcttgatgtcaccttcagtatcttgaaagcgggtcccctccccgaggctcttaattctttgaaaacttgatgctgtttcagctgaaaaattagcaagactgttaaaaaaaaaaagttgaggggagctgtttaagaaactgaaaagtaattgcaaactacattggataattgtgactttcagttgttgttctgtatcagttgaatttttgtgctcttttccctgtgtacgtggtggttctatttttctccaataaaacttttatttaccaaaagtttctagagaagat

SEQ ID NO: 307155 - DNA, 5142 bp, Homo sapiens
gagagatcgaaaagcaggggagggggacggcacggccgtttacctgtctgcctcctcattcgctctcccccctcgttctgctcactcctggtgtcagcctatccgccttcccaaaccctcccattcccccggtgtagccccccccttcactttccttctcgtcctctgtgtttctcctctcttctttcttcccttccccctctagcattgctaccttctctcctacacgcacgcaggcatataaacgtaggtttttgatgctcctctgcctgttgaccccgctattttcatgtttccaacaggtttttcttcccccagtccctcagctgctgctgctgctcaggaggtcagatctgccactgatggtaataccagcaccactccgcccacctctgccaagaagagaaagttaaacagcagcagcagtagcagcagtaacagtagtaacgagagagaagactttgattccacctcttcctcctcttccactcctcctttacaacccagggattcggcatccccttcaacctcgtccttctgcctgggggtttcagtggctgcttccagccacgtaccgatacagaagaagctgcgttttgaagacaccctggagtttgtagggtttgatgcgaagatggctgaggaatcctcctcctcctcctcctcatcttcaccaactgctgcaacatctcagcagcagcaacttaaaaataagagtatattaatctcttctgtggcttcggtgcatcatgcaaacggcctagccaaatcttctaccaccgtctctagctttgctaacagcaaacctggctctgctaagaagttagtgatcaagaactttaaagataagcctaaattaccagaaaactacacagatgaaacctggcaaaaactgaaagaagcagtggaagctattcagaatagtacttcaattaagtacaatttagaagaactctaccaggctgtagaaaatctctgttcttacaagatttctgcaaacttgtacaaacagctgagacagatctgcgaagatcacatcaaagcacagattcatcaattcagagaggattcattggatagcgttctttttttaaagaagattgatagatgctggcaaaaccattgcagacaaatgatcatgatcaggagcatttttttgtttctggatagaacttacgttcttcagaattcaatgctaccctccatttgggacatgggactggagttatttagggctcatattataagtgatcagaaagtgcagaataagacaattgatggcattcttctcttgattgagagggaaaggaatggtgaagcaattgatagaagtttacttcgaagccttttaagcatgctgtctgatttgcaaatttatcaagattcttttgaacaacgatttttggaagaaactaaccggctctatgcagctgaaggccaaaaattaatgcaagaaagagaggttcctgaatatctacatcatgttaacaaacgtctagaagaagaagcagacagacttattacttacttagatcagaccacccagaagtcattaattgctactgtagaaaaacaacttctaggtgaacacttaacagcaattcttcagaaaggtttaaataacctccttgatgaaaaccgaattcaagatttgtctcttctgtatcagctcttcagtagagttcgaggtggagttcaggttcttttgcagcagtggatcgaatatatcaaggcatttggcagcactattgtaattaatcctgaaaaagataaaaccatggttcaagaattgctggattttaaagataaggttgaccatataattgatatctgctttctgaagaatgagaaatttatcaatgccatgaaagaagcatttgaaacgttcattaacaaaagaccaaataaaccagctgaacttatagctaagtatgtagattcaaaacttcgtgcaggcaacaaagaagctacagatgaagaacttgagaaaatgttggataaaattatgatcatatttagatttatctatggcaaggatgtttttgaggccttctataagaaagatttagccaagcgcctgttagtcggaaagagtgcatctgtagatgctgaaaaatcaatgctgtccaaacttaaacatgaatgcggagctgctttcaccagcaaacttgaaggaatgtttaaagacatggaactttctaaagacatcatgattcagttcaaacagtatatgcagaatcagaatgttccgggaaatattgagttaactgtgaatatcctgacaatgggctattggccgacatatgtgcctatggaagttcatttaccaccagagatggtaaaacttcaggagattttcaagacattttacctaggcaaacatagtggcaggaaacttcagtggcagtcaaccctaggacactgtgtgttaaaagcagaatttaaagagggtaaaaaggaactccaggtctctctttttcaaacactggtgctgctaatgtttaatgagggagaggagttcagtttagaagagatcaagcaggcaactggaatagaggatggagagttaaggagaacactgcagtcattagcctgtggcaaagctagagttctggcgaaaaatccaaagggcaaagacattgaagatggtgacaagttcatttgtaatgatgatttcaaacataaacttttcaggataaagatcaatcaaatccagatgaaagaaacggttgaagaacaagcaagcactacagaaagagtatttcaagacagacagtatcaaattgatgctgcaattgttcgaattatgaagatgagaaagacacttagccacaatctccttgtttcagaagtgtacaaccagttgaaatttccagtaaagcctgctgatcttaagaagagaatagaatctttaattgaccgggactacatggaaagagataaagaaaatccaaaccagtacaactatattgcatagaatgttggccttgcagcatttggtgtcatatgcagtagccagtggataaactaacctgttgattcaatattatttgactccttttttactaccgatgaccaaatgaagcagtgtaattaatggaaatagttgagtggactttttctcagtggttaacatgcccattttaaagagtaatacttacctttaagaagaatgttgttgaactctttgcatgttatttagtatgatgtgcagaaaacacttaagaacgtacctggtcttcatgaattcctctttggaactgggaaagagatccctgtggctattaaaaaggggggagggttcttacacaccattaattatgaagcaaaaggtttatttgcttaaaatgtcatttaaagatacttaaactgcatgcaaactttatttactgtacagagttctggatgtatttatcaaatagaaaaaccacccttgacttggttgttcacccgttttgtgatttcccttgaaaagagaaatgaattgtcatagctattgatattttactaggtgatgttctgttacactgaaagggatgttttttaaaaaaaattatttggaaacaagttttcaagtagggggacagttgcttacataatatcttgtatattcacatcctaaaaattttcatttatgagtatgggatgtgtgtatatggcttagccccaagttaactgtgctgattaacaagtacttataaaaatagctaaagtagaaaattaatgatcagttgtactagaggaacatcatagaagagaaaaatccaactctttatattaaaaatgaatacaataagaaaattgcaaaagagaccaaaatgaacgtgttttgtaaattgttacaggagcaaaaactttgcaactagttttcaacatactttagactttaaatgttgtttggacagttttgtcttcaacttggaccaattgtagattgttacaggcttcctaggatttagcattcctattttctctaccaaagttttttttagaagcatcccaactcttctctttgttgataaataagcctttcctgtcatcttcattttaacttgctaaaaccctagatacaaaggtcctccctcatttttcccacagagcccctgtttgggaatttgagattctgtgtcatgctggttttcctttcagaattgcttgaaatcgagttctcttagccactggacacctagttttcaggagaatgtcccaagattgtttatatatacaaaatggcaaaagtactgtttttcgaattgataattcaagcaaaggcttctctttactgtcactgatttttttttgtttttattttgtttccttgtttctatttccttgaagctttgaagggaggagaagcagaaaattttggtttatgtttgttaaaaatcagaactacttaatgctttttgccacagcatatttccttgcctgttggagccgttaggaagattacctatgtcctaatcttcaacctgagaagatttttgactcttgtgtctactgttgattgtttgcttgagttctcaaagacctgtggccaggtattttaaaaagtcgtctatttctttctagttgcatcaacttgcacactggtgtctaactatatgtggtattcggaacttgtaattcttattgagcagccattgcctatattttctcagctcctcactgatttctttatatgagctcagctgacaagcaaatgcagctattttgtttaccctctcttcataccggaccatcaacaacagtgttctaactcatccctgatggtctgtgagatgtagactattacacaagattcaagttactcgtaagcaacttttagatagagttggtcctgttaggaggagactcttgatgtcaccttcagtatcttgaaagcgggtcccctccccgaggctcttaattctttgaaaacttgatgctgtttcagctgaaaaattagcaagactgttaaaaaaaaaaagttgaggggagctgtttaagaaactgaaaagtaattgcaaactacattggataattgtgactttcagttgttgttctgtatcagttgaatttttgtgctcttttccctgtgtacgtggtggttctatttttctccaataaaacttttatttaccaaaagtttctagagaagat

SEQ ID NO: 307156 - DNA, 4915 bp, Homo sapiens
cccccactcaagtcctgcggacctgggggcttcgggatctgggcgctatgaaaagtgtctgcccagtcacttccggtttttcttcccccagtccctcagctgctgctgctgctcaggaggtcagatctgccactgatggtaataccagcaccactccgcccacctctgccaagaagagaaagttaaacagcagcagcagtagcagcagtaacagtagtaacgagagagaagactttgattccacctcttcctcctcttccactcctcctttacaacccagggattcggcatccccttcaacctcgtccttctgcctgggggtttcagtggctgcttccagccacgtaccgatacagaagaagctgcgttttgaagacaccctggagtttgtagggtttgatgcgaagatggctgaggaatcctcctcctcctcctcctcatcttcaccaactgctgcaacatctcagcagcagcaacttaaaaataagagtatattaatctcttctgtggcttcggtgcatcatgcaaacggcctagccaaatcttctaccaccgtctctagctttgctaacagcaaacctggctctgctaagaagttagtgatcaagaactttaaagataagcctaaattaccagaaaactacacagatgaaacctggcaaaaactgaaagaagcagtggaagctattcagaatagtacttcaattaagtacaatttagaagaactctaccaggctgtagaaaatctctgttcttacaagatttctgcaaacttgtacaaacagctgagacagatctgcgaagatcacatcaaagcacagattcatcaattcagagaggattcattggatagcgttctttttttaaagaagattgatagatgctggcaaaaccattgcagacaaatgatcatgatcaggagcatttttttgtttctggatagaacttacgttcttcagaattcaatgctaccctccatttgggacatgggactggagttatttagggctcatattataagtgatcagaaagtgcagaataagacaattgatggcattcttctcttgattgagagggaaaggaatggtgaagcaattgatagaagtttacttcgaagccttttaagcatgctgtctgatttgcaaatttatcaagattcttttgaacaacgatttttggaagaaactaaccggctctatgcagctgaaggccaaaaattaatgcaagaaagagaggttcctgaatatctacatcatgttaacaaacgtctagaagaagaagcagacagacttattacttacttagatcagaccacccagaagtcattaattgctactgtagaaaaacaacttctaggtgaacacttaacagcaattcttcagaaaggtttaaataacctccttgatgaaaaccgaattcaagatttgtctcttctgtatcagctcttcagtagagttcgaggtggagttcaggttcttttgcagcagtggatcgaatatatcaaggcatttggcagcactattgtaattaatcctgaaaaagataaaaccatggttcaagaattgctggattttaaagataaggttgaccatataattgatatctgctttctgaagaatgagaaatttatcaatgccatgaaagaagcatttgaaacgttcattaacaaaagaccaaataaaccagctgaacttatagctaagtatgtagattcaaaacttcgtgcaggcaacaaagaagctacagatgaagaacttgagaaaatgttggataaaattatgatcatatttagatttatctatggcaaggatgtttttgaggccttctataagaaagatttagccaagcgcctgttagtcggaaagagtgcatctgtagatgctgaaaaatcaatgctgtccaaacttaaacatgaatgcggagctgctttcaccagcaaacttgaaggaatgtttaaagacatggaactttctaaagacatcatgattcagttcaaacagtatatgcagaatcagaatgttccgggaaatattgagttaactgtgaatatcctgacaatgggctattggccgacatatgtgcctatggaagttcatttaccaccagagatggtaaaacttcaggagattttcaagacattttacctaggcaaacatagtggcaggaaacttcagtggcagtcaaccctaggacactgtgtgttaaaagcagaatttaaagagggtaaaaaggaactccaggtctctctttttcaaacactggtgctgctaatgtttaatgagggagaggagttcagtttagaagagatcaagcaggcaactggaatagaggatggagagttaaggagaacactgcagtcattagcctgtggcaaagctagagttctggcgaaaaatccaaagggcaaagacattgaagatggtgacaagttcatttgtaatgatgatttcaaacataaacttttcaggataaagatcaatcaaatccagatgaaagaaacggttgaagaacaagcaagcactacagaaagagtatttcaagacagacagtatcaaattgatgctgcaattgttcgaattatgaagatgagaaagacacttagccacaatctccttgtttcagaagtgtacaaccagttgaaatttccagtaaagcctgctgatcttaagaagagaatagaatctttaattgaccgggactacatggaaagagataaagaaaatccaaaccagtacaactatattgcatagaatgttggccttgcagcatttggtgtcatatgcagtagccagtggataaactaacctgttgattcaatattatttgactccttttttactaccgatgaccaaatgaagcagtgtaattaatggaaatagttgagtggactttttctcagtggttaacatgcccattttaaagagtaatacttacctttaagaagaatgttgttgaactctttgcatgttatttagtatgatgtgcagaaaacacttaagaacgtacctggtcttcatgaattcctctttggaactgggaaagagatccctgtggctattaaaaaggggggagggttcttacacaccattaattatgaagcaaaaggtttatttgcttaaaatgtcatttaaagatacttaaactgcatgcaaactttatttactgtacagagttctggatgtatttatcaaatagaaaaaccacccttgacttggttgttcacccgttttgtgatttcccttgaaaagagaaatgaattgtcatagctattgatattttactaggtgatgttctgttacactgaaagggatgttttttaaaaaaaattatttggaaacaagttttcaagtagggggacagttgcttacataatatcttgtatattcacatcctaaaaattttcatttatgagtatgggatgtgtgtatatggcttagccccaagttaactgtgctgattaacaagtacttataaaaatagctaaagtagaaaattaatgatcagttgtactagaggaacatcatagaagagaaaaatccaactctttatattaaaaatgaatacaataagaaaattgcaaaagagaccaaaatgaacgtgttttgtaaattgttacaggagcaaaaactttgcaactagttttcaacatactttagactttaaatgttgtttggacagttttgtcttcaacttggaccaattgtagattgttacaggcttcctaggatttagcattcctattttctctaccaaagttttttttagaagcatcccaactcttctctttgttgataaataagcctttcctgtcatcttcattttaacttgctaaaaccctagatacaaaggtcctccctcatttttcccacagagcccctgtttgggaatttgagattctgtgtcatgctggttttcctttcagaattgcttgaaatcgagttctcttagccactggacacctagttttcaggagaatgtcccaagattgtttatatatacaaaatggcaaaagtactgtttttcgaattgataattcaagcaaaggcttctctttactgtcactgatttttttttgtttttattttgtttccttgtttctatttccttgaagctttgaagggaggagaagcagaaaattttggtttatgtttgttaaaaatcagaactacttaatgctttttgccacagcatatttccttgcctgttggagccgttaggaagattacctatgtcctaatcttcaacctgagaagatttttgactcttgtgtctactgttgattgtttgcttgagttctcaaagacctgtggccaggtattttaaaaagtcgtctatttctttctagttgcatcaacttgcacactggtgtctaactatatgtggtattcggaacttgtaattcttattgagcagccattgcctatattttctcagctcctcactgatttctttatatgagctcagctgacaagcaaatgcagctattttgtttaccctctcttcataccggaccatcaacaacagtgttctaactcatccctgatggtctgtgagatgtagactattacacaagattcaagttactcgtaagcaacttttagatagagttggtcctgttaggaggagactcttgatgtcaccttcagtatcttgaaagcgggtcccctccccgaggctcttaattctttgaaaacttgatgctgtttcagctgaaaaattagcaagactgttaaaaaaaaaaagttgaggggagctgtttaagaaactgaaaagtaattgcaaactacattggataattgtgactttcagttgttgttctgtatcagttgaatttttgtgctcttttccctgtgtacgtggtggttctatttttctccaataaaacttttatttaccaaaagtttctagagaagat

SEQ ID NO: 307157 - DNA, 5312 bp, Homo sapiens
agcagttcagtttagaaactgccagtcttggtatagaacaacctaggcttatctgtttaagtcccataggtagtattattagagaataacccaggctttgggaactgtataactctgagatcgtttgaaattttcgttttgtttttcttttggctccaaccaggcctctgttgttagactaatggggtttcccctgcagagattggtcagccctgcagtctatcatcccggaaggtgttaaatacacatgaaagccagcctcggcgggcagaacctagcccgccgaaagggcgggcattgctaaagtgttttcaaaaggtcttcccaatcctctgctttagacagctcggaccttagatagaagaacacaacggatcctccagtgactgacgacccaaaggacggatgatgtcacagtcatctggatcaggagatgggaatgatgatgaggctactacctctaaagacggtggtttttcttcccccagtccctcagctgctgctgctgctcaggaggtcagatctgccactgatggtaataccagcaccactccgcccacctctgccaagaagagaaagttaaacagcagcagcagtagcagcagtaacagtagtaacgagagagaagactttgattccacctcttcctcctcttccactcctcctttacaacccagggattcggcatccccttcaacctcgtccttctgcctgggggtttcagtggctgcttccagccacgtaccgatacagaagaagctgcgttttgaagacaccctggagtttgtagggtttgatgcgaagatggctgaggaatcctcctcctcctcctcctcatcttcaccaactgctgcaacatctcagcagcagcaacttaaaaataagagtatattaatctcttctgtggcttcggtgcatcatgcaaacggcctagccaaatcttctaccaccgtctctagctttgctaacagcaaacctggctctgctaagaagttagtgatcaagaactttaaagataagcctaaattaccagaaaactacacagatgaaacctggcaaaaactgaaagaagcagtggaagctattcagaatagtacttcaattaagtacaatttagaagaactctaccaggctgtagaaaatctctgttcttacaagatttctgcaaacttgtacaaacagctgagacagatctgcgaagatcacatcaaagcacagattcatcaattcagagaggattcattggatagcgttctttttttaaagaagattgatagatgctggcaaaaccattgcagacaaatgatcatgatcaggagcatttttttgtttctggatagaacttacgttcttcagaattcaatgctaccctccatttgggacatgggactggagttatttagggctcatattataagtgatcagaaagtgcagaataagacaattgatggcattcttctcttgattgagagggaaaggaatggtgaagcaattgatagaagtttacttcgaagccttttaagcatgctgtctgatttgcaaatttatcaagattcttttgaacaacgatttttggaagaaactaaccggctctatgcagctgaaggccaaaaattaatgcaagaaagagaggttcctgaatatctacatcatgttaacaaacgtctagaagaagaagcagacagacttattacttacttagatcagaccacccagaagtcattaattgctactgtagaaaaacaacttctaggtgaacacttaacagcaattcttcagaaaggtttaaataacctccttgatgaaaaccgaattcaagatttgtctcttctgtatcagctcttcagtagagttcgaggtggagttcaggttcttttgcagcagtggatcgaatatatcaaggcatttggcagcactattgtaattaatcctgaaaaagataaaaccatggttcaagaattgctggattttaaagataaggttgaccatataattgatatctgctttctgaagaatgagaaatttatcaatgccatgaaagaagcatttgaaacgttcattaacaaaagaccaaataaaccagctgaacttatagctaagtatgtagattcaaaacttcgtgcaggcaacaaagaagctacagatgaagaacttgagaaaatgttggataaaattatgatcatatttagatttatctatggcaaggatgtttttgaggccttctataagaaagatttagccaagcgcctgttagtcggaaagagtgcatctgtagatgctgaaaaatcaatgctgtccaaacttaaacatgaatgcggagctgctttcaccagcaaacttgaaggaatgtttaaagacatggaactttctaaagacatcatgattcagttcaaacagtatatgcagaatcagaatgttccgggaaatattgagttaactgtgaatatcctgacaatgggctattggccgacatatgtgcctatggaagttcatttaccaccagagatggtaaaacttcaggagattttcaagacattttacctaggcaaacatagtggcaggaaacttcagtggcagtcaaccctaggacactgtgtgttaaaagcagaatttaaagagggtaaaaaggaactccaggtctctctttttcaaacactggtgctgctaatgtttaatgagggagaggagttcagtttagaagagatcaagcaggcaactggaatagaggatggagagttaaggagaacactgcagtcattagcctgtggcaaagctagagttctggcgaaaaatccaaagggcaaagacattgaagatggtgacaagttcatttgtaatgatgatttcaaacataaacttttcaggataaagatcaatcaaatccagatgaaagaaacggttgaagaacaagcaagcactacagaaagagtatttcaagacagacagtatcaaattgatgctgcaattgttcgaattatgaagatgagaaagacacttagccacaatctccttgtttcagaagtgtacaaccagttgaaatttccagtaaagcctgctgatcttaagaagagaatagaatctttaattgaccgggactacatggaaagagataaagaaaatccaaaccagtacaactatattgcatagaatgttggccttgcagcatttggtgtcatatgcagtagccagtggataaactaacctgttgattcaatattatttgactccttttttactaccgatgaccaaatgaagcagtgtaattaatggaaatagttgagtggactttttctcagtggttaacatgcccattttaaagagtaatacttacctttaagaagaatgttgttgaactctttgcatgttatttagtatgatgtgcagaaaacacttaagaacgtacctggtcttcatgaattcctctttggaactgggaaagagatccctgtggctattaaaaaggggggagggttcttacacaccattaattatgaagcaaaaggtttatttgcttaaaatgtcatttaaagatacttaaactgcatgcaaactttatttactgtacagagttctggatgtatttatcaaatagaaaaaccacccttgacttggttgttcacccgttttgtgatttcccttgaaaagagaaatgaattgtcatagctattgatattttactaggtgatgttctgttacactgaaagggatgttttttaaaaaaaattatttggaaacaagttttcaagtagggggacagttgcttacataatatcttgtatattcacatcctaaaaattttcatttatgagtatgggatgtgtgtatatggcttagccccaagttaactgtgctgattaacaagtacttataaaaatagctaaagtagaaaattaatgatcagttgtactagaggaacatcatagaagagaaaaatccaactctttatattaaaaatgaatacaataagaaaattgcaaaagagaccaaaatgaacgtgttttgtaaattgttacaggagcaaaaactttgcaactagttttcaacatactttagactttaaatgttgtttggacagttttgtcttcaacttggaccaattgtagattgttacaggcttcctaggatttagcattcctattttctctaccaaagttttttttagaagcatcccaactcttctctttgttgataaataagcctttcctgtcatcttcattttaacttgctaaaaccctagatacaaaggtcctccctcatttttcccacagagcccctgtttgggaatttgagattctgtgtcatgctggttttcctttcagaattgcttgaaatcgagttctcttagccactggacacctagttttcaggagaatgtcccaagattgtttatatatacaaaatggcaaaagtactgtttttcgaattgataattcaagcaaaggcttctctttactgtcactgatttttttttgtttttattttgtttccttgtttctatttccttgaagctttgaagggaggagaagcagaaaattttggtttatgtttgttaaaaatcagaactacttaatgctttttgccacagcatatttccttgcctgttggagccgttaggaagattacctatgtcctaatcttcaacctgagaagatttttgactcttgtgtctactgttgattgtttgcttgagttctcaaagacctgtggccaggtattttaaaaagtcgtctatttctttctagttgcatcaacttgcacactggtgtctaactatatgtggtattcggaacttgtaattcttattgagcagccattgcctatattttctcagctcctcactgatttctttatatgagctcagctgacaagcaaatgcagctattttgtttaccctctcttcataccggaccatcaacaacagtgttctaactcatccctgatggtctgtgagatgtagactattacacaagattcaagttactcgtaagcaacttttagatagagttggtcctgttaggaggagactcttgatgtcaccttcagtatcttgaaagcgggtcccctccccgaggctcttaattctttgaaaacttgatgctgtttcagctgaaaaattagcaagactgttaaaaaaaaaaagttgaggggagctgtttaagaaactgaaaagtaattgcaaactacattggataattgtgactttcagttgttgttctgtatcagttgaatttttgtgctcttttccctgtgtacgtggtggttctatttttctccaataaaacttttatttaccaaaagtttctagagaagat

SEQ ID NO: 307158 - DNA, 5225 bp, Homo sapiens
agtggtagctccaagtggtaggcatgagacctggcccagagatacaagatctcccttggaattttccaaatcaaaggcctctgttgttagactaatggggtttcccctgcagagattggtcagccctgcagtctatcatcccggaaggtgttaaatacacatgaaagccagcctcggcgggcagaacctagcccgccgaaagggcgggcattgctaaagtgttttcaaaaggtcttcccaatcctctgctttagacagctcggaccttagatagaagaacacaacggatcctccagtgactgacgacccaaaggacggatgatgtcacagtcatctggatcaggagatgggaatgatgatgaggctactacctctaaagacggtggtttttcttcccccagtccctcagctgctgctgctgctcaggaggtcagatctgccactgatggtaataccagcaccactccgcccacctctgccaagaagagaaagttaaacagcagcagcagtagcagcagtaacagtagtaacgagagagaagactttgattccacctcttcctcctcttccactcctcctttacaacccagggattcggcatccccttcaacctcgtccttctgcctgggggtttcagtggctgcttccagccacgtaccgatacagaagaagctgcgttttgaagacaccctggagtttgtagggtttgatgcgaagatggctgaggaatcctcctcctcctcctcctcatcttcaccaactgctgcaacatctcagcagcagcaacttaaaaataagagtatattaatctcttctgtggcttcggtgcatcatgcaaacggcctagccaaatcttctaccaccgtctctagctttgctaacagcaaacctggctctgctaagaagttagtgatcaagaactttaaagataagcctaaattaccagaaaactacacagatgaaacctggcaaaaactgaaagaagcagtggaagctattcagaatagtacttcaattaagtacaatttagaagaactctaccaggctgtagaaaatctctgttcttacaagatttctgcaaacttgtacaaacagctgagacagatctgcgaagatcacatcaaagcacagattcatcaattcagagaggattcattggatagcgttctttttttaaagaagattgatagatgctggcaaaaccattgcagacaaatgatcatgatcaggagcatttttttgtttctggatagaacttacgttcttcagaattcaatgctaccctccatttgggacatgggactggagttatttagggctcatattataagtgatcagaaagtgcagaataagacaattgatggcattcttctcttgattgagagggaaaggaatggtgaagcaattgatagaagtttacttcgaagccttttaagcatgctgtctgatttgcaaatttatcaagattcttttgaacaacgatttttggaagaaactaaccggctctatgcagctgaaggccaaaaattaatgcaagaaagagaggttcctgaatatctacatcatgttaacaaacgtctagaagaagaagcagacagacttattacttacttagatcagaccacccagaagtcattaattgctactgtagaaaaacaacttctaggtgaacacttaacagcaattcttcagaaaggtttaaataacctccttgatgaaaaccgaattcaagatttgtctcttctgtatcagctcttcagtagagttcgaggtggagttcaggttcttttgcagcagtggatcgaatatatcaaggcatttggcagcactattgtaattaatcctgaaaaagataaaaccatggttcaagaattgctggattttaaagataaggttgaccatataattgatatctgctttctgaagaatgagaaatttatcaatgccatgaaagaagcatttgaaacgttcattaacaaaagaccaaataaaccagctgaacttatagctaagtatgtagattcaaaacttcgtgcaggcaacaaagaagctacagatgaagaacttgagaaaatgttggataaaattatgatcatatttagatttatctatggcaaggatgtttttgaggccttctataagaaagatttagccaagcgcctgttagtcggaaagagtgcatctgtagatgctgaaaaatcaatgctgtccaaacttaaacatgaatgcggagctgctttcaccagcaaacttgaaggaatgtttaaagacatggaactttctaaagacatcatgattcagttcaaacagtatatgcagaatcagaatgttccgggaaatattgagttaactgtgaatatcctgacaatgggctattggccgacatatgtgcctatggaagttcatttaccaccagagatggtaaaacttcaggagattttcaagacattttacctaggcaaacatagtggcaggaaacttcagtggcagtcaaccctaggacactgtgtgttaaaagcagaatttaaagagggtaaaaaggaactccaggtctctctttttcaaacactggtgctgctaatgtttaatgagggagaggagttcagtttagaagagatcaagcaggcaactggaatagaggatggagagttaaggagaacactgcagtcattagcctgtggcaaagctagagttctggcgaaaaatccaaagggcaaagacattgaagatggtgacaagttcatttgtaatgatgatttcaaacataaacttttcaggataaagatcaatcaaatccagatgaaagaaacggttgaagaacaagcaagcactacagaaagagtatttcaagacagacagtatcaaattgatgctgcaattgttcgaattatgaagatgagaaagacacttagccacaatctccttgtttcagaagtgtacaaccagttgaaatttccagtaaagcctgctgatcttaagaagagaatagaatctttaattgaccgggactacatggaaagagataaagaaaatccaaaccagtacaactatattgcatagaatgttggccttgcagcatttggtgtcatatgcagtagccagtggataaactaacctgttgattcaatattatttgactccttttttactaccgatgaccaaatgaagcagtgtaattaatggaaatagttgagtggactttttctcagtggttaacatgcccattttaaagagtaatacttacctttaagaagaatgttgttgaactctttgcatgttatttagtatgatgtgcagaaaacacttaagaacgtacctggtcttcatgaattcctctttggaactgggaaagagatccctgtggctattaaaaaggggggagggttcttacacaccattaattatgaagcaaaaggtttatttgcttaaaatgtcatttaaagatacttaaactgcatgcaaactttatttactgtacagagttctggatgtatttatcaaatagaaaaaccacccttgacttggttgttcacccgttttgtgatttcccttgaaaagagaaatgaattgtcatagctattgatattttactaggtgatgttctgttacactgaaagggatgttttttaaaaaaaattatttggaaacaagttttcaagtagggggacagttgcttacataatatcttgtatattcacatcctaaaaattttcatttatgagtatgggatgtgtgtatatggcttagccccaagttaactgtgctgattaacaagtacttataaaaatagctaaagtagaaaattaatgatcagttgtactagaggaacatcatagaagagaaaaatccaactctttatattaaaaatgaatacaataagaaaattgcaaaagagaccaaaatgaacgtgttttgtaaattgttacaggagcaaaaactttgcaactagttttcaacatactttagactttaaatgttgtttggacagttttgtcttcaacttggaccaattgtagattgttacaggcttcctaggatttagcattcctattttctctaccaaagttttttttagaagcatcccaactcttctctttgttgataaataagcctttcctgtcatcttcattttaacttgctaaaaccctagatacaaaggtcctccctcatttttcccacagagcccctgtttgggaatttgagattctgtgtcatgctggttttcctttcagaattgcttgaaatcgagttctcttagccactggacacctagttttcaggagaatgtcccaagattgtttatatatacaaaatggcaaaagtactgtttttcgaattgataattcaagcaaaggcttctctttactgtcactgatttttttttgtttttattttgtttccttgtttctatttccttgaagctttgaagggaggagaagcagaaaattttggtttatgtttgttaaaaatcagaactacttaatgctttttgccacagcatatttccttgcctgttggagccgttaggaagattacctatgtcctaatcttcaacctgagaagatttttgactcttgtgtctactgttgattgtttgcttgagttctcaaagacctgtggccaggtattttaaaaagtcgtctatttctttctagttgcatcaacttgcacactggtgtctaactatatgtggtattcggaacttgtaattcttattgagcagccattgcctatattttctcagctcctcactgatttctttatatgagctcagctgacaagcaaatgcagctattttgtttaccctctcttcataccggaccatcaacaacagtgttctaactcatccctgatggtctgtgagatgtagactattacacaagattcaagttactcgtaagcaacttttagatagagttggtcctgttaggaggagactcttgatgtcaccttcagtatcttgaaagcgggtcccctccccgaggctcttaattctttgaaaacttgatgctgtttcagctgaaaaattagcaagactgttaaaaaaaaaaagttgaggggagctgtttaagaaactgaaaagtaattgcaaactacattggataattgtgactttcagttgttgttctgtatcagttgaatttttgtgctcttttccctgtgtacgtggtggttctatttttctccaataaaacttttatttaccaaaagtttctagagaagat

SEQ ID NO: 307159 - DNA, 3388 bp, Homo sapiens
cctttcaatcgatttcctcttttgtcactcatgtctatgtatatatgatgaaaacataaattgagcaagctcctgaggtttccaacttattgtacataatatccagagttgttttttttaagataaagcattgttcttggttttattatttgtataaaaatttcccatttattttatacctaaatagtagataaggttactacaggattaaagagtttgactctgaattaatggggcatacactttggggtaaggatttctttttattcttatgaaagttacagatcatacttcatactaaagttttgtatttcgtgtttcccacttttaaacctcttttgtttttaccactttaaaatattatacatgtacaaacatctttaatagaatgcggagctgctttcaccagcaaacttgaaggaatgtttaaagacatggaactttctaaagacatcatgattcagttcaaacagtatatgcagaatcagaatgttccgggaaatattgagttaactgtgaatatcctgacaatgggctattggccgacatatgtgcctatggaagttcatttaccaccagagatggtaaaacttcaggagattttcaagacattttacctaggcaaacatagtggcaggaaacttcagtggcagtcaaccctaggacactgtgtgttaaaagcagaatttaaagagggtaaaaaggaactccaggtctctctttttcaaacactggtgctgctaatgtttaatgagggagaggagttcagtttagaagagatcaagcaggcaactggaatagaggatggagagttaaggagaacactgcagtcattagcctgtggcaaagctagagttctggcgaaaaatccaaagggcaaagacattgaagatggtgacaagttcatttgtaatgatgatttcaaacataaacttttcaggataaagatcaatcaaatccagatgaaagaaacggttgaagaacaagcaagcactacagaaagagtatttcaagacagacagtatcaaattgatgctgcaattgttcgaattatgaagatgagaaagacacttagccacaatctccttgtttcagaagtgtacaaccagttgaaatttccagtaaagcctgctgatcttaagaagagaatagaatctttaattgaccgggactacatggaaagagataaagaaaatccaaaccagtacaactatattgcatagaatgttggccttgcagcatttggtgtcatatgcagtagccagtggataaactaacctgttgattcaatattatttgactccttttttactaccgatgaccaaatgaagcagtgtaattaatggaaatagttgagtggactttttctcagtggttaacatgcccattttaaagagtaatacttacctttaagaagaatgttgttgaactctttgcatgttatttagtatgatgtgcagaaaacacttaagaacgtacctggtcttcatgaattcctctttggaactgggaaagagatccctgtggctattaaaaaggggggagggttcttacacaccattaattatgaagcaaaaggtttatttgcttaaaatgtcatttaaagatacttaaactgcatgcaaactttatttactgtacagagttctggatgtatttatcaaatagaaaaaccacccttgacttggttgttcacccgttttgtgatttcccttgaaaagagaaatgaattgtcatagctattgatattttactaggtgatgttctgttacactgaaagggatgttttttaaaaaaaattatttggaaacaagttttcaagtagggggacagttgcttacataatatcttgtatattcacatcctaaaaattttcatttatgagtatgggatgtgtgtatatggcttagccccaagttaactgtgctgattaacaagtacttataaaaatagctaaagtagaaaattaatgatcagttgtactagaggaacatcatagaagagaaaaatccaactctttatattaaaaatgaatacaataagaaaattgcaaaagagaccaaaatgaacgtgttttgtaaattgttacaggagcaaaaactttgcaactagttttcaacatactttagactttaaatgttgtttggacagttttgtcttcaacttggaccaattgtagattgttacaggcttcctaggatttagcattcctattttctctaccaaagttttttttagaagcatcccaactcttctctttgttgataaataagcctttcctgtcatcttcattttaacttgctaaaaccctagatacaaaggtcctccctcatttttcccacagagcccctgtttgggaatttgagattctgtgtcatgctggttttcctttcagaattgcttgaaatcgagttctcttagccactggacacctagttttcaggagaatgtcccaagattgtttatatatacaaaatggcaaaagtactgtttttcgaattgataattcaagcaaaggcttctctttactgtcactgatttttttttgtttttattttgtttccttgtttctatttccttgaagctttgaagggaggagaagcagaaaattttggtttatgtttgttaaaaatcagaactacttaatgctttttgccacagcatatttccttgcctgttggagccgttaggaagattacctatgtcctaatcttcaacctgagaagatttttgactcttgtgtctactgttgattgtttgcttgagttctcaaagacctgtggccaggtattttaaaaagtcgtctatttctttctagttgcatcaacttgcacactggtgtctaactatatgtggtattcggaacttgtaattcttattgagcagccattgcctatattttctcagctcctcactgatttctttatatgagctcagctgacaagcaaatgcagctattttgtttaccctctcttcataccggaccatcaacaacagtgttctaactcatccctgatggtctgtgagatgtagactattacacaagattcaagttactcgtaagcaacttttagatagagttggtcctgttaggaggagactcttgatgtcaccttcagtatcttgaaagcgggtcccctccccgaggctcttaattctttgaaaacttgatgctgtttcagctgaaaaattagcaagactgttaaaaaaaaaaagttgaggggagctgtttaagaaactgaaaagtaattgcaaactacattggataattgtgactttcagttgttgttctgtatcagttgaatttttgtgctcttttccctgtgtacgtggtggttctatttttctccaataaaacttttatttaccaaaagtttctagagaagat

SEQ ID NO: 307160 - DNA, 5088 bp, Homo sapiens
gagagatcgaaaagcaggggagggggacggcacggccgtttacctgtctgcctcctcattcgctctcccccctcgttctgctcactcctggtgtcagcctatccgccttcccaaaccctcccattcccccggtgtagccccccccttcactttccttctcgtcctctgtgtttctcctctcttctttcttcccttccccctctagcattgctaccttctctcctacacgcacgcaggcatataaacgtaggtttttgatgctcctctgcctgttgaccccgctattttcatgtttccaacaggtttttcttcccccagtccctcagctgctgctgctgctcaggaggtcagatctgccactgatggtaataccagcaccactccgcccacctctgccaagaagagaaagttaaacagcagcagcagtagcagcagtaacagtagtaacgagagagaagactttgattccacctcttcctcctcttccactcctcctttacaacccagggattcggcatccccttcaacctcgtccttctgcctgggggtttcagtggctgcttccagccacgtaccgatacagaagaagctgcgttttgaagacaccctggagtttgtagggtttgatgcgaagatggctgaggaatcctcctcctcctcctcctcatcttcaccaactgctgcaacatctcagcagcagcaacttaaaaataagagtatattaatctcttctgtggcttcggtgcatcatgcaaacggcctagccaaatcttctaccaccgtctctagctttgctaacagcaaacctggctctgctaagaagttagtgatcaagaactttaaagataagcctaaattaccagaaaactacacagatgaaacctggcaaaaactgaaagaagcagtggaagctattcagaatagtacttcaattaagtacaatttagaagaactctaccaggctgtagaaaatctctgttcttacaagatttctgcaaacttgtacaaacagctgagacagatctgcgaagatcacatcaaagcacagattcatcaattcagagaggattcattggatagcgttctttttttaaagaagattgatagatgctggcaaaaccattgcagacaaatgatcatgatcaggagcatttttttgtttctggatagaacttacgttcttcagaattcaatgctaccctccatttgggacatgggactggagttatttagggctcatattataagtgatcagaaagtgcagaataagacaattgatggcattcttctcttgattgagagggaaaggaatggtgaagcaattgatagaagtttacttcgaagccttttaagcatgctgtctgatttgcaaatttatcaagattcttttgaacaacgatttttggaagaaactaaccggctctatgcagctgaaggccaaaaattaatgcaagaaagagaggttcctgaatatctacatcatgttaacaaacgtctagaagaagaagcagacagacttattacttacttagatcagaccacccagaagtcattaattgctactgtagaaaaacaacttctaggtgaacacttaacagcaattcttcagaaaggtttaaataacctccttgatgaaaaccgaattcaagatttgtctcttctgtatcagctcttcagtagagttcgaggtggagttcaggttcttttgcagcagtggatcgaatatatcaaggcatttggcagcactattgtaattaatcctgaaaaagataaaaccatggttcaagaattgctggattttaaagataaggttgaccatataattgatatctgctttctgaagaatgagaaatttatcaatgccatgaaagaagcatttgaaacgttcattaacaaaagaccaaataaaccagctgaacttatagctaagtatgtagattcaaaacttcgtgcaggcaacaaagaagctacagatgaagaacttgagaaaatgttggataaaattatgatcatatttagatttatctatggcaaggatgtttttgaggccttctataagaaagatttagccaagcgcctgttagtcggaaagagtgcatctgtagatgctgaaaaatcaatgctgtccaaacttaaacatgaatgcggagctgctttcaccagcaaacttgaaggaatgtttaaagacatggaactttctaaagacatcatgattcagttcaaacagtatatgcagaatcagaatgttccgggaaatattgagttaactgtgaatatcctgacaatgggctattggccgacatatgtgcctatggaagttcatttaccaccagagatggtaaaacttcaggagattttcaagacattttacctaggcaaacatagtggcaggaaacttcagtggcagtcaaccctaggacactgtgtgttaaaagcagaatttaaagagggtaaaaaggaactccaggtctctctttttcaaacactggtgctgctaatgtttaatgagggagaggagttcagtttagaagagatcaagcaggcaactggaatagaggatggagagttaaggagaacactgcagtcattagcctgtggcaaagctagagttctggcgaaaaatccaaagggcaaagacattgaagatggtgacaagttcatttgtaatgatgatttcaaacataaacttttcaggataaagatcaatcaaatccagatgaaagaaacggttgaagaacaagcaagcactacagaaagagtatttcaagacagacagtatcaaattgatgctgcaattgttcgaattatgaagatgagaaagacacttagccacaatctccttgtttcagaagtgtacaaccagttgaaatttccagtaaagcctgctgatcttaagaagagaatagaatctttaattgaccgggactacatggaaagagataaaggtgtcatatgcagtagccagtggataaactaacctgttgattcaatattatttgactccttttttactaccgatgaccaaatgaagcagtgtaattaatggaaatagttgagtggactttttctcagtggttaacatgcccattttaaagagtaatacttacctttaagaagaatgttgttgaactctttgcatgttatttagtatgatgtgcagaaaacacttaagaacgtacctggtcttcatgaattcctctttggaactgggaaagagatccctgtggctattaaaaaggggggagggttcttacacaccattaattatgaagcaaaaggtttatttgcttaaaatgtcatttaaagatacttaaactgcatgcaaactttatttactgtacagagttctggatgtatttatcaaatagaaaaaccacccttgacttggttgttcacccgttttgtgatttcccttgaaaagagaaatgaattgtcatagctattgatattttactaggtgatgttctgttacactgaaagggatgttttttaaaaaaaattatttggaaacaagttttcaagtagggggacagttgcttacataatatcttgtatattcacatcctaaaaattttcatttatgagtatgggatgtgtgtatatggcttagccccaagttaactgtgctgattaacaagtacttataaaaatagctaaagtagaaaattaatgatcagttgtactagaggaacatcatagaagagaaaaatccaactctttatattaaaaatgaatacaataagaaaattgcaaaagagaccaaaatgaacgtgttttgtaaattgttacaggagcaaaaactttgcaactagttttcaacatactttagactttaaatgttgtttggacagttttgtcttcaacttggaccaattgtagattgttacaggcttcctaggatttagcattcctattttctctaccaaagttttttttagaagcatcccaactcttctctttgttgataaataagcctttcctgtcatcttcattttaacttgctaaaaccctagatacaaaggtcctccctcatttttcccacagagcccctgtttgggaatttgagattctgtgtcatgctggttttcctttcagaattgcttgaaatcgagttctcttagccactggacacctagttttcaggagaatgtcccaagattgtttatatatacaaaatggcaaaagtactgtttttcgaattgataattcaagcaaaggcttctctttactgtcactgatttttttttgtttttattttgtttccttgtttctatttccttgaagctttgaagggaggagaagcagaaaattttggtttatgtttgttaaaaatcagaactacttaatgctttttgccacagcatatttccttgcctgttggagccgttaggaagattacctatgtcctaatcttcaacctgagaagatttttgactcttgtgtctactgttgattgtttgcttgagttctcaaagacctgtggccaggtattttaaaaagtcgtctatttctttctagttgcatcaacttgcacactggtgtctaactatatgtggtattcggaacttgtaattcttattgagcagccattgcctatattttctcagctcctcactgatttctttatatgagctcagctgacaagcaaatgcagctattttgtttaccctctcttcataccggaccatcaacaacagtgttctaactcatccctgatggtctgtgagatgtagactattacacaagattcaagttactcgtaagcaacttttagatagagttggtcctgttaggaggagactcttgatgtcaccttcagtatcttgaaagcgggtcccctccccgaggctcttaattctttgaaaacttgatgctgtttcagctgaaaaattagcaagactgttaaaaaaaaaaagttgaggggagctgtttaagaaactgaaaagtaattgcaaactacattggataattgtgactttcagttgttgttctgtatcagttgaatttttgtgctcttttccctgtgtacgtggtggttctatttttctccaataaaacttttatttaccaaaagtttctagagaagat

SEQ ID NO: 307161 - DNA, 2813 bp, Homo sapiens
gagagatcgaaaagcaggggagggggacggcacggccgtttacctgtctgcctcctcattcgctctcccccctcgttctgctcactcctggtgtcagcctatccgccttcccaaaccctcccattcccccggtgtagccccccccttcactttccttctcgtcctctgtgtttctcctctcttctttcttcccttccccctctagcattgctaccttctctcctacacgcacgcaggcatataaacgtaggtttttgatgctcctctgcctgttgaccccgctattttcatgtttccaacaggtttttcttcccccagtccctcagctgctgctgctgctcaggaggtcagatctgccactgatggtaataccagcaccactccgcccacctctgccaagaagagaaagttaaacagcagcagcagtagcagcagtaacagtagtaacgagagagaagactttgattccacctcttcctcctcttccactcctcctttacaacccagggattcggcatccccttcaacctcgtccttctgcctgggggtttcagtggctgcttccagccacgtaccgatacagaagaagctgcgttttgaagacaccctggagtttgtagggtttgatgcgaagatggctgaggaatcctcctcctcctcctcctcatcttcaccaactgctgcaacatctcagcagcagcaacttaaaaataagagtatattaatctcttctgtggcttcggtgcatcatgcaaacggcctagccaaatcttctaccaccgtctctagctttgctaacagcaaacctggctctgctaagaagttagtgatcaagaactttaaagataagcctaaattaccagaaaactacacagatgaaacctggcaaaaactgaaagaagcagtggaagctattcagaatagtacttcaattaagtacaatttagaagaactctaccaggctgtagaaaatctctgttcttacaagatttctgcaaacttgtacaaacagctgagacagatctgcgaagatcacatcaaagcacagattcatcaattcagagaggattcattggatagcgttctttttttaaagaagattgatagatgctggcaaaaccattgcagacaaatgatcatgatcaggagcatttttttgtttctggatagaacttacgttcttcagaattcaatgctaccctccatttgggacatgggactggagttatttagggctcatattataagtgatcagaaagtgcagaataagacaattgatggcattcttctcttgattgagagggaaaggaatggtgaagcaattgatagaagtttacttcgaagccttttaagcatgctgtctgatttgcaaatttatcaagattcttttgaacaacgatttttggaagaaactaaccggctctatgcagctgaaggccaaaaattaatgcaagaaagagaggttcctgaatatctacatcatgttaacaaacgtctagaagaagaagcagacagacttattacttacttagatcagaccacccagaagtcattaattgctactgtagaaaaacaacttctaggtgaacacttaacagcaattcttcagaaaggtttaaataacctccttgatgaaaaccgaattcaagatttgtctcttctgtatcagctcttcagtagagttcgaggtggagttcaggttcttttgcagcagtggatcgaatatatcaaggcatttggcagcactattgtaattaatcctgaaaaagataaaaccatggttcaagaattgctggattttaaagataaggttgaccatataattgatatctgctttctgaagaatgagaaatttatcaatgccatgaaagaagcatttgaaacgttcattaacaaaagaccaaataaaccagctgaacttatagctaagtatgtagattcaaaacttcgtgcaggcaacaaagaagctacagatgaagaacttgagaaaatgttggataaaattatgatcatatttagatttatctatggcaaggatgtttttgaggccttctataagaaagatttagccaagcgcctgttagtcggaaagagtgcatctgtagatgctgaaaaatcaatgctgtccaaacttaaacatgaatgcggagctgctttcaccagcaaacttgaaggaatgtttaaagacatggaactttctaaagacatcatgattcagttcaaacagtatatgcagaatcagaatgttccgggaaatattgagttaactgtgaatatcctgacaatgggctattggccgacatatgtgcctatggaagttcatttaccaccagagatggtaaaacttcaggagattttcaagacattttacctaggcaaacatagtggcaggaaacttcagtggcagtcaaccctaggacactgtgtgttaaaagcagaatttaaagagggtaaaaaggaactccaggtctctctttttcaaacactggtgctgctaatgtttaatgagggagaggagttcagtttagaagagatcaagcaggcaactggaatagaggatggagagttaaggagaacactgcagtcattagcctgtggcaaagctagagttctggcgaaaaatccaaagggcaaagacattgaagatggtgacaagttcatttgtaatgatgatttcaaacataaacttttcaggataaagatcaatcaaatccagatgaaagaaacggtatttctttcactttctcttagtcctaacacactggaattatacatgttaataatcaaaatatataaagatttttatacctgta

SEQ ID NO: 307162 - DNA, 1213 bp, Homo sapiens
agtggtagctccaagtggtaggcatgagacctggcccagagatacaagatctcccttggaattttccaaatcaaaggcctctgttgttagactaatggggtttcccctgcagagattggtcagccctgcagtctatcatcccggaaggtgttaaatacacatgaaagccagcctcggcgggcagaacctagcccgccgaaagggcgggcattgctaaagtgttttcaaaaggtcttcccaatcctctgctttagacagctcggaccttagatagaagaacacaacggatcctccagtgactgacgacccaaaggacggatgatgtcacagtcatctggatcaggagatgggaatgatgatgaggctactacctctaaagacggtggcctactgaacatcagtcacacagcatggtaatatggttgttccaacgtatctgcagggaactggctccaggaaccctgcagataccaaaatcggtgcatattcaactcccacagtcagctctgcggaacccacagatacaaaaagttggccttccctttacaggtttccaatcctgcaaatcctgtattttccattcctgcttgattgctgatgtggaacccgcccatgcagagggccgactgtatttattgaaaaaatatgtgtataaatggaccatcacagtttaaaccccaattgttcaagggtcacctgtaaacagttgcctaaatgggccatgatctttctcatgcctccatgtctttgcacacactgttccccttttcaagtaatccatagatctctagatctcactgtcctgatactacaaattaagtttggatttgtatgattaatatacaggttacaacgttaagcccccatattgtggaccatagagagtccattcttccaccaggttggagggtgcatcccccgcccttgagtaatttccagaaatccacaaggtatgcttaaatgttacaaaaatcaatcctagttgtcatttgttatctctgccagctattctttctgcatactgtcatggtctgccttcaataagtcaccacttcctgtcttgaaactttttttaaaaaaaccttttagtttttttaattttaaaaatttctgcaaacactatggcgacttgtgtaattttaatacatacaaaagatgtatgatgtgtaatttatggagcataattattaaataaacatccaggaatctatca

SEQ ID NO: 307163 - DNA, 1077 bp, Homo sapiens
agtggtagctccaagtggtaggcatgagacctggcccagagatacaagatctcccttggaattttccaaatcaaaggcctctgttgttagactaatggggtttcccctgcagagattggtcagccctgcagtctatcatcccggaaggtgttaaatacacatgaaagccagcctcggcgggcagaacctagcccgccgaaagggcgggcattgctaaagtgttttcaaaaggtcttcccaatcctctgctttagacagctcggaccttagatagaagaacacaacggatcctccagtgactgacgacccaaaggacggatgatgtcacagtcatctggatcaggagatgggaatgatgatgaggctactacctctaaagacggtggcctactgaacatcagtcacacagcatggtttccaatcctgcaaatcctgtattttccattcctgcttgattgctgatgtggaacccgcccatgcagagggccgactgtatttattgaaaaaatatgtgtataaatggaccatcacagtttaaaccccaattgttcaagggtcacctgtaaacagttgcctaaatgggccatgatctttctcatgcctccatgtctttgcacacactgttccccttttcaagtaatccatagatctctagatctcactgtcctgatactacaaattaagtttggatttgtatgattaatatacaggttacaacgttaagcccccatattgtggaccatagagagtccattcttccaccaggttggagggtgcatcccccgcccttgagtaatttccagaaatccacaaggtatgcttaaatgttacaaaaatcaatcctagttgtcatttgttatctctgccagctattctttctgcatactgtcatggtctgccttcaataagtcaccacttcctgtcttgaaactttttttaaaaaaaccttttagtttttttaattttaaaaatttctgcaaacactatggcgacttgtgtaattttaatacatacaaaagatgtatgatgtgtaatttatggagcataattattaaataaacatccaggaatctatca

SEQ ID NO: 307164 - DNA, 320 bp, Homo sapiens
ttttcatgatacttttctctaaaaaagagatttaaataaataaaaattttaaaaaaggagattaaattcatgagccgaaactgttgtctttttaatggggtattaactaaatgggcttgagccaatgataatgaactttacattgaaaatttgccttctcttacagcctgctgatcttaagaagagaatagaatctttaattgaccgggactacatggaaagagataaagaaaatccaaaccagtacaactatattgcatagaatgttggccttgcagcatttggtgtcatatgcagtagccagtggataaactaacctg

SEQ ID NO: 307165 - DNA, 427 bp, Homo sapiens
gacaagcaaatgcagctattttgtttaccctctcttcataccggaccatcaacaacagtgttctaactcatccctgatggtctgtgagatgtagactattacacaagattcaagttactcgtaagcaacttttagatagagttggtcctgttaggaggagactcttgatgtcaccttcagtatcttgaaagcgggtcccctccccgaggctcttaattctttgaaaacttgatgctgtttcagctgaaaaattagcaagactgttaaaaaaaaaaagttgaggggagctgtttaagaaactgaaaagtaattgcaaactacattggataattgtgactttcagttgttgttctgtatcagttgaatttttgtgctcttttccctgtgtacgtggtggttctatttttctccaataaaacttttattt

SEQ ID NO: 307166 - DNA, 1422 bp, Homo sapiens
aagagacacacagctatgaacacaaagcacagaacctagaggaaaatgtgttcatatggtgaggtttcattcacaacaacatggacaggactgctgctcatattacacaacagccataaaacccaaaaatacatctaaaacaaaggaaacatatgtggttcaattccaccaagggatactacgaggccgtgcagaggcacagacaaaatctacaaagagcaatgcaaaccaaccttccatcatgatgttgagtaaagaaacaagagtataaaaagaaggtgtgcacatgaagctcaaaaagaggcagcatttattttctagggaggcaaactcaaaatagaccccataaataaaggaaatagattatgtaatccaaaatagtgcttgcacatcaggaaatactggagggttctgttcaacatggaaactccaaggaccactggacgcgggcactggaacgctgactttcatttggtgaccctcaatccacttcgagttattggtaaatcacataattttaatttgatacggaataatcatacatgtttcttgggagcatgtggtaatctgattcatccatgcaatgtgtaacgatccaataaaggttcccaggacattcatcaccctgaacatttgttattatggttattattttgagacagagtcttgcactgtcgcccagctggcgtgcagtggcaggatcttggctcactgcaaactctgcctcccgggttcaagcagttttcctgtctcagcctcctgagtagctaggattacaggcatgcaccatcacacctcgctaatttttgtatttttattacagacggggtttcaccatgttgctctggctggtctcgaactcctgacctaaggtgatccaccagcgtcggctttccatagtgctgggattacaggtgtgagccactatgcctggccaacttttataatttctgtgctgggaacattccaaatcttcatttctcactcatgtggaaaatacaataatctgttgctaactatggtcaccctactgagctctcaggccctggaacttactccttctctccacctgtatttctgcacccgtccaccaacctctctccatccctgtcctccacactcccttgccagcctctgttgacaaccattctactctctgccatcacaaggcccacttttgtagcttccgcgtgagtgagaacatgctcctctttctgggcctggcttatttcactgaacataatgtcttccagattcatctgtgttgctgaacatggtacaatttccttctttttatgcctgaatattatttcattgtgtatatagaccacatgttccttatccattcatccattgatggacataggttgattccatatcttggctattgtgaatactgctgcaataaacatggcaatgcag

SEQ ID NO: 307167 - DNA, 6439 bp, Homo sapiens
  misc_feature (464)..(464): n is a, c, g, or t
  misc_feature (934)..(934): n is a, c, g, or t
  misc_feature (1411)..(1411): n is a, c, g, or t
  misc_feature (2435)..(2435): n is a, c, g, or t
  misc_feature (2459)..(2460): n is a, c, g, or t
  misc_feature (2757)..(2758): n is a, c, g, or t
  misc_feature (3818)..(3818): n is a, c, g, or t
  misc_feature (3938)..(3938): n is a, c, g, or t
  misc_feature (5757)..(5757): n is a, c, g, or t
aacctctcactttccaaagaagctgtggacctatttctgtgtccagccattctgtgtggagaaactgaccatgttcctgatgtcccttaatttgcctttaaactgctgcctgattctcctccaatcctgattctctgagtttgggattttccaagactgttttctggaaacctgtacagttacttcttaggggtctgtattagtcggttctcacactgctaataaagacatacctgagaccaggcaatttataaagaaaaagaggtttaatggactcacagttccacatggctggagaagccacacaatcatggcagaggtgaaggaggagcagaggcacatcttacatggtggcaggcaagagagcgtgtgcaagggaactaccctttataaaaccatcagatctcatgagacttattcactatcacaagaacagcatgagaaaaacctgcctccatgattcnattacctcccaccaggtccttcccatgacatgtggggattatgggaactacaattcaagatgagatttgggtggggacacagccaaaccatatcagggtctttgcagaatcatgagtttatcagtactaattagtttttcctcccatgtcccatctactttgtatcttcccatattattcaaaatgtctgctttattgatggcatctttccctggttcccagcattgccagtgaatttaccattccccaaaccaaaagcccccgtatggaaatagtggagagttctgacacatcatatggatagatggaccaaatgaccttccagactcatgtaactctgggaggctttttctttaaagcagcataattaaagggttgagaaaaacttttactgaaaaggacagagagatagagtttagtttactcaggagaacagaataaggtgagacttaaatggtgagtcacactangcctgctgaagatacagcaggagggactaagattaaattacagctgaagtgattcatgttggtcactacaaagatcatttaacccttaaaaagttgtgtggcatcatgatacattgcaaagccaagttacaaagcctcatttttggagctgttctctttaaaggtaagaggatggactcgaatcaccttctgaattatcggacagccctgtgacatgattataccttggtgcctgagatgttagatgggaaataaacagcagcatctagtaaactctcctggggtaaaaaacaaaacaaaaaaaaaaaaaccatcttgttttcacccagtcttactgattttttttagtgtgaagacagaatgttttgtcaaaaacaagttctccaaatttataaacctgattggagacatctttagtttcttctcaaacatgctgggaaaataggaatgtcactgagactccttcaccatcccctngcagcccctattccccggggggctgggtagatggagaagcagggggcaggggctggaccagggagagagtgacaggctctctgtggtaggtctgtgccttgtcacagagcctcctgggctcaggtctgtggtggccgcgggagagccagctccacgctgtgtggctggtgacatttccggctgccagggcccagccaatcagtgatggacccagcttgcttgggcgatgacacatgaaatatgataattttctgccaaagggccctggaagaggggaaggaagagagtgtgtgtgtgtcgctgggaggggtccacacaggagcgcctgtgatgaggtgggagggtgacagtgcacttgttttcacggtttgcctggcaggactaggcaagggagggaatgggctgtgatgctggagcggctgtaggagcgcccctgtagctcccgaggtgagccactgccgctgctcttaggcgggaaccagcggaggagcagacagcgccatgctggagctctggggctggggtgaaaaagaaactgtcaaagacatttgccttcttaacacacgtgagcaaggttaggactcttgtttcttctcagcgctacctctttaaaagccagaacaaaactgcagtaaacaccatctgggtggctgaagtactcgaagaataatttttttcaaaaaaatttaggctggaggttgtctctccccctaccctgtttttctacctccatacctccatgctgacccttaaaagaaaagtgaaaaacaaaacaacagaactcaataacaaaatcttgaagaagggcctaagtctgaatcgtaaagactctaactaaggttcaggtggtagttctgattcctgattctggttgaaagaaagtatgtcttggaatgcgatgtggctctggattatgttcgactttagaaatagtgccagaactattctttgatttgtggacatggaccctgagactgcagagcaaggcagggcagggcaaggagtgcccgtgttgagctctcangtgcagagaccccactcccttcanncactgttgaggctccccggcccctgatctgcagccagaggctggtgaggtgtgacacgcttgctgacaagagtgccctgtctcgtctgacccgtgaacatgggtgttcagaagtgaaggatcatagtgtttacataacgtgccaattagtactgagaagctcatcagtgcaataaatatttatgacttgcatttgcattttttctctccacgtatatatatataatatgtgtgcatatatatgtgcatatatatgcacatatattatacatatatgttgtttttaaaaagcaccaannaatgaaatccttatcactgtgtgcaagcctactgtgcctttaggcatgggactggcttcctgcgctgggagtgacagctattccgaagtgataattggtgtactgtgtctttaaaggttaaaccccctttcaaaaaaggtctggactcctagtggaaaagacaagcgaggcatgggttggctctggattcagaaaacagctgctgattagattctgtgtctgcaggctgaatttattccgtgtttttcagcagcacgaattcaagagggatgcttctgtttgggtttctgatcgtgatttatatttattcagaggaataacagagggtggatctgttcccggcgcgagcatgctcacaaccagccgactctcccattatccagctgcctagtttggtgcttcaatgtacatggctattccgtgtgcatatgtgtgtatacaaacacgcatgcatgcctggatggacatacgtatgcacaggttattttttaaggacaattctttcaataaggtctttaccccttacttgaaacaggtgttcatgaaaaaaatgcacaaaatcctgcctggccggaataattcatgaagaaggggctggatccgtgggtcagagaacacaggaccagtttgccatcccaaggccgaaggtaggggactctgggtttttattcggcggatggattccttgcgctgtattttaccttgtgattgtgtttttgcctgaggccgcaccgcgaagcagaatagcgagctgcgattccattttgtgtatgcctttcttaggcaaggtgtccggctgccgagacgcaggggccggccgggtgggctgcgcgtggcggccagtgcccccgtgggctgagcgcgctgctcggcctggtgctggggagcggcgcgagcctcaagtgacccccgcgcgtcaatcacaggcggcggcggcggcggcggcggcggggctgtaaccctatgcgcgccgtgcgctccagcgctgcttgcagcaggctctgctgggctctgcacccgcgcactggcggccggctccataggagcctcggctgggggncttaggcatcgcgttccgtggcaccggcgttttcttgtgctgccttggctgctgctccggattgtttaggcggactgcagtagcctgcttggttgagagtgagattcgtatgatgctggntgctgagacagaggggatagctttctttttcccccttaatcctagccccctgaaaatattcctaaagcaaaatcatttcccaacccccaacctgacccaaccaaacccaaaccaaactcctattctataggggattcttgcctccctgctagcagagagagtgtcccctccaagttatgccccacattttactatcttttaaatggaaacactgatggtgccgaatggtccctaatgatattgtccaggctgctgaggactcctgagtgtggcagtggtgcagaggaacttggaggctcggcattggtttcctttaacgtagctggtttggtttctgttgcaggtcaggaatatttctgtggctaggcccttccttgaacttcgggggcagtggttgcaggaagagggtctgcagatctggtcgctgggtgagcagcaccctggccctctttctggtatacgctgacgtttctggtagcccttggcattgtaaccacagcagccaggtgcccactggctacctggagtgcttcggttttgttaactctggtgtgcattttgggtgttacggggggagggaagaggaaagagggagaatgaggtgtttgctgaactgatctgcatggcagtgttctccagcccatgtttgtgtgattatgtaatgatcagacgtgtgcccaaacagctccccaccatctcctggctctcccccagactgaagaagttgggtgctacagttgtttaagacgtctttatgtaattatgtgtatgctgggggcagggagagagtgggggcaaggaggaataattctagcaacttaaatgtgaagaatacaggtcagtgatcgtgtgtccctctgaggacagtgtggtattagctctgggtcagtgttgatctgaagaccctcctgtgtctctttcagccagtaattgcttatctgaactttcatttggtaatttcacccctcttgcaccctggagacagttggacccaggagaaggacccctgcagggcctccagtttcccaattccaggcagaaaatgaatcctgaagccaaggtaataggccaggtcccagctgttcttcatggtcctgctgagcagccagtgtagggaggagttcctgtccactagggtgtcacttgtgctctggggttgggctatactgtggggctgaagaatagacctcagatgccgtctgagctgtttgacatatgctctttaaagttgtgatggcttgcagaggctggaggccctttacatagttgcatttaaagattgtgggagttttttgcaaggaaggtggacagctgtccaactaagacacctgcaggcaggaggagagggtggtgtgacacttagctctctgcttcctctccactccatctagttaaggcacccacaggatacagaattgttaacaggggccctcctgtcacacccctgagcgcctcagcctggggctgttgggcagatttgttaatttgatggcaaagtctggccccttaaggctaagattgtttttttgccctcaacaccccagtgggtttgctttgagggccaactactactgtgaactctgtggcagtggatcaagatgtgctcaactggcactattgttgagctgtctccgcccattgtgtttagtggcagccaccctccttggagtggagaagtgtgtgctgcctttgggtccttgccaagtgagctgttgagacatttagtgtgtgaaaggtacaggcaagaagaagatgcatttagtctgaagtcctggcaggttctaggacatgatttgatgaaagataacattaagaaagntgtgtgacaactggatagcatttaacttgtctctcactccctactctgtgaattccctaatgtctttaaggctcttttttgccctccatcctgcccatcaaggagtccctgacatgctgttctccatcctgtttcctgtggagtcaaagtgtatttacaaatctgcagatgcactaggcgggcagggctggaaaacactggctgtatcaacaggcagcactagcattctgggtcagacttggccaaagcccgtgaccaattttcttccttatctgtaaagtaggtgtaaccatcataaccttaccaagaccactgaactatcttgagaagaaaaatgagatacgtttagtaacatgctatgtagttgataggtattaggataataccacaacaatctggaactcacatttacataatttcacttatccagttgggacctagatggcaaatcaagagaaaggtcataagtccatgagctacagtttatgaattttgatcattggaggaaattttataccctctttcaggcctctgcatttacttcaagttttaagaggcttggttattagtttgtcaaatgcacctagcaaattggaagcaactgatactgtactgtgcaaggattattaaagctcttttatcaagtatcagtaagaagtaagagtaaaaaacagaaaaacta

SEQ ID NO: 307168 - DNA, 2125 bp, Homo sapiens
ccgcgcgcgcacggctctcgcatgccgtggccgggtggctgcagcgctgcgccgcgccgcaccccggatccaagccgctcccgccgcccggccggcgcgcaggtgttcatgaaaaaaatgcacaaaatcctgcctggccggaataattcatgaagaaggggctggatccgtgggtcagagaacacaggaccagtttgccatcccaaggccgaagtcgagggacaaacgtcctgaagaatgggaagaaaggaggttctgaaggcacagattccaataccatgccagaggttgaggacactggtgcttgaagggaaactggcacactctggagccccaagaagagctggagctggaggcatgcggcccacgaagggtagaagtaccagccatgaccaagagcccttcacatcatctggcaatccatccagaacccactgaatggaggacagcacagcgaggtctttctcattttgtaactgcaaaagctggaacaagagccagagaagccaaagaagcagtacaagtccaacagcttttagaataaccctgagaaaatggttgaattttgaccagttttgcaattggatactatgagaagagaccttccctcctgcactggatttcatcatcatacctggaggccattcctcatgggactttggccatctcatatccacctttaagcatgttattcccatttcagctgtggtagctctgggtatccttccctaggagaaaatattaatcttttctccctctgagttctggattaaactgtcttatctgaaactgggtcactttaggctagaagcaccactagacattcctgttctcagaagttgccaagttcatgtcatatctgtttcattgttaacgggatccacttctgcaagaggctgcctggccagatcagtgtgtctcctggtcagctccttgatgcccttctcctctcccctgcccaatcccagctgagacttgcactgtggtgactctgtcccctcctggtgctttgactggatgtgtgagagaaagtatggtctgtggcactgacatctttgtgtgtttggaggtgactggaacacggatccacccctggaggaaggtggccgtgaaggaggccagcctcagctcagcgttctactctcatcgctcttactcccgcctttttagtgcctgccctactccaggataattgtgcttttcttttttcagttaaatgttagcattgctatttttcattattgcaaagcagcacatgcttgttacaaaaactttggaagtgtagacaaataaaaagaagaaaaagctacttccaaatcctacttaccccaaagacaagatgatcatttagtcatatagtatcatacatatataatatgtacacatatattttaatgtaagtgtagtgtcacaatatcatgtatagtctttcataaaacacgttggcacttaatatcttatatgaacaactttctagagcaacaagcttagtttacagcaattgtaatgtaagagtactcatttacatagctacagcatcctttgtttacctcatctcttatggtttgatgtttaggttgtttccaacttttctccacctaaacagcattaataaatgtggttttagtttcaaaaaaaaaaaaaaaaaaaaaaaaaaaaaaaaacaagaacaaacaccaacaaaaaaaacacaaaaaaaaacaacaaacacaaaacaacaaacaaaaaaaacgagcaaacacaacaaaaaagtaccaaacaacacaagaaacaagaactaaaaacaccaaccccaccagagaaacaaacaagaaaacaaacgaacaaaaaaaagaggagcaacataaaaaaaaacgaaaccacaagagaacagacaagaaacaaacaaaacaagacaagagagaaaaaaaaaatacagaaaaaaaagaaaaacaaaagacgaaagaaaaaagaaaaacaacgaaagaacagacaacaacatggccaaccaaaaaacagcagacaaaaaaataaagaacacacaaaacgaaaaaaaacacacaagaaaacacaaggacataacaccacacgaaaaaagagaagaaagcacaaaagaaagaaaaaaaaatataagacaacaaaaaca

SEQ ID NO: 307169 - DNA, 5370 bp, Homo sapiens
  misc_feature (464)..(464): n is a, c, g, or t
  misc_feature (934)..(934): n is a, c, g, or t
  misc_feature (1411)..(1411): n is a, c, g, or t
  misc_feature (2435)..(2435): n is a, c, g, or t
  misc_feature (2459)..(2460): n is a, c, g, or t
  misc_feature (2757)..(2758): n is a, c, g, or t
aacctctcactttccaaagaagctgtggacctatttctgtgtccagccattctgtgtggagaaactgaccatgttcctgatgtcccttaatttgcctttaaactgctgcctgattctcctccaatcctgattctctgagtttgggattttccaagactgttttctggaaacctgtacagttacttcttaggggtctgtattagtcggttctcacactgctaataaagacatacctgagaccaggcaatttataaagaaaaagaggtttaatggactcacagttccacatggctggagaagccacacaatcatggcagaggtgaaggaggagcagaggcacatcttacatggtggcaggcaagagagcgtgtgcaagggaactaccctttataaaaccatcagatctcatgagacttattcactatcacaagaacagcatgagaaaaacctgcctccatgattcnattacctcccaccaggtccttcccatgacatgtggggattatgggaactacaattcaagatgagatttgggtggggacacagccaaaccatatcagggtctttgcagaatcatgagtttatcagtactaattagtttttcctcccatgtcccatctactttgtatcttcccatattattcaaaatgtctgctttattgatggcatctttccctggttcccagcattgccagtgaatttaccattccccaaaccaaaagcccccgtatggaaatagtggagagttctgacacatcatatggatagatggaccaaatgaccttccagactcatgtaactctgggaggctttttctttaaagcagcataattaaagggttgagaaaaacttttactgaaaaggacagagagatagagtttagtttactcaggagaacagaataaggtgagacttaaatggtgagtcacactangcctgctgaagatacagcaggagggactaagattaaattacagctgaagtgattcatgttggtcactacaaagatcatttaacccttaaaaagttgtgtggcatcatgatacattgcaaagccaagttacaaagcctcatttttggagctgttctctttaaaggtaagaggatggactcgaatcaccttctgaattatcggacagccctgtgacatgattataccttggtgcctgagatgttagatgggaaataaacagcagcatctagtaaactctcctggggtaaaaaacaaaacaaaaaaaaaaaaaccatcttgttttcacccagtcttactgattttttttagtgtgaagacagaatgttttgtcaaaaacaagttctccaaatttataaacctgattggagacatctttagtttcttctcaaacatgctgggaaaataggaatgtcactgagactccttcaccatcccctngcagcccctattccccggggggctgggtagatggagaagcagggggcaggggctggaccagggagagagtgacaggctctctgtggtaggtctgtgccttgtcacagagcctcctgggctcaggtctgtggtggccgcgggagagccagctccacgctgtgtggctggtgacatttccggctgccagggcccagccaatcagtgatggacccagcttgcttgggcgatgacacatgaaatatgataattttctgccaaagggccctggaagaggggaaggaagagagtgtgtgtgtgtcgctgggaggggtccacacaggagcgcctgtgatgaggtgggagggtgacagtgcacttgttttcacggtttgcctggcaggactaggcaagggagggaatgggctgtgatgctggagcggctgtaggagcgcccctgtagctcccgaggtgagccactgccgctgctcttaggcgggaaccagcggaggagcagacagcgccatgctggagctctggggctggggtgaaaaagaaactgtcaaagacatttgccttcttaacacacgtgagcaaggttaggactcttgtttcttctcagcgctacctctttaaaagccagaacaaaactgcagtaaacaccatctgggtggctgaagtactcgaagaataatttttttcaaaaaaatttaggctggaggttgtctctccccctaccctgtttttctacctccatacctccatgctgacccttaaaagaaaagtgaaaaacaaaacaacagaactcaataacaaaatcttgaagaagggcctaagtctgaatcgtaaagactctaactaaggttcaggtggtagttctgattcctgattctggttgaaagaaagtatgtcttggaatgcgatgtggctctggattatgttcgactttagaaatagtgccagaactattctttgatttgtggacatggaccctgagactgcagagcaaggcagggcagggcaaggagtgcccgtgttgagctctcangtgcagagaccccactcccttcanncactgttgaggctccccggcccctgatctgcagccagaggctggtgaggtgtgacacgcttgctgacaagagtgccctgtctcgtctgacccgtgaacatgggtgttcagaagtgaaggatcatagtgtttacataacgtgccaattagtactgagaagctcatcagtgcaataaatatttatgacttgcatttgcattttttctctccacgtatatatatataatatgtgtgcatatatatgtgcatatatatgcacatatattatacatatatgttgtttttaaaaagcaccaannaatgaaatccttatcactgtgtgcaagcctactgtgcctttaggcatgggactggcttcctgcgctgggagtgacagctattccgaagtgataattggtgtactgtgtctttaaaggttaaaccccctttcaaaaaaggtctggactcctagtggaaaagacaagcgaggcatgggttggctctggattcagaaaacagctgctgattagattctgtgtctgcaggctgaatttattccgtgtttttcagcagcacgaattcaagagggatgcttctgtttgggtttctgatcgtgatttatatttattcagaggaataacagagggtggatctgttcccggcgcgagcatgctcacaaccagccgactctcccattatccagctgcctagtttggtgcttcaatgtacatggctattccgtgtgcatatgtgtgtatacaaacacgcatgcatgcctggatggacatacgtatgcacaggttattttttaaggacaattctttcaataaggtctttaccccttacttgaaacaggtgttcatgaaaaaaatgcacaaaatcctgcctggccggaataattcatgaagaaggggctggatccgtgggtcagagaacacaggaccagtttgccatcccaaggccgaagtctggtgtctcggatttgttcctgtgttgcccactcctgctggatcttgtccagtcgagggacaaacgtcctgaagaatgggaagaaaggaggttctgaaggcacagattccaataccatgccagaggttgaggacactggtgcttgaagggaaactggcacactctggagccccaagaagagctggagctggaggcatgcggcccacgaagggtagaagtaccagccatgaccaagagcccttcacatcatctggcaatccatccagaacccactgaatggaggacagcacagcgaggtctttctcattttgtaactgcaaaagctggaacaagagccagagaagccaaagaagcagtacaagtccaacagcttttagaataaccctgagaaaatggttgaattttgaccagttttgcaattggatactatgagaagagaccttccctcctgcactggatttcatcatcatacctggaggccattcctcatgggactttggccatctcatatccacctttaagcatgttattcccatttcagctgtggtagctctgggtatccttccctaggagaaaatattaatcttttctccctctgagttctggattaaactgtcttatctgaaactgggtcactttaggctagaagcaccactagacattcctgttctcagaagttgccaagttcatgtcatatctgtttcattgttaacgggatccacttctgcaagaggctgcctggccagatcagtgtgtctcctggtcagctccttgatgcccttctcctctcccctgcccaatcccagctgagacttgcactgtggtgactctgtcccctcctggtgctttgactggatgtgtgagagaaagtatggtctgtggcactgacatctttgtgtgtttggaggtgactggaacacggatccacccctggaggaaggtggccgtgaaggaggccagcctcagctcagcgttctactctcatcgctcttactcccgcctttttagtgcctgccctactccaggataattgtgcttttcttttttcagttaaatgttagcattgctatttttcattattgcaaagcagcacatgcttgttacaaaaactttggaagtgtagacaaataaaaagaagaaaaagctacttccaaatcctacttaccccaaagacaagatgatcatttagtcatatagtatcatacatatataatatgtacacatatattttaatgtaagtgtagtgtcacaatatcatgtatagtctttcataaaacacgttggcacttaatatcttatatgaacaactttctagagcaacaagcttagtttacagcaattgtaatgtaagagtactcatttacatagctacagcatcctttgtttacctcatctcttatggtttgatgtttaggttgtttccaacttttctccacctaaacagcattaataaatgtggttttagtttcaaaaaaaaaaaaaaaaaaaaaaaaaaaaaaaaacaagaacaaacaccaacaaaaaaaacacaaaaaaaaacaacaaacacaaaacaacaaacaaaaaaaacgagcaaacacaacaaaaaagtaccaaacaacacaagaaacaagaactaaaaacaccaaccccaccagagaaacaaacaagaaaacaaacgaacaaaaaaaagaggagcaacataaaaaaaaacgaaaccacaagagaacagacaagaaacaaacaaaacaagacaagagagaaaaaaaaaatacagaaaaaaaagaaaaacaaaagacgaaagaaaaaagaaaaacaacgaaagaacagacaacaacatggccaaccaaaaaacagcagacaaaaaaataaagaacacacaaaacgaaaaaaaacacacaagaaaacacaaggacataacaccacacgaaaaaagagaagaaagcacaaaagaaagaaaaaaaaatataagacaacaaaaaca

SEQ ID NO: 307170 - DNA, 2179 bp, Homo sapiens
ccgcgcgcgcacggctctcgcatgccgtggccgggtggctgcagcgctgcgccgcgccgcaccccggatccaagccgctcccgccgcccggccggcgcgcaggtgttcatgaaaaaaatgcacaaaatcctgcctggccggaataattcatgaagaaggggctggatccgtgggtcagagaacacaggaccagtttgccatcccaaggccgaagtctggtgtctcggatttgttcctgtgttgcccactcctgctggatcttgtccagtcgagggacaaacgtcctgaagaatgggaagaaaggaggttctgaaggcacagattccaataccatgccagaggttgaggacactggtgcttgaagggaaactggcacactctggagccccaagaagagctggagctggaggcatgcggcccacgaagggtagaagtaccagccatgaccaagagcccttcacatcatctggcaatccatccagaacccactgaatggaggacagcacagcgaggtctttctcattttgtaactgcaaaagctggaacaagagccagagaagccaaagaagcagtacaagtccaacagcttttagaataaccctgagaaaatggttgaattttgaccagttttgcaattggatactatgagaagagaccttccctcctgcactggatttcatcatcatacctggaggccattcctcatgggactttggccatctcatatccacctttaagcatgttattcccatttcagctgtggtagctctgggtatccttccctaggagaaaatattaatcttttctccctctgagttctggattaaactgtcttatctgaaactgggtcactttaggctagaagcaccactagacattcctgttctcagaagttgccaagttcatgtcatatctgtttcattgttaacgggatccacttctgcaagaggctgcctggccagatcagtgtgtctcctggtcagctccttgatgcccttctcctctcccctgcccaatcccagctgagacttgcactgtggtgactctgtcccctcctggtgctttgactggatgtgtgagagaaagtatggtctgtggcactgacatctttgtgtgtttggaggtgactggaacacggatccacccctggaggaaggtggccgtgaaggaggccagcctcagctcagcgttctactctcatcgctcttactcccgcctttttagtgcctgccctactccaggataattgtgcttttcttttttcagttaaatgttagcattgctatttttcattattgcaaagcagcacatgcttgttacaaaaactttggaagtgtagacaaataaaaagaagaaaaagctacttccaaatcctacttaccccaaagacaagatgatcatttagtcatatagtatcatacatatataatatgtacacatatattttaatgtaagtgtagtgtcacaatatcatgtatagtctttcataaaacacgttggcacttaatatcttatatgaacaactttctagagcaacaagcttagtttacagcaattgtaatgtaagagtactcatttacatagctacagcatcctttgtttacctcatctcttatggtttgatgtttaggttgtttccaacttttctccacctaaacagcattaataaatgtggttttagtttcaaaaaaaaaaaaaaaaaaaaaaaaaaaaaaaaacaagaacaaacaccaacaaaaaaaacacaaaaaaaaacaacaaacacaaaacaacaaacaaaaaaaacgagcaaacacaacaaaaaagtaccaaacaacacaagaaacaagaactaaaaacaccaaccccaccagagaaacaaacaagaaaacaaacgaacaaaaaaaagaggagcaacataaaaaaaaacgaaaccacaagagaacagacaagaaacaaacaaaacaagacaagagagaaaaaaaaaatacagaaaaaaaagaaaaacaaaagacgaaagaaaaaagaaaaacaacgaaagaacagacaacaacatggccaaccaaaaaacagcagacaaaaaaataaagaacacacaaaacgaaaaaaaacacacaagaaaacacaaggacataacaccacacgaaaaaagagaagaaagcacaaaagaaagaaaaaaaaatataagacaacaaaaaca

SEQ ID NO: 307171 - DNA, 2234 bp, Homo sapiens
ttggagtctttgtgaacctgctgtgattctgggggctgcctgatttgattatagaacacatgtgctccttaaagaaaaacactgtgcatggagataacagtcatcaaacatggaaacctttgagttgaatagctcatccagtttccccacattatttccagtggaggacccagcactcagagacgcccttctttaaagaagcagtttatccattctgcatatccagaggttctcctcatgactcagagcccctctgagaagagaaacagtctggtgtctcggatttgttcctgtgttgcccactcctgctggatcttgtccagtcgagggacaaacgtcctgaagaatgggaagaaaggaggttctgaaggcacagattccaataccatgccagaggttgaggacactggtgcttgaagggaaactggcacactctggagccccaagaagagctggagctggaggcatgcggcccacgaagggtagaagtaccagccatgaccaagagcccttcacatcatctggcaatccatccagaacccactgaatggaggacagcacagcgaggtctttctcattttgtaactgcaaaagctggaacaagagccagagaagccaaagaagcagtacaagtccaacagcttttagaataaccctgagaaaatggttgaattttgaccagttttgcaattggatactatgagaagagaccttccctcctgcactggatttcatcatcatacctggaggccattcctcatgggactttggccatctcatatccacctttaagcatgttattcccatttcagctgtggtagctctgggtatccttccctaggagaaaatattaatcttttctccctctgagttctggattaaactgtcttatctgaaactgggtcactttaggctagaagcaccactagacattcctgttctcagaagttgccaagttcatgtcatatctgtttcattgttaacgggatccacttctgcaagaggctgcctggccagatcagtgtgtctcctggtcagctccttgatgcccttctcctctcccctgcccaatcccagctgagacttgcactgtggtgactctgtcccctcctggtgctttgactggatgtgtgagagaaagtatggtctgtggcactgacatctttgtgtgtttggaggtgactggaacacggatccacccctggaggaaggtggccgtgaaggaggccagcctcagctcagcgttctactctcatcgctcttactcccgcctttttagtgcctgccctactccaggataattgtgcttttcttttttcagttaaatgttagcattgctatttttcattattgcaaagcagcacatgcttgttacaaaaactttggaagtgtagacaaataaaaagaagaaaaagctacttccaaatcctacttaccccaaagacaagatgatcatttagtcatatagtatcatacatatataatatgtacacatatattttaatgtaagtgtagtgtcacaatatcatgtatagtctttcataaaacacgttggcacttaatatcttatatgaacaactttctagagcaacaagcttagtttacagcaattgtaatgtaagagtactcatttacatagctacagcatcctttgtttacctcatctcttatggtttgatgtttaggttgtttccaacttttctccacctaaacagcattaataaatgtggttttagtttcaaaaaaaaaaaaaaaaaaaaaaaaaaaaaaaaacaagaacaaacaccaacaaaaaaaacacaaaaaaaaacaacaaacacaaaacaacaaacaaaaaaaacgagcaaacacaacaaaaaagtaccaaacaacacaagaaacaagaactaaaaacaccaaccccaccagagaaacaaacaagaaaacaaacgaacaaaaaaaagaggagcaacataaaaaaaaacgaaaccacaagagaacagacaagaaacaaacaaaacaagacaagagagaaaaaaaaaatacagaaaaaaaagaaaaacaaaagacgaaagaaaaaagaaaaacaacgaaagaacagacaacaacatggccaaccaaaaaacagcagacaaaaaaataaagaacacacaaaacgaaaaaaaacacacaagaaaacacaaggacataacaccacacgaaaaaagagaagaaagcacaaaagaaagaaaaaaaaatataagacaacaaaaaca

SEQ ID NO: 307172 - DNA, 586 bp, Homo sapiens
tacctaggaattcacaagctgtattccaatctagagttccctggtcatttcttactttgcttcaaaataattctcatctctgcagagctcatccagtttccccacattatttccagtggaggacccagcactcagagacgcccttctttaaaggtaaccagaggaaacagcgataatgccaggacccaagagtgtgtctgtgtcttccatcagcctgcagtgtgggatgtgacagctccccagagcatattctgaggggaggggctagatgacaggggtggctgtacttctgtgagacctcaggattcatggattcagccccagctgcccctgctatcaccgccagaggtggcaaatggcatttgacaggtgggctgcacagtgggtccagctcattggtgatgccccttggtaggaccagatctcctgtctgtcccatctgatccttattgctcctaatctttgtttagccccagctgctgttgtggctgtgactattataaaagatggcgtgaacgatgatatgaggaagggctttaattttgctggctaccaaggagagagtgaataaaaaaaatagatccaa

SEQ ID NO: 307173 - DNA, 391 bp, Homo sapiens
attgcttttgttttcatgcatgccctaaggtcacagagatgggggataacagtatgatgggagattctggtagggactcaaacctgatggtgttcagtagttgcaggtagactgctgctaaaagttggactttcaatttagaataaaataatgggtcaatgtatattatgtacattttctccatttcctgagtttagctttcaacagttaagatacttgcaacagcagaagtaacactacatagtgttacagtgtacaaatcccttgtcatttttattttaaaatatatttattacctcagtctctggctatattcacatagcgcaagggcacaagatcatcccttctgtttctctctctaaagctgagtaggttctgagtgaactgacag

SEQ ID NO: 307174 - DNA, 4073 bp, Homo sapiens
ggcactggccgccccaagggtaaagctgatggaggacccataccaacgcccagagttgcagttcttccccctgaggaagggaccctgggcagccggagagctcattgccgcctttcaactcattgaactagactacagtggccgacttgaggtcagcatgccctggcgtggctagcacaggctgtgagcccaacttgttagtccatcaggccatccagccctagggaatataaaacatggatatgtcccaggaccagcctccaggtctcttttccccagagaataaagactgcaggtttgtcctgaggtcacctcattggaccacttgaccccaaggaacattgcaagtattcatgtgctaggttcaccttgttgggccatcctgcatgcctcagacaccctgctcccttcctgcacgaagctgcttcccgagaccccctcccttccaccaatccagccttggttggttcctgtgcatttacatttcaccagtacctctccatatcccctccccacacctaggcttttcctcctttggcctgattcctcttcgccctctgactgtttccctcctacagccctcagtgcccagtgatgtggagccccaggatctggcacccctggttgagccccactctggacgcctgtcccttccacccaacgtgtgcccagtgctcagggagttccgtgttgaggtgctgttctggggtcttaggggacttggtcgtgtgcatctgctcgaggtggagcagccccaggttgtactggaggtggctgggcaacgtgtggagtctgaggtcctggccagctaccgtgagagccccaatttcactgagcttgtcaggcatcttcttagacttgccggagcagccttacttgcagcctccactcagcatcttggtgattgagcgccgggcctttggccacacagtccttgtgggttcccacattgtcccccacatgctgcgattcacatttcggggtcatgaggatcctcctgaggaggaaggagagatggaggagacaggggatatgatgcccaagggacctcaaggacagaagtccctggatcccttcttggctgaagcgggtatatccagacagctcctgaagcctcctctgaagaagctcccactaggaggcctcctaaatcaaggccctgggctggaggaagacatcccagatccagaggagctcgactgggggtccaagtactatgcgtcgctgcaggagctccaggggcagcacaactttgatgaagatgaaatggatgatcctggagattcagatggggtcaacctcatttctatggttggggagatccaagaccagggtgaggctgaagtcaaaggcactgtgtccccaaaaaaagcagttgccaccctgaagatctacaacaggtccctggaggaagaatttaaccactttgaagactggctgaatgtgtttcctctgtaccgagggcaagggggccaggatggaggtggagaagaggaaggatctggacaccttgtgggcaagttcaagggctccttcctcatttaccctgaatcagaggcagtgttgttctctgagccccagatctcccgggggatcccacagaaccggcccatcaagctcctggtcagagtgtatgttgtaaaggctaccaacctggctcctgcagaccccaatggcaaagcagacccttacgtggtggtgagcgctggccgggagcggcaggacaccaaggaacgctacatccccaagcagctcaaccccatctttggagagatcctggagctaagcatctctctcccagctgagacggagctgacggtcgccgtatttgaacatgacctcgtgggttctgacgacctcatcggggagacccacattgatctggaaaaccgattctatagccaccacagagcaaactgtgggctggcctcccagtatgaagtgtgggtccagcagggcccacaggagccattctgagtttctggccaaacacattcaagctcacattcccttttgtgtctccagatcctatgatttcatggaaggggaccctcccacccaccgccactgccaaccaagacatagctcagtggtcaagacttgggcttgggagtcgggatcctgtaacgaatgtcacttgaccgctttctttttttatgaaacagtctcgctctgtctcccaggttggagtgcagtggcacgatctcggctgactgcaacctccacctcctgggttcaagcgattctcctgcctcagcctccccagtagctgggattacaggcgtgggcccccatgtccagctaatttttatattttcgctctgtctcccaggttggagtgcagtggcacgatctcggctgactgcaacctccacctcctgggttcaagcgattctcctgcctcagcctccccagtagctgggattacaggcgtgggcccccatgtccagctaatttttatatttttagtagagacagggtttcaccatgttgtccaggctggtcttgaacccctgacctcaagtgatccacccacctctgcctcccaaagtgctgggattacaggtgtgagccaccatgccaggccctcttaacctcttcaagtctgttttctcatctgcaaaacagaggtaataagatcagtatcttcttaatggaagcacctggactacatttttttcattcattgttatcataaatgaggactaacctgtctcccgttgggagttttgaacctagacctcatgtcttcatgacgtcatcactgccccaggcccagctgtgtccctacaccagccccagctgacgcatcttctttttctgcctgtagagatggttacaatgcctggcgtgatgcattctggccttcgcagatcctggcggggctgtgccaacgctgtggcctccctgcccctgaataccgagccggtgctgtcaaggtgggcagcaaagtcttcctgacaccaccggagaccctgcccccagggatctcttcacatgtggattgacatctttcctcaagatgtgcctgctccacccccagttgacatcaagcctcggcagccaatcagctatgagctcagagttgtcatctggaacacggaggatgtggttctggatgacgagaatccactcaccggagagatgtcgagtgacatctatgtgaagagctgggtgaaggggttggagcatgacaagcaggagacagacgttcacttcaactccctgactggggaggggaacttcaattggcgctttgtgttccgctttgactacctgcccacggagcgggaggtgagcgtctggcgcaggtctggaccctttgccctggaggaggcggagttccggcagcctgcagtgctggtcctgcaggatccctggagttgcagctaccagacatggtgcgtggggcccggggccccgagctctgctctgtgcagctggcccgcaatggggccgggccgaggtgcaatctgtttcgctgccgccgcctgaggggctggtggccggtagtgaagctgaaggaggcagaggacgtggagcgggaggcgcaggaggctcaggctggcaagaagaagcgaaagcagaggaggaggaagggccggccagaagacctggagttcacagacatgggtggcaatgtgtacatcctcacgggcaaggtggaggcagagtttgagctgctgactgtggaggaggccgagaaacggccagtggggaaggggcggaagcagccagagcctctggagaaacccagccgccccaaaacttccttcaactggtttgtgaacccgctgaagacctttgtcttcttcatctggcgccggtactggcgcaccctggtgctgctgctactggtgctgctcaccgtcttcctcctcctggtcttctacaccatccctggccagatcagccaggtcatcttccgtcccctccacaagtgactctcgctgaccttggacactcacccagggtgccaacccttcaatgcctgctcctggaagtctttcttacccatgtgagctaccccagagtctagtgcttcctctgaataaacctatcacagccactga

SEQ ID NO: 307175 - DNA, 3646 bp, Homo sapiens
ggcactggccgccccaagggtaaagctgatggaggacccataccaacgcccagagttgcagttcttccccctgaggaagggaccctgggcagccggagagctcattgccgcctttcaactcattgaactagactacagtggccgacttgagccctcagtgcccagtgatgtggagccccaggatctggcacccctggttgagccccactctggacgcctgtcccttccacccaacgtgtgcccagtgctcagggagttccgtgttgaggtgctgttctggggtcttaggggacttggtcgtgtgcatctgctcgaggtggagcagccccaggttgtactggaggtggctgggcaacgtgtggagtctgaggtcctggccagctaccgtgagagccccaatttcactgagcttgtcaggcatcttcttagacttgccggagcagccttacttgcagcctccactcagcatcttggtgattgagcgccgggcctttggccacacagtccttgtgggttcccacattgtcccccacatgctgcgattcacatttcggggtcatgaggatcctcctgaggaggaaggagagatggaggagacaggggatatgatgcccaagggacctcaaggacagaagtccctggatcccttcttggctgaagcgggtatatccagacagctcctgaagcctcctctgaagaagctcccactaggaggcctcctaaatcaaggccctgggctggaggaagacatcccagatccagaggagctcgactgggggtccaagtactatgcgtcgctgcaggagctccaggggcagcacaactttgatgaagatgaaatggatgatcctggagattcagatggggtcaacctcatttctatggttggggagatccaagaccagggtgaggctgaagtcaaaggcactgtgtccccaaaaaaagcagttgccaccctgaagatctacaacaggtccctggaggaagaatttaaccactttgaagactggctgaatgtgtttcctctgtaccgagggcaagggggccaggatggaggtggagaagaggaaggatctggacaccttgtgggcaagttcaagggctccttcctcatttaccctgaatcagaggcagtgttgttctctgagccccagatctcccgggggatcccacagaaccggcccatcaagctcctggtcagagtgtatgttgtaaaggctaccaacctggctcctgcagaccccaatggcaaagcagacccttacgtggtggtgagcgctggccgggagcggcaggacaccaaggaacgctacatccccaagcagctcaaccccatctttggagagatcctggagctaagcatctctctcccagctgagacggagctgacggtcgccgtatttgaacatgacctcgtgggttctgacgacctcatcggggagacccacattgatctggaaaaccgattctatagccaccacagagcaaactgtgggctggcctcccagtatgaagtgtgggtccagcagggcccacaggagccattctgagtttctggccaaacacattcaagctcacattcccttttgtgtctccagatcctatgatttcatggaaggggaccctcccacccaccgccactgccaaccaagacatagctcagtggtcaagacttgggcttgggagtcgggatcctgtaacgaatgtcacttgaccgctttctttttttatgaaacagtctcgctctgtctcccaggttggagtgcagtggcacgatctcggctgactgcaacctccacctcctgggttcaagcgattctcctgcctcagcctccccagtagctgggattacaggcgtgggcccccatgtccagctaatttttatattttcgctctgtctcccaggttggagtgcagtggcacgatctcggctgactgcaacctccacctcctgggttcaagcgattctcctgcctcagcctccccagtagctgggattacaggcgtgggcccccatgtccagctaatttttatatttttagtagagacagggtttcaccatgttgtccaggctggtcttgaacccctgacctcaagtgatccacccacctctgcctcccaaagtgctgggattacaggtgtgagccaccatgccaggccctcttaacctcttcaagtctgttttctcatctgcaaaacagaggtaataagatcagtatcttcttaatggaagcacctggactacatttttttcattcattgttatcataaatgaggactaacctgtctcccgttgggagttttgaacctagacctcatgtcttcatgacgtcatcactgccccaggcccagctgtgtccctacaccagccccagctgacgcatcttctttttctgcctgtagagatggttacaatgcctggcgtgatgcattctggccttcgcagatcctggcggggctgtgccaacgctgtggcctccctgcccctgaataccgagccggtgctgtcaaggtgggcagcaaagtcttcctgacaccaccggagaccctgcccccagggatctcttcacatgtggattgacatctttcctcaagatgtgcctgctccacccccagttgacatcaagcctcggcagccaatcagctatgagctcagagttgtcatctggaacacggaggatgtggttctggatgacgagaatccactcaccggagagatgtcgagtgacatctatgtgaagagctgggtgaaggggttggagcatgacaagcaggagacagacgttcacttcaactccctgactggggaggggaacttcaattggcgctttgtgttccgctttgactacctgcccacggagcgggaggtgagcgtctggcgcaggtctggaccctttgccctggaggaggcggagttccggcagcctgcagtgctggtcctgcaggatccctggagttgcagctaccagacatggtgcgtggggcccggggccccgagctctgctctgtgcagctggcccgcaatggggccgggccgaggtgcaatctgtttcgctgccgccgcctgaggggctggtggccggtagtgaagctgaaggaggcagaggacgtggagcgggaggcgcaggaggctcaggctggcaagaagaagcgaaagcagaggaggaggaagggccggccagaagacctggagttcacagacatgggtggcaatgtgtacatcctcacgggcaaggtggaggcagagtttgagctgctgactgtggaggaggccgagaaacggccagtggggaaggggcggaagcagccagagcctctggagaaacccagccgccccaaaacttccttcaactggtttgtgaacccgctgaagacctttgtcttcttcatctggcgccggtactggcgcaccctggtgctgctgctactggtgctgctcaccgtcttcctcctcctggtcttctacaccatccctggccagatcagccaggtcatcttccgtcccctccacaagtgactctcgctgaccttggacactcacccagggtgccaacccttcaatgcctgctcctggaagtctttcttacccatgtgagctaccccagagtctagtgcttcctctgaataaacctatcacagccactga

SEQ ID NO: 307176 - DNA, 4113 bp, Homo sapiens
ggcactggccgccccaagggtaaagctgatggaggacccataccaacgcccagagttgcagttcttccccctgaggaagggaccctgggcagccggagagctcattgccgcctttcaactcattgaactagactacagtggccgacttgaggtcagcatgccctggcgtggctagcacaggctgtgagcccaacttgttagtccatcaggccatccagccctagggaatataaaacatggatatgtcccaggaccagcctccaggtctcttttccccagagaataaagactgcaggtttgtcctgaggtcacctcattggaccacttgaccccaaggaacattgcaagtattcatgtgctaggttcaccttgttgggccatcctgcatgcctcagacaccctgctcccttcctgcacgaagctgcttcccgagaccccctcccttccaccaatccagccttggttggttcctgtgcatttacatttcaccagtacctctccatatcccctccccacacctaggcttttcctcctttggcctgattcctcttcgccctctgactgtttccctcctacagccctcagtgcccagtgatgtggagccccaggatctggcacccctggttgagccccactctggacgcctgtcccttccacccaacgtgtgcccagtgctcagggagttccgtgttgaggtgctgttctggggtcttaggggacttggtcgtgtgcatctgctcgaggtggagcagccccaggttgtactggaggtggctgggcaacgtgtggagtctgaggtcctggccagctaccgtgagagccccaatttcactgagcttgtcaggcatcttcttagacttgccggagcagccttacttgcagcctccactcagcatcttggtgattgagcgccgggcctttggccacacagtccttgtgggttcccacattgtcccccacatgctgcgattcacatttcggggtcatgaggatcctcctgaggaggaaggagagatggaggagacaggggatatgatgcccaagggacctcaaggacagaagtccctggatcccttcttggctgaagcgggtatatccagacagctcctgaagcctcctctgaagaagctcccactaggaggcctcctaaatcaaggccctgggctggaggaagacatcccagatccagaggagctcgactgggggtccaagtactatgcgtcgctgcaggagctccaggggcagcacaactttgatgaagatgaaatggatgatcctggagattcagatggggtcaacctcatttctatggttggggagatccaagaccagggtgaggctgaagtcaaaggcactgtgtccccaaaaaaagcagttgccaccctgaagatctacaacaggtccctggaggaagaatttaaccactttgaagactggctgaatgtgtttcctctgtaccgagggcaagggggccaggatggaggtggagaagaggaaggatctggacaccttgtgggcaagttcaagggctccttcctcatttaccctgaatcagaggcagtgttgttctctgagccccagatctcccgggggatcccacagaaccggcccatcaagctcctggtcagagtgtatgttgtaaaggctaccaacctggctcctgcagaccccaatggcaaagcagacccttacgtggtggtgagcgctggccgggagcggcaggacaccaaggaacgctacatccccaagcagctcaaccccatctttggagagatcctggagctaagcatctctctcccagctgagacggagctgacggtcgccgtatttgaacatgacctcgtgggttctgacgacctcatcggggagacccacattgatctggaaaaccgattctatagccaccacagagcaaactgtgggctggcctcccagtatgaagtgtgggtccagcagggcccacaggagccattctgagtttctggccaaacacattcaagctcacattcccttttgtgtctccagatcctatgatttcatggaaggggaccctcccacccaccgccactgccaaccaagacatagctcagtggtcaagacttgggcttgggagtcgggatcctgtaacgaatgtcacttgaccgctttctttttttatgaaacagtctcgctctgtctcccaggttggagtgcagtggcacgatctcggctgactgcaacctccacctcctgggttcaagcgattctcctgcctcagcctccccagtagctgggattacaggcgtgggcccccatgtccagctaatttttatattttcgctctgtctcccaggttggagtgcagtggcacgatctcggctgactgcaacctccacctcctgggttcaagcgattctcctgcctcagcctccccagtagctgggattacaggcgtgggcccccatgtccagctaatttttatatttttagtagagacagggtttcaccatgttgtccaggctggtcttgaacccctgacctcaagtgatccacccacctctgcctcccaaagtgctgggattacaggtgtgagccaccatgccaggccctcttaacctcttcaagtctgttttctcatctgcaaaacagaggtaataagatcagtatcttcttaatggaagcacctggactacatttttttcattcattgttatcataaatgaggactaacctgtctcccgttgggagttttgaacctagacctcatgtcttcatgacgtcatcactgccccaggcccagctgtgtccctacaccagccccagctgacgcatcttctttttctgcctgtagagatggttacaatgcctggcgtgatgcattctggccttcgcagatcctggcggggctgtgccaacgctgtggcctccctgcccctgaataccgagccggtgctgtcaaggtgggcagcaaagtcttcctgacaccaccggagaccctgcccccagggatctcttcacatgtggattgacatctttcctcaagatgtgcctgctccacccccagttgacatcaagcctcggcagccaatcagctatgagctcagagttgtcatctggaacacggaggatgtggttctggatgacgagaatccactcaccggagagatgtcgagtgacatctatgtgaagagctgggtgaaggggttggagcatgacaagcaggagacagacgttcacttcaactccctgactggggaggggaacttcaattggcgctttgtgttccgctttgactacctgcccacggagcgggaggtgagcgtctggcgcaggtctggaccctttgccctggaggaggcggagttccggcagcctgcagtgctggtcctgcaggtctgggactatgaccgcatctctgccaatgacttccttggatccctggagttgcagctaccagacatggtgcgtggggcccggggccccgagctctgctctgtgcagctggcccgcaatggggccgggccgaggtgcaatctgtttcgctgccgccgcctgaggggctggtggccggtagtgaagctgaaggaggcagaggacgtggagcgggaggcgcaggaggctcaggctggcaagaagaagcgaaagcagaggaggaggaagggccggccagaagacctggagttcacagacatgggtggcaatgtgtacatcctcacgggcaaggtggaggcagagtttgagctgctgactgtggaggaggccgagaaacggccagtggggaaggggcggaagcagccagagcctctggagaaacccagccgccccaaaacttccttcaactggtttgtgaacccgctgaagacctttgtcttcttcatctggcgccggtactggcgcaccctggtgctgctgctactggtgctgctcaccgtcttcctcctcctggtcttctacaccatccctggccagatcagccaggtcatcttccgtcccctccacaagtgactctcgctgaccttggacactcacccagggtgccaacccttcaatgcctgctcctggaagtctttcttacccatgtgagctaccccagagtctagtgcttcctctgaataaacctatcacagccactga

SEQ ID NO: 307177 - DNA, 3981 bp, Homo sapiens
ggcactggccgccccaagggtaaagctgatggaggacccataccaacgcccagagttgcagttcttccccctgaggaagggaccctgggcagccggagagctcattgccgcctttcaactcattgaactagactacagtggccgacttgaggtcagcatgccctggcgtggctagcacaggctgtgagcccaacttgttagtccatcaggccatccagccctagggaatataaaacatggatatgtcccaggaccagcctccaggtctcttttccccagagaataaagactgcaggtttgtcctgaggtcacctcattggaccacttgaccccaaggaacattgcaagtattcatgtgctaggttcaccttgttgggccatcctgcatgcctcagacaccctgctcccttcctgcacgaagctgcttcccgagaccccctcccttccaccaatccagccttggttggttcctgtgcatttacatttcaccagtacctctccatatcccctccccacacctaggcttttcctcctttggcctgattcctcttcgccctctgactgtttccctcctacagccctcagtgcccagtgatgtggagccccaggatctggcacccctggttgagccccactctggacgcctgtcccttccacccaacgtgtgcccagtgctcagggagttccgtgttgaggtgctgttctggggtcttaggggacttggtcgtgtgcatctgctcgaggtggagcagccccaggttgtactggaggtggctgggcaacgtgtggagtctgaggtcctggccagctaccgtgagagccccaatttcactgagcttgtcaggcatcttcttagacttgccggagcagccttacttgcagcctccactcagcatcttggtgattgagcgccgggcctttggccacacagtccttgtgggttcccacattgtcccccacatgctgcgattcacatttcggggtcatgaggatcctcctgaggaggaaggagagatggaggagacaggggatatgatgcccaagggacctcaaggacagaagtccctggatcccttcttggctgaagcgggtatatccagacagctcctgaagcacaactttgatgaagatgaaatggatgatcctggagattcagatggggtcaacctcatttctatggttggggagatccaagaccagggtgaggctgaagtcaaaggcactgtgtccccaaaaaaagcagttgccaccctgaagatctacaacaggtccctggaggaagaatttaaccactttgaagactggctgaatgtgtttcctctgtaccgagggcaagggggccaggatggaggtggagaagaggaaggatctggacaccttgtgggcaagttcaagggctccttcctcatttaccctgaatcagaggcagtgttgttctctgagccccagatctcccgggggatcccacagaaccggcccatcaagctcctggtcagagtgtatgttgtaaaggctaccaacctggctcctgcagaccccaatggcaaagcagacccttacgtggtggtgagcgctggccgggagcggcaggacaccaaggaacgctacatccccaagcagctcaaccccatctttggagagatcctggagctaagcatctctctcccagctgagacggagctgacggtcgccgtatttgaacatgacctcgtgggttctgacgacctcatcggggagacccacattgatctggaaaaccgattctatagccaccacagagcaaactgtgggctggcctcccagtatgaagtgtgggtccagcagggcccacaggagccattctgagtttctggccaaacacattcaagctcacattcccttttgtgtctccagatcctatgatttcatggaaggggaccctcccacccaccgccactgccaaccaagacatagctcagtggtcaagacttgggcttgggagtcgggatcctgtaacgaatgtcacttgaccgctttctttttttatgaaacagtctcgctctgtctcccaggttggagtgcagtggcacgatctcggctgactgcaacctccacctcctgggttcaagcgattctcctgcctcagcctccccagtagctgggattacaggcgtgggcccccatgtccagctaatttttatattttcgctctgtctcccaggttggagtgcagtggcacgatctcggctgactgcaacctccacctcctgggttcaagcgattctcctgcctcagcctccccagtagctgggattacaggcgtgggcccccatgtccagctaatttttatatttttagtagagacagggtttcaccatgttgtccaggctggtcttgaacccctgacctcaagtgatccacccacctctgcctcccaaagtgctgggattacaggtgtgagccaccatgccaggccctcttaacctcttcaagtctgttttctcatctgcaaaacagaggtaataagatcagtatcttcttaatggaagcacctggactacatttttttcattcattgttatcataaatgaggactaacctgtctcccgttgggagttttgaacctagacctcatgtcttcatgacgtcatcactgccccaggcccagctgtgtccctacaccagccccagctgacgcatcttctttttctgcctgtagagatggttacaatgcctggcgtgatgcattctggccttcgcagatcctggcggggctgtgccaacgctgtggcctccctgcccctgaataccgagccggtgctgtcaaggtgggcagcaaagtcttcctgacaccaccggagaccctgcccccagggatctcttcacatgtggattgacatctttcctcaagatgtgcctgctccacccccagttgacatcaagcctcggcagccaatcagctatgagctcagagttgtcatctggaacacggaggatgtggttctggatgacgagaatccactcaccggagagatgtcgagtgacatctatgtgaagagctgggtgaaggggttggagcatgacaagcaggagacagacgttcacttcaactccctgactggggaggggaacttcaattggcgctttgtgttccgctttgactacctgcccacggagcgggaggtgagcgtctggcgcaggtctggaccctttgccctggaggaggcggagttccggcagcctgcagtgctggtcctgcaggtctgggactatgaccgcatctctgccaatgacttccttggatccctggagttgcagctaccagacatggtgcgtggggcccggggccccgagctctgctctgtgcagctggcccgcaatggggccgggccgaggtgcaatctgtttcgctgccgccgcctgaggggctggtggccggtagtgaagctgaaggaggcagaggacgtggagcgggaggcgcaggaggctcaggctggcaagaagaagcgaaagcagaggaggaggaagggccggccagaagacctggagttcacagacatgggtggcaatgtgtacatcctcacgggcaaggtggaggcagagtttgagctgctgactgtggaggaggccgagaaacggccagtggggaaggggcggaagcagccagagcctctggagaaacccagccgccccaaaacttccttcaactggtttgtgaacccgctgaagacctttgtcttcttcatctggcgccggtactggcgcaccctggtgctgctgctactggtgctgctcaccgtcttcctcctcctggtcttctacaccatccctggccagatcagccaggtcatcttccgtcccctccacaagtgactctcgctgaccttggacactcacccagggtgccaacccttcaatgcctgctcctggaagtctttcttacccatgtgagctaccccagagtctagtgcttcctctgaataaacctatcacagccactga

SEQ ID NO: 307178 - DNA, 2792 bp, Homo sapiens
tactgggaagaggaaagtctcctttggattctggacatcgggctgttgctgaagtccttgccttttagatctacaacaggtccctggaggaagaatttaaccactttgaagactggctgaatgtgtttcctctgtaccgagggcaagggggccaggatggaggtggagaagaggaaggatctggacaccttgtgggcaagttcaagggctccttcctcatttaccctgaatcagaggcagtgttgttctctgagccccagatctcccgggggatcccacagaaccggcccatcaagctcctggtcagagtgtatgttgtaaaggctaccaacctggctcctgcagaccccaatggcaaagcagacccttacgtggtggtgagcgctggccgggagcggcaggacaccaaggaacgctacatccccaagcagctcaaccccatctttggagagatcctggagctaagcatctctctcccagctgagacggagctgacggtcgccgtatttgaacatgacctcgtgggttctgacgacctcatcggggagacccacattgatctggaaaaccgattctatagccaccacagagcaaactgtgggctggcctcccagtatgaagtgtgggtccagcagggcccacaggagccattctgagtttctggccaaacacattcaagctcacattcccttttgtgtctccagatcctatgatttcatggaaggggaccctcccacccaccgccactgccaaccaagacatagctcagtggtcaagacttgggcttgggagtcgggatcctgtaacgaatgtcacttgaccgctttctttttttatgaaacagtctcgctctgtctcccaggttggagtgcagtggcacgatctcggctgactgcaacctccacctcctgggttcaagcgattctcctgcctcagcctccccagtagctgggattacaggcgtgggcccccatgtccagctaatttttatattttcgctctgtctcccaggttggagtgcagtggcacgatctcggctgactgcaacctccacctcctgggttcaagcgattctcctgcctcagcctccccagtagctgggattacaggcgtgggcccccatgtccagctaatttttatatttttagtagagacagggtttcaccatgttgtccaggctggtcttgaacccctgacctcaagtgatccacccacctctgcctcccaaagtgctgggattacaggtgtgagccaccatgccaggccctcttaacctcttcaagtctgttttctcatctgcaaaacagaggtaataagatcagtatcttcttaatggaagcacctggactacatttttttcattcattgttatcataaatgaggactaacctgtctcccgttgggagttttgaacctagacctcatgtcttcatgacgtcatcactgccccaggcccagctgtgtccctacaccagccccagctgacgcatcttctttttctgcctgtagagatggttacaatgcctggcgtgatgcattctggccttcgcagatcctggcggggctgtgccaacgctgtggcctccctgcccctgaataccgagccggtgctgtcaaggtgggcagcaaagtcttcctgacaccaccggagaccctgcccccagggatctcttcacatgtggattgacatctttcctcaagatgtgcctgctccacccccagttgacatcaagcctcggcagccaatcagctatgagctcagagttgtcatctggaacacggaggatgtggttctggatgacgagaatccactcaccggagagatgtcgagtgacatctatgtgaagagctgggtgaaggggttggagcatgacaagcaggagacagacgttcacttcaactccctgactggggaggggaacttcaattggcgctttgtgttccgctttgactacctgcccacggagcgggaggtgagcgtctggcgcaggtctggaccctttgccctggaggaggcggagttccggcagcctgcagtgctggtcctgcaggtctgggactatgaccgcatctctgccaatgacttccttggatccctggagttgcagctaccagacatggtgcgtggggcccggggccccgagctctgctctgtgcagctggcccgcaatggggccgggccgaggtgcaatctgtttcgctgccgccgcctgaggggctggtggccggtagtgaagctgaaggaggcagaggacgtggagcgggaggcgcaggaggctcaggctggcaagaagaagcgaaagcagaggaggaggaagggccggccagaagacctggagttcacagacatgggtggcaatgtgtacatcctcacgggcaaggtggaggcagagtttgagctgctgactgtggaggaggccgagaaacggccagtggggaaggggcggaagcagccagagcctctggagaaacccagccgccccaaaacttccttcaactggtttgtgaacccgctgaagacctttgtcttcttcatctggcgccggtactggcgcaccctggtgctgctgctactggtgctgctcaccgtcttcctcctcctggtcttctacaccatccctggccagatcagccaggtcatcttccgtcccctccacaagtgactctcgctgaccttggacactcacccagggtgccaacccttcaatgcctgctcctggaagtctttcttacccatgtgagctaccccagagtctagtgcttcctctgaataaacctatcacagccactga

SEQ ID NO: 307179 - DNA, 3952 bp, Homo sapiens
ggcactggccgccccaagggtaaagctgatggaggacccataccaacgcccagagttgcagttcttccccctgaggaagggaccctgggcagccggagagctcattgccgcctttcaactcattgaactagactacagtggccgacttgaggtcagcatgccctggcgtggctagcacaggctgtgagcccaacttgttagtccatcaggccatccagccctagggaatataaaacatggatatgtcccaggaccagcctccaggtctcttttccccagagaataaagactgcaggtttgtcctgaggtcacctcattggaccacttgaccccaaggaacattgcaagtattcatgtgctaggttcaccttgttgggccatcctgcatgcctcagacaccctgctcccttcctgcacgaagctgcttcccgagaccccctcccttccaccaatccagccttggttggttcctgtgcatttacatttcaccagtacctctccatatcccctccccacacctaggcttttcctcctttggcctgattcctcttcgccctctgactgtttccctcctacagccctcagtgcccagtgatgtggagccccaggatctggcacccctggttgagccccactctggacgcctgtcccttccacccaacgtgtgcccagtgctcagggagttccgtgttgaggtgctgttctggggtcttaggggacttggtcgtgtgcatctgctcgaggtggagcagccccaggttgtactggaggtggctgggcaacgtgtggagtctgaggtcctggccagctaccgtgagagccccaatttcactgagcttgtcaggcatcttcttagacttgccggagcagccttacttgcagcctccactcagcatcttggtgattgagcgccgggcctttggccacacagtccttgtgggttcccacattgtcccccacatgctgcgattcacatttcggggtcatgaggatcctcctgaggaggaaggagagatggaggagacaggggatatgatgcccaagggacctcaaggacagaagtccctggatcccttcttggctgaagcgggtatatccagacagctcctgaagcctcctctgaagaagctcccactaggaggcctcctaaatcaaggccctgggctggaggaagacatcccagatccagaggagctcgactgggggtccaagtactatgcgtcgctgcaggagctccaggggcagcacaactttgatgaagatgaaatggatgatcctggagattcagatggggtcaacctcatttctatggttggggagatccaagaccagggtgaggctgaagtcaaaggcactgtgtccccaaaaaaagcagttgccaccctgaagatctacaacaggtccctggaggaagaatttaaccactttgaagactggctgaatgtgtttcctctgtaccgagggcaagggggccaggatggaggtggagaagaggaaggatctggacaccttgtgggcaagttcaagggctccttcctcatttaccctgaatcagaggcagtgttgttctctgagccccagatctcccgggggatcccacagaaccggcccatcaagctcctggtcagagtgtatgttgtaaaggctaccaacctggctcctgcagaccccaatggcaaagcagacccttacgtggtggtgagcgctggccgggagcggcaggacaccaaggaacgctacatccccaagcagctcaaccccatctttggagagatcctggagctaagcatctctctcccagctgagacggagctgacggtcgccgtatttgaacatgacctcgtgggttctgacgacctcatcggggagacccacattgatctggaaaaccgattctatagccaccacagagcaaactgtgggctggcctcccagtatgaagtgtgggtccagcagggcccacaggagccattctgagtttctggccaaacacattcaagctcacattcccttttgtgtctccagatcctatgatttcatggaaggggaccctcccacccaccgccactgccaaccaagacatagctcagtggtcaagacttgggcttgggagtcgggatcctgtaacgaatgtcacttgaccgctttctttttttatgaaacagtctcgctctgtctcccaggttggagtgcagtggcacgatctcggctgactgcaacctccacctcctgggttcaagcgattctcctgcctcagcctccccagtagctgggattacaggcgtgggcccccatgtccagctaatttttatattttcgctctgtctcccaggttggagtgcagtggcacgatctcggctgactgcaacctccacctcctgggttcaagcgattctcctgcctcagcctccccagtagctgggattacaggcgtgggcccccatgtccagctaatttttatatttttagtagagacagggtttcaccatgttgtccaggctggtcttgaacccctgacctcaagtgatccacccacctctgcctcccaaagtgctgggattacaggtgtgagccaccatgccaggccctcttaacctcttcaagtctgttttctcatctgcaaaacagaggtaataagatcagtatcttcttaatggaagcacctggactacatttttttcattcattgttatcataaatgaggactaacctgtctcccgttgggagttttgaacctagacctcatgtcttcatgacgtcatcactgccccaggcccagctgtgtccctacaccagccccagctgacgcatcttctttttctgcctgtagagatggttacaatgcctggcgtgatgcattctggccttcgcagatcctggcggggctgtgccaacgctgtggcctccctgcccctgaataccgagccggtgctgtcaaggtgggcagcaaagtcttcctgacaccaccggagaccctgcccccagggatctcttcacatgtggattgacatctttcctcaagatgtgcctgctccacccccagttgacatcaagcctcggcagccaatcagctatgagctcagagttgtcatctggaacacggaggatgtggttctggatgacgagaatccactcaccggagagatgtcgagtgacatctatgtgaagaggaggtgagcgtctggcgcaggtctggaccctttgccctggaggaggcggagttccggcagcctgcagtgctggtcctgcaggatccctggagttgcagctaccagacatggtgcgtggggcccggggccccgagctctgctctgtgcagctggcccgcaatggggccgggccgaggtgcaatctgtttcgctgccgccgcctgaggggctggtggccggtagtgaagctgaaggaggcagaggacgtggagcgggaggcgcaggaggctcaggctggcaagaagaagcgaaagcagaggaggaggaagggccggccagaagacctggagttcacagacatgggtggcaatgtgtacatcctcacgggcaaggtggaggcagagtttgagctgctgactgtggaggaggccgagaaacggccagtggggaaggggcggaagcagccagagcctctggagaaacccagccgccccaaaacttccttcaactggtttgtgaacccgctgaagacctttgtcttcttcatctggcgccggtactggcgcaccctggtgctgctgctactggtgctgctcaccgtcttcctcctcctggtcttctacaccatccctggccagatcagccaggtcatcttccgtcccctccacaagtgactctcgctgaccttggacactcacccagggtgccaacccttcaatgcctgctcctggaagtctttcttacccatgtgagctaccccagagtctagtgcttcctctgaataaacctatcacagccactga

SEQ ID NO: 307180 - DNA, 1135 bp, Homo sapiens
  misc_feature (58)..(58): n is a, c, g, or t
  misc_feature (61)..(61): n is a, c, g, or t
  misc_feature (68)..(68): n is a, c, g, or t
attcggcacagaactcggggtggagcaggcacatcttgaggaaagatgtgctctccanatnacaccantcaaagccttcggcagaccaatcagctatgagctcagagttgtcatctggaacacggaggatgtggttctggatgacgagaatccactcaccggagagatgtcgagtgacatctatgtgaagagctgggtgaaggggttggagcatgacaagcaggagacagacgttcacttcaactccctgactggggaggggaacttcaattggcgctttgtgttccgctttgactacctgcccacggagcgggaggtgagcgtctggcgcaggtctggaccctttgccctggaggaggcggagttccggcagcctgcagtgctggtcctgcaggtctgggactatgaccgcatctctgccaatgacttccttggatccctggagttgcagctaccagacatggtgcgtggggcccggggccccgagctctgctctgtgcagctggcccgcaatggggccgggccgaggtgcaatctgtttcgctgccgccgcctgaggggctggtggccggtagtgaagctgaaggaggcagaggacgtggagcgggaggcgcaggaggctcaggctggcaagaagaagcgaaagcagaggaggaggaagggccggccagaagacctggagttcacagacatgggtggcaatgtgtacatcctcacgggcaaggtggaggcagagtttgagctgctgactgtggaggaggccgagaaacggccagtggggaaggggcggaagcagccagagcctctggagaaacccagccgccccaaaacttccttcaactggtttgtgaacccgctgaagacctttgtcttcttcatctggcgccggtactggcgcaccctggtgctgctgctactggtgctgctcaccgtcttcctcctcctggtcttctacaccatccctggccagatcagccaggtcatcttccgtcccctccacaagtgactctcgctgaccttggacactcacccagggtgccaacccttcaatgcctgctcctggaagtctttcttacccatgtgagctaccccagagtctagtgcttcctctgaataaacctatcacagccactga

SEQ ID NO: 307181 - DNA, 1200 bp, Homo sapiens
ggcactggccgccccaagggtaaagctgatggaggacccataccaacgcccagagttgcagttcttccccctgaggaagggaccctgggcagccggagagctcattgccgcctttcaactcattgaactagactacagtggccgacttgaggtcagcatgccctggcgtggctagcacaggctgtgagcccaacttgttagtccatcaggccatccagccctagggaatataaaacatggatatgtcccaggaccagcctccaggtctcttttccccagagaataaagactgcaggtttgtcctgaggtcacctcattggaccacttgaccccaaggaacattgcaagtattcatgtgctaggttcaccttgttgggccatcctgcatgcctcagacaccctgctcccttcctgcacgaagctgcttcccgagaccccctcccttccaccaatccagccttggttggttcctgtgcatttacatttcaccagtacctctccatatcccctccccacacctaggcttttcctcctttggcctgattcctcttcgccctctgactgtttccctcctacagccctcagtgcccagtgatgtggagccccaggatctggcacccctggttgagccccactctggacgcctgtcccttccacccaacgtgtgcccagtgctcagggagttccgtgttgaggtgctgttctggggtcttaggggacttggtcgtgtgcatctgctcgaggtggagcagccccaggttgtactggaggtggctgggcaacgtgtggagtctgaggtcctggccagctaccgtgagagccccaatttcactgagcttgtcaggcatcttcttacagcaagtgactgattcctcatgttcatcgcccccatttgggcagaggcttcaggggcatctttctgtttgtggttccctcttaagcataattcaagggagtcaccaagactttgttgaggaagttgctttgtgagtgtgtaatgacagaaaccaaggatctgtacacaaagtcaaagtactaaccgataggaaatgaaatattgcaaaactcaagatactaacatgtgtgtctctccaaaagggaggccaccctaaaaagtaatatgttcctagtcactaaaggtgtctgagaggaagcacagtaattgtttgctggacatttggggcaaggatttccttctta

SEQ ID NO: 307182 - DNA, 1364 bp, Homo sapiens
ggcactggccgccccaagggtaaagctgatggaggacccataccaacgcccagagttgcagttcttccccctgaggaagggaccctgggcagccggagagctcattgccgcctttcaactcattgaactagactacagtggccgacttgaggtcagcatgccctggcgtggctagcacaggctgtgagcccaacttgttagtccatcaggccatccagccctagggaatataaaacatggatatgtcccaggaccagcctccaggtctcttttccccagagaataaagactgcaggtttgtcctgaggtcacctcattggaccacttgaccccaaggaacattgcaagtattcatgtgctaggttcaccttgttgggccatcctgcatgcctcagacaccctgctcccttcctgcacgaagctgcttcccgagaccccctcccttccaccaatccagccttggttggttcctgtgcatttacatttcaccagtacctctccatatcccctccccacacctaggcttttcctcctttggcctgattcctcttcgccctctgactgtttccctcctacagccctcagtgcccagtgatgtggagccccaggatctggcacccctggttgagccccactctggacgcctgtcccttccacccaacgtgtgcccagtgctcagggagttccgtgttgaggtgctgttctggggtcttaggggacttggtcgtgtgcatctgctcgaggtggagcagccccaggttgtactggaggtggctgggcaacgtgtggagtctgaggtcctggccagctaccgtgagagccccaatttcactgagcttgtcaggcatcttcttagacttgccggagcagccttacttgcagcctccactcagcatcttggtgattgagcgccgggcctttggccacacagtccttgtgggttcccacattgtcccccacatgctgcgattcacatttcggggtcatgaggatcctcctgaggaggaaggagagatggaggagacaggggatatgatgcccaagggacctcaaggacagaagtccctggatcccttcttggctgaagcgggtatatccagacagctcctgaagcctcctctgaagaagctcccactaggaggcctcctaaatcaaggccctgggctggaggaagacatcccagatccagaggagctcgactgggggtccaagtactatgcgtcgctgcaggagctccaggggcagagatggggtctttatctgttatccagactggtctcaaactcctgggttcaagtgatcttcccacctcagcctccccagtagctaggaccataagtacataccactacactcagctaatt

SEQ ID NO: 307183 - DNA, 305 bp, Homo sapiens
  misc_feature (1)..(3): n is a, c, g, or t
  misc_feature (5)..(5): n is a, c, g, or t
nnncnctgctttcgtggtactgctgacttcgtggtgctggctgagataggtttattcagaggaagcactagactctggggtagcgtcacatggataagaacgtcttcctcctcctggtcttctacaccatccctggccagatcagccaggtcatcttccgtcccctccacaagtgactctcgctgaccttggacactcacccagggtgccaacccttcaatgcctgctcctggaagtctttcttacccatgtgagctaccccagagtctagtgcttcctctgaataaacctatcacagccactga

SEQ ID NO: 307184 - DNA, 357 bp, Homo sapiens
gtgaggagtgggttctccatgtagctccagccctgacgctcacccaccccggccccagctgggtgaaggggttggagcatgacaagcaggagacagacgttcacttcaactccctgactggggaggggaacttcaattggcgctttgtgttccgctttgactacctgcccacggagcgggaggtgagcgtctggcgcaggtctggaccctttgccctggaggaggcggagttccggcagcctgcagtgctggtcctgcaggtctgggactatgaccgcatctctgccaatgacttccttggtattacaatgcttagccttccccaccctcagcccctgcctccagccctcacctccg

SEQ ID NO: 307185 - DNA, 460 bp, Homo sapiens
caagcaacatcaagtgttcctctcccatatgagtcatcttgaagcaatccacacaacctctgggacctttttaaccccagataatggctcagacacagggagatggaattcacatcaaaggcaaatgtgtaagctgcctggctttgaaacttcatactccacaagagacaggattagttacacaaatcaggaaagcccaggttagatgcagagtatcagtagagtctatagagtcctcccttccttccccataaacggtttcacctagtgacatagtaccatcttaatctgtctcctgtttctttttaaaatatccaaacctccatttgatttgctagattaaactatgtcccattttaatcagaaggtatctgtccattgtgagctcctacatttattctgcttctctaccacaaagtctttgccgtggcctctctattctggtctctttctgtactca

SEQ ID NO: 307186 - DNA, 1332 bp, Homo sapiens
atcaaaaaagcagattgaaattttctttagaaaagattctccatgatttgaattgcattctctttaaactcaccaatgtaatcattttgggaggagggagaacccacttgctttccaaatgggtttatttaaacccacaaactcaagaggttgttgggggaattaggaaaataagggttttcaatgacctacattgctaggtagaggctgtgatccatgggatttcattctaatgaccatgtgaagatgtttgagtcctcctttgcctttcctcagaaagaatccttctaaggcacaaatcccttagatggataatgtaaggtattgttaactcactcatattgagatcatttttagagataccaggttttatgtatcagcactagatggttccaccctcatgggataaaactgcttacaagtattttgaaagaaaaactgaccaaaattcttaaattgttactaaggcaatcatgcacaggtgacgtatgtcttatctgatttgtttttaactccttggtgcccaaagctcagaagggaattccactgccagcaatgaacatacctggaaaagaaagtaagcaatctgggattttttttctgggttagtaaagaatttttgcaataagttttatcagttgattcaaactgatgtgcatcttaatgatcaaatgtgcacattacataaattaagtccactgatacaacttcttacacatgtatctctagtagctctggcaaacccaatatctgacaccactttggactcaagagactcagtaacgtattatcctgtttatttagcttggttttagctgtgttctctctggataacccacttgatgttaggaacattacttctctgcttattccatattaatactgtgttaggtattttaagaagcaagttattaaataagaaaagtcaaagtattaattcttaccttctattatcctatattagcttcaatacatccaaaccaaatggctgttaggtagatttatttttatataagcatgtttattttgatcagatgttttaacttggatttgaaaaaatacatttatgagatgttttataagatgtgtaaatatagaactgtatttattactatagtaaaggttcagtaacattaaggaccatgataatgataataaaccttgtacagtggcatattctttgatttatattgtgtttctctgcccattttctttaaattcattaactgtatatatgtaaatatatagtacttgtaaatagattccaaatttgcttttctattgggtaaaaaataaatttgtaataaaatgtgtgactatgaaacaaaatat

SEQ ID NO: 307187 - DNA, 463 bp, Homo sapiens
agcttgagtgacttgactcaggtcacacagctatttagtggtgaagccagtgtgaacccaggcaatctgacctctaagtttggatatctaactgctctgctgtgttgctttcccattatatgcttaagctaactaattagaaaagggcatatctattttcctggatataatatatttggtgagttcttactaatggtgtgacttttggtatctttagagttcccaaattgaaacgtctttttaaggagaggcacttgaactgggaggaccttatctaacatttagaataaaaatactgttgcctagagaatatagaccaagtaaataacatttctcacataatgaatcctagacaagcacatcacatttacacaaacccaatctctggtgttgaaggtctaaagaactagaataggcgagctgtgctcttttgtgcaaagctctttaggggaactgattgctt

SEQ ID NO: 307188 - DNA, 695 bp, Homo sapiens
ctaagtggtaaaaaacacacacacagtgatgactcatcagttgaaatcaaatccttcatcccaaaaaagtgtttttataagaagtgggtgtttttttctttccccaaaggcagactgcataatatttggtgcttctcttttctgaataatttattccgtttcagtggaaattgacagtttcagactggagccaataacattttattttcagagctatgcttggtacccccattatccagggatctgcttttgcctacaaccctaaggggagttcagccatcaaaccgtttcacaccagcacaattcccctcttcctcccttccctttgaccagctactaacctgttcttctgaagaccctggagcagaataaatgcctagagagagcatttggagaccgcatccaggtatacaaaagcatggcaagtttattgtttttcaggagcccaatcacagaatcgatccatatctcctgacccaggtactccactcagaagtctgttcttttcacagctctcctctacaaaacattttctttctgttgtttctttcctaagactctacaactctgaaagaaagcaacgtgattcacttctgatccgtgaaagtaaacatcctattccattccatttgtcttcttggaagcttccacaaatgtctccttgctagaaaacaaaaatacaaaacttgtactca

SEQ ID NO: 307189 - DNA, 400 bp, Homo sapiens
tttctctaatgtgagctgcttcctgttgctaaaacactgccccttcaaatgagattgtttgctaagtgaggcatctccttcctctttcttccttggatgaattagcaagcaagaagagtcagtctgaggctcctcactgtgacggactgaggagctttatttactccctgcggatagtggcctgccaccagagaggccacaggccggagtgatggagctgactcatagggtaaggagaaagtggcctggatcgttgacagagcacgtgaggacacaagaagaaggcatctgtttacacaccaggaggagagacctcacaagaacccaatcatgatggcactttgatcttagaccgccagcctccagaacagtgagaaaataaatttctgttgtttatgct

SEQ ID NO: 307190 - DNA, 540 bp, Homo sapiens
ctaagtggtaaaaaacacacacacagtgatgactcatcagttgaaatcaaatccttcatcccaaaaaagtgtttttataagaagtgggtgtttttttctttccccaaaggcagactgcataatatttggtgcttctcttttctgaataatttattccgtttcagtggaaattgacagtttcagactggagccaataacattttattttcagagctatgcttggtacccccattatccagggatctgcttttgcctacaaccctaaggggagttcagccatcaaaccgtttcacaccagcacaattcccctcttcctcccttccctttgaccagctactaacctgttcttctgaagaccctggagcagaataaatgcctagagagagcatttggagaccgcatcacgtgaggacacaagaagaaggcatctgtttacacaccaggaggagagacctcacaagaacccaatcatgatggcactttgatcttagaccgccagcctccagaacagtgagaaaataaatttctgttgtttatgct

SEQ ID NO: 307191 - DNA, 219 bp, Homo sapiens
ggaaccaatgccacagggtaactttgtgaaggtgtggaccattttctgaaaccaacttaaggcaccagctcatattggaagcacgtgaggacacaagaagaaggcatctgtttacacaccaggaggagagacctcacaagaacccaatcatgatggcactttgatcttagaccgccagcctccagaacagtgagaaaataaatttctgttgtttatgct

SEQ ID NO: 307192 - DNA, 303 bp, Homo sapiens
aggtggcgtggggaggtggggaacggcccgggactcgcacgtggaggtggagcgcggacgcctccctcagccagggcaagactaaggagctgggcgaacagtcagcttcaacaagcagcaggtttgatcaaccattcttctcagagcaagaaacctaccatactgcacgtgaggacacaagaagaaggcatctgtttacacaccaggaggagagacctcacaagaacccaatcatgatggcactttgatcttagaccgccagcctccagaacagtgagaaaataaatttctgttgtttatgct

SEQ ID NO: 307193 - DNA, 4630 bp, Homo sapiens
actggaagcgtccaaagagggacggctgtcagccctgcttgactgagaacccaccagctcatcccagacacctcatagcaacctatttatacaaagggggaaagaaacacctgagcagaatggaatcattatttttttcccaaggagaaaaccggggtaaagggagggaagcaattcaatttgaagtccctgtgaatgggctttcagaaggcaattaaagaaatccactcagagaggacttggggtgaaacttgggtcctgtggttttctgattgtaagtggaagcaggtcttgcacacgctgttggcaaatgtcaggaccaggttaagtgactggcagaaaaacttccaggtggaacaagcaacccaggttctgctgcaagcttgaaggagcctggagcgggagaaagctaacttgaacatgacctgttgcatttggcaagttctagcaacatgctcctaaggaagcgatacaggcacagaccatgcagactccagttcctcctgctgctcctgatgctgggatgcgtcctgatgatggtggcgatgttgcaccctccccaccacaccctgcaccagactgtcacagcccaagccagcaagcacagccctgaagccaggtaccgcctggactttggggaatcccaggattgggtactggaagctgaggatgagggtgaagagtacagccctctggagggcctgccaccctttatctcactgcgggaggatcagctgctggtggccgtggccttaccccaggccagaaggaaccagagccagggcaggagaggtgggagctaccgcctcatcaagcagccaaggaggcaggataaggaagccccaaagagggactggggggctgatgaggacggggaggtgtctgaagaagaggagttgaccccgttcagcctggacccacgtggcctccaggaggcactcagtgcccgcatccccctccagagggctctgcccgaggtgcggcacccactgtgtctgcagcagcaccctcaggacagcctgcccacagccagcgtcatcctctgtttccatgatgaggcctggtccactctcctgcggactgtacacagcatcctcgacacagtgcccagggccttcctgaaggagatcatcctcgtggacgacctcagccagcaaggacaactcaagtctgctctcagcgaatatgtggccaggctggagggggtgaagttactcaggagcaacaagaggctgggtgccatcagggcccggatgctgggggccaccagagccaccggggatgtgctcgtcttcatggatgcccactgcgagtgccacccaggctggctggagcccctcctcagcagaatagctggtgacaggagccgagtggtatctccggtgatagatgtgattgactggaagactttccagtattacccctcaaaggacctgcagcgtggggtgttggactggaagctggatttccactgggaacctttgccagagcatgtgaggaaggccctccagtcccccataagccccatcaggagccctgtggtgcccggagaggtggtggccatggacagacattacttccaaaacactggagcgtatgactctcttatgtcgctgcgaggtggtgaaaacctcgaactgtctttcaaggcctggctctgtggtggctctgttgaaatccttccctgctctcgggtaggacacatctaccaaaatcaggattcccattcccccctcgaccaggaggccaccctgaggaacagggttcgcattgctgagacctggctggggtcattcaaagaaaccttctacaagcatagcccagaggccttctccttgagcaaggctgagaagccagactgcatggaacgcttgcagctgcaaaggagactgggttgtcggacattccactggtttctggctaatgtctaccctgagctgtacccatctgaacccaggcccagtttctctggaaagctccacaacactggacttgggctctgtgcagactgccaggcagaaggggacatcctgggctgtcccatggtgttggctccttgcagtgacagccggcagcaacagtacctgcagcacaccagcaggaaggagattcactttggcagcccacagcacctgtgctttgctgtcaggcaggagcaggtgattcttcagaactgcacggaggaaggcctggccatccaccagcagcactgggacttccaggagaatgggatgattgtccacattctttctgggaaatgcatggaagctgtggtgcaagaaaacaataaagatttgtacctgcgtccgtgtgatggaaaagcccgccagcagtggcgttttgaccagatcaatgctgtggatgaacgatgaatgtcaatgtcagaaggaaaagagaattttggccatcaaaatccagctccaagtgaacttaaagagcttatatatttcatgaagctgatccttttgtgtgtgtgctcctggtgttaggagagaaaaaagctctatgaaagaatataggaagtttctccttttcacaccttatttcattgactgctggctgctttaaaaaaaaaaaaaaaggatccattgtaccgttgtcttcatcactgggaaatgattattacatagtacagaagattctttgtttttctccactgagcacttaacaattgctttctctctggcctggacattctctggcagcacctccaggatacataaattcaatggatcaatttatttgtcttcaaatggccttaacttggattgtctgtttggccaaccatgaaaattaaagagtgaagcagatgtaatggcctgacattccaaaaactctgaattgggtttattagcacaaatgttgtgttcatttgttgagccatatctcagaagaaggaaagggagctacagaaaggaggtttaggattgcagagaagatgcaagagcactttggcccaattctccagctcaacccagcagctgaaaagcttcaagagatctaggaaaagacattttcatgttaatgagaatttccaccattgtagagaatttccttcctactgagaatctacctctattccccctgccctagctcttctctaacttggttaaccataaccataaccagattcccttgcaatcgatttctctttagtcgttggtgttagaagtaccagcacaatttgagcattcccattaacaaaggtgttcacagttgagaaactctcctgccgggcgcggtggctcatgcctgtaattccagcactttgggaggcagagttgggaggatcacctgatgtcaggggtttgagaccagcctggtcaacattgcaaaaccttgtctctactaaaaatacaaaaattagctgggcatggtggcgcatacctgtaatcccagctacttgggaggctgaggcaagagaatcgcttgaacccaggaggcagaggttgcagtgagctgagatcatgccattgcactccaacctgggtgacagagtgagactccatctcaaaaaaaaaaaaaaaagagagaaactctcctgatgccctgttacagggtttgcactgactggagcagaaacagcaacctttctaaaaaagcaaacctttttcctgggaggaaaatgccagagcctgagccaaaattcttatgacaggtaacatttgggtgttaatgtccatgagagctgacagggccatctctgagcccatataactgtctggaacccccaaatgtgtccacaggttgaatgtccatgagtgtgggaagaacacggctcatctggagcacagctgaggctagtaagagctaaatgactttccttgctatgacttggcttacctgaattagctgtaagagttgccgaatgggatgggttctgctatttaataaacagcattcatattcatttttccccagatggagttacctacctttccacatggtcagcttagaaatcttcccctaaagatgctaatctcctttgggctgtctcagaacacagtatccttcaaataagaaaaactgagtgggaagtgcagtgtttccaaacaatacctatcataactacgtattcattgtctacctgctaagtcaagggttcactgcatttctccttcctcagaatacactctggacctgtgctgtctaatatggtagccactaacaaaatgtggccattttgatggaaatccattaaaatcaaagaaaatttaaaactcaattcctcaattgggctggccacatttcaaatgctcactacccacctgtggctagggtctacttctactgtattggcgagcatggatatagaacatttcatcacagttctgttggaccaatctagatagattcattatcccatctagagaagagactttagtcactgtcttcttgcttcagacccatctatatttaaaacaaatttccctaaatcctgagactgagacggagctacaaattctcagatggcgaccgtgtaaatggtattagcggctgaagaaaaaaaatttttcaagacctctgttttttaactgaactttatcattggcattgtgggtctttgaagttgctgggataaattaatataattaaataaaagactgaatttaattgcaaaaaaatatta

SEQ ID NO: 307194 - DNA, 2917 bp, Homo sapiens
agcggagtggcgcattcccggaggaaggtcatgtaccagttaaacgccaccgttttgcctcttagtgcacatgcttgagcccacttgcccaactcctgagatcatatcgggaagctgatcaccaatttcaggctgagaagccagactgcatggaacgcttgcagctgcaaaggagactgggttgtcggacattccactggtttctggctaatgtctaccctgagctgtacccatctgaacccaggcccagtttctctggaaagctccacaacactggacttgggctctgtgcagactgccaggcagaaggggacatcctgggctgtcccatggtgttggctccttgcagtgacagccggcagcaacagtacctgcagcacaccagcaggaaggagattcactttggcagcccacagcacctgtgctttgctgtcaggcaggagcaggtgattcttcagaactgcacggaggaaggcctggccatccaccagcagcactgggacttccaggagaatgggatgattgtccacattctttctgggaaatgcatggaagctgtggtgcaagaaaacaataaagatttgtacctgcgtccgtgtgatggaaaagcccgccagcagtggcgttttgaccagatcaatgctgtggatgaacgatgaatgtcaatgtcagaaggaaaagagaattttggccatcaaaatccagctccaagtgaacttaaagagcttatatatttcatgaagctgatccttttgtgtgtgtgctcctggtgttaggagagaaaaaagctctatgaaagaatataggaagtttctccttttcacaccttatttcattgactgctggctgctttaaaaaaaaaaaaaaaggatccattgtaccgttgtcttcatcactgggaaatgattattacatagtacagaagattctttgtttttctccactgagcacttaacaattgctttctctctggcctggacattctctggcagcacctccaggatacataaattcaatggatcaatttatttgtcttcaaatggccttaacttggattgtctgtttggccaaccatgaaaattaaagagtgaagcagatgtaatggcctgacattccaaaaactctgaattgggtttattagcacaaatgttgtgttcatttgttgagccatatctcagaagaaggaaagggagctacagaaaggaggtttaggattgcagagaagatgcaagagcactttggcccaattctccagctcaacccagcagctgaaaagcttcaagagatctaggaaaagacattttcatgttaatgagaatttccaccattgtagagaatttccttcctactgagaatctacctctattccccctgccctagctcttctctaacttggttaaccataaccataaccagattcccttgcaatcgatttctctttagtcgttggtgttagaagtaccagcacaatttgagcattcccattaacaaaggtgttcacagttgagaaactctcctgccgggcgcggtggctcatgcctgtaattccagcactttgggaggcagagttgggaggatcacctgatgtcaggggtttgagaccagcctggtcaacattgcaaaaccttgtctctactaaaaatacaaaaattagctgggcatggtggcgcatacctgtaatcccagctacttgggaggctgaggcaagagaatcgcttgaacccaggaggcagaggttgcagtgagctgagatcatgccattgcactccaacctgggtgacagagtgagactccatctcaaaaaaaaaaaaaaaagagagaaactctcctgatgccctgttacagggtttgcactgactggagcagaaacagcaacctttctaaaaaagcaaacctttttcctgggaggaaaatgccagagcctgagccaaaattcttatgacaggtaacatttgggtgttaatgtccatgagagctgacagggccatctctgagcccatataactgtctggaacccccaaatgtgtccacaggttgaatgtccatgagtgtgggaagaacacggctcatctggagcacagctgaggctagtaagagctaaatgactttccttgctatgacttggcttacctgaattagctgtaagagttgccgaatgggatgggttctgctatttaataaacagcattcatattcatttttccccagatggagttacctacctttccacatggtcagcttagaaatcttcccctaaagatgctaatctcctttgggctgtctcagaacacagtatccttcaaataagaaaaactgagtgggaagtgcagtgtttccaaacaatacctatcataactacgtattcattgtctacctgctaagtcaagggttcactgcatttctccttcctcagaatacactctggacctgtgctgtctaatatggtagccactaacaaaatgtggccattttgatggaaatccattaaaatcaaagaaaatttaaaactcaattcctcaattgggctggccacatttcaaatgctcactacccacctgtggctagggtctacttctactgtattggcgagcatggatatagaacatttcatcacagttctgttggaccaatctagatagattcattatcccatctagagaagagactttagtcactgtcttcttgcttcagacccatctatatttaaaacaaatttccctaaatcctgagactgagacggagctacaaattctcagatggcgaccgtgtaaatggtattagcggctgaagaaaaaaaatttttcaagacctctgttttttaactgaactttatcattggcattgtgggtctttgaagttgctgggataaattaatataattaaataaaagactgaatttaattgcaaaaaaatatta

SEQ ID NO: 307195 - DNA, 4006 bp, Homo sapiens
aggtggcgtggggaggtggggaacggcccgggactcgcacgtggaggtggagcgcggacgcctccctcagccagggcaagactaaggagctgggcgaacagtcagcttcaacaagcagcaggtttgatcaaccattcttctcagagcaagaaacctaccatactgcatttcttcctgctatcatgtgaagaagaacgtgtttgcttccccttctaccatgattgtaagtttcctgaggcctccccagcctagcagaactcacgtgaggacacaagaagaaggcatctgtttacacaccaggaggagagacctcacaagaacccaatcatgatggcactttgatcttagaccgccagcctccagaacagtgtctgcagcagcaccctcaggacagcctgcccacagccagcgtcatcctctgtttccatgatgaggcctggtccactctcctgcggactgtacacagcatcctcgacacagtgcccagggccttcctgaaggagatcatcctcgtggacgacctcagccagcaaggacaactcaagtctgctctcagcgaatatgtggccaggctggagggggtgaagttactcaggagcaacaagaggctgggtgccatcagggcccggatgctgggggccaccagagccaccggggatgtgctcgtcttcatggatgcccactgcgagtgccacccaggctggctggagcccctcctcagcagaatagctggtgacaggagccgagtggtatctccggtgatagatgtgattgactggaagactttccagtattacccctcaaaggacctgcagcgtggggtgttggactggaagctggatttccactgggaacctttgccagagcatgtgaggaaggccctccagtcccccataagccccatcaggagccctgtggtgcccggagaggtggtggccatggacagacattacttccaaaacactggagcgtatgactctcttatgtcgctgcgaggtggtgaaaacctcgaactgtctttcaaggcctggctctgtggtggctctgttgaaatccttccctgctctcgggtaggacacatctaccaaaatcaggattcccattcccccctcgaccaggaggccaccctgaggaacagggttcgcattgctgagacctggctggggtcattcaaagaaaccttctacaagcatagcccagaggccttctccttgagcaaggctgagaagccagactgcatggaacgcttgcagctgcaaaggagactgggttgtcggacattccactggtttctggctaatgtctaccctgagctgtacccatctgaacccaggcccagtttctctggaaagctccacaacactggacttgggctctgtgcagactgccaggcagaaggggacatcctgggctgtcccatggtgttggctccttgcagtgacagccggcagcaacagtacctgcagcacaccagcaggaaggagattcactttggcagcccacagcacctgtgctttgctgtcaggcaggagcaggtgattcttcagaactgcacggaggaaggcctggccatccaccagcagcactgggacttccaggagaatgggatgattgtccacattctttctgggaaatgcatggaagctgtggtgcaagaaaacaataaagatttgtacctgcgtccgtgtgatggaaaagcccgccagcagtggcgttttgaccagatcaatgctgtggatgaacgatgaatgtcaatgtcagaaggaaaagagaattttggccatcaaaatccagctccaagtgaacttaaagagcttatatatttcatgaagctgatccttttgtgtgtgtgctcctggtgttaggagagaaaaaagctctatgaaagaatataggaagtttctccttttcacaccttatttcattgactgctggctgctttaaaaaaaaaaaaaaaggatccattgtaccgttgtcttcatcactgggaaatgattattacatagtacagaagattctttgtttttctccactgagcacttaacaattgctttctctctggcctggacattctctggcagcacctccaggatacataaattcaatggatcaatttatttgtcttcaaatggccttaacttggattgtctgtttggccaaccatgaaaattaaagagtgaagcagatgtaatggcctgacattccaaaaactctgaattgggtttattagcacaaatgttgtgttcatttgttgagccatatctcagaagaaggaaagggagctacagaaaggaggtttaggattgcagagaagatgcaagagcactttggcccaattctccagctcaacccagcagctgaaaagcttcaagagatctaggaaaagacattttcatgttaatgagaatttccaccattgtagagaatttccttcctactgagaatctacctctattccccctgccctagctcttctctaacttggttaaccataaccataaccagattcccttgcaatcgatttctctttagtcgttggtgttagaagtaccagcacaatttgagcattcccattaacaaaggtgttcacagttgagaaactctcctgccgggcgcggtggctcatgcctgtaattccagcactttgggaggcagagttgggaggatcacctgatgtcaggggtttgagaccagcctggtcaacattgcaaaaccttgtctctactaaaaatacaaaaattagctgggcatggtggcgcatacctgtaatcccagctacttgggaggctgaggcaagagaatcgcttgaacccaggaggcagaggttgcagtgagctgagatcatgccattgcactccaacctgggtgacagagtgagactccatctcaaaaaaaaaaaaaaaagagagaaactctcctgatgccctgttacagggtttgcactgactggagcagaaacagcaacctttctaaaaaagcaaacctttttcctgggaggaaaatgccagagcctgagccaaaattcttatgacaggtaacatttgggtgttaatgtccatgagagctgacagggccatctctgagcccatataactgtctggaacccccaaatgtgtccacaggttgaatgtccatgagtgtgggaagaacacggctcatctggagcacagctgaggctagtaagagctaaatgactttccttgctatgacttggcttacctgaattagctgtaagagttgccgaatgggatgggttctgctatttaataaacagcattcatattcatttttccccagatggagttacctacctttccacatggtcagcttagaaatcttcccctaaagatgctaatctcctttgggctgtctcagaacacagtatccttcaaataagaaaaactgagtgggaagtgcagtgtttccaaacaatacctatcataactacgtattcattgtctacctgctaagtcaagggttcactgcatttctccttcctcagaatacactctggacctgtgctgtctaatatggtagccactaacaaaatgtggccattttgatggaaatccattaaaatcaaagaaaatttaaaactcaattcctcaattgggctggccacatttcaaatgctcactacccacctgtggctagggtctacttctactgtattggcgagcatggatatagaacatttcatcacagttctgttggaccaatctagatagattcattatcccatctagagaagagactttagtcactgtcttcttgcttcagacccatctatatttaaaacaaatttccctaaatcctgagactgagacggagctacaaattctcagatggcgaccgtgtaaatggtattagcggctgaagaaaaaaaatttttcaagacctctgttttttaactgaactttatcattggcattgtgggtctttgaagttgctgggataaattaatataattaaataaaagactgaatttaattgcaaaaaaatatta

SEQ ID NO: 307196 - DNA, 3447 bp, Homo sapiens
actggaagcgtccaaagagggacggctgtcagccctgcttgactgagaacccaccagctcatcccagacacctcatagcaacctatttatacaaagggggaaagaaacacctgagcagaatggaatcattatttttttcccaaggagaaaaccggggtaaagggagggaagcaattcaatttgaagtccctgtgaatgggctttcagaaggcaattaaagaaatccactcagagaggacttggggtgaaacttgggtcctgtggttttctgattgtaagtggaagcaggtcttgcacacgctgttggcaaatgtcaggaccaggttaagtgactggcagaaaaacttccaggtggaacaagcaacccaggttctgctgcaagcttgaaggagcctggagcgggagaaagctaacttgaacatgacctgttgcatttggcaagttctagcaacatgctcctaaggaagcgatacaggcacagaccatgcagactccagttcctcctgctgctcctgatgctgggatgcgtcctgatgatggtggcgatgttgcaccctccccaccacaccctgcaccagactgtcacagcccaagccagcaagcacagccctgaagccaggtaccgcctggactttggggaatcccaggattgggtactggaagctgaggatgagggtgaagagtacagccctctggagggcctgccaccctttatctcactgcgggaggatcagctgctggtggccgtggccttaccccaggccagaaggaaccagagccagggcaggagaggtgggagctaccgcctcatcaagcagccaaggaggcaggataaggaagccccaaagagggactggggggctgatgaggacggggaggtgtctgaagaagaggagttgaccccgttcagcctggacccacgtggcctccaggaggcactcagtgcccgcatccccctccagagggctctgcccgaggtgcggcacccactgtgtctgcagcagcaccctcaggacagcctgcccacagccagcgtcatcctctgtttccatgatgaggcctggtccactctcctgcggactgtacacagcatcctcgacacagtgcccagggccttcctgaaggagatcatcctcgtggacgacctcagccagcaaggacaactcaagtctgctctcagcgaatatgtggccaggctggagggggtgaagttactcaggagcaacaagaggctgggtgccatcagggcccggatgctgggggccaccagagccaccggggatgtgctcgtcttcatggatgcccactgcgagtgccacccaggctggctggagcccctcctcagcagaatagctggtgacaggagccgagtggtatctccggtgatagatgtgattgactggaagactttccagtattacccctcaaaggacctgcagcgtggggtgttggactggaagctggatttccactgggaacctttgccagagcatgtgaggaaggccctccagtcccccataagccccatcaggagccctgtggtgcccggagaggtggtggccatggacagacattacttccaaaacactggagcgtatgactctcttatgtcgctgcgaggtggtgaaaacctcgaactgtctttcaaggcctggctctgtggtggctctgttgaaatccttccctgctctcgggtaggacacatctaccaaaatcaggattcccattcccccctcgaccaggaggccaccctgaggaacagggttcgcattgctgagacctggctggggtcattcaaagaaaccttctacaagcatagcccagaggccttctccttgagcaaggctgagaagccagactgcatggaacgcttgcagctgcaaaggagactgggttgtcggacattccactggtttctggctaatgtctaccctgagctgtacccatctgaacccaggcccagtttctctggaaagctccacaacactggacttgggctctgtgcagactgccaggcagaaggggacatcctgggctgtcccatggtgttggctccttgcagtgacagccggcagcaacagtacctgcagcacaccagcaggaaggagattcactttggcagcccacagcacctgtgctttgctgtcaggcaggagcaggtgattcttcagaactgcacggaggaaggcctggccatccaccagcagcactgggacttccaggagaatgggatgattgtccacattctttctgggaaatgcatggaagctgtggtgcaagaaaacaataaagatttgtacctgcgtccgtgtgatggaaaagcccgccagcagtggcgttttgaccagatcaatgctgtggatgaacgatgaatgtcaatgtcagaaggaaaagagaattttggccatcaaaatccagctccaagtgaacttaaagagcttatatatttcatgaagctgatccttttgtgtgtgtgctcctggtgttaggagagaaaaaagctctatgaaagaatataggaagtttctccttttcacaccttatttcattgactgctggctgctttaaaaaaaaaaaaaaaggatccattgtaccgttgtcttcatcactgggaaatgattattacatagtacagaagattctttgtttttctccactgagcacttaacaattgctttctctctggcctggacattctctggcagcacctccaggatacataaattcaatggatcaatttatttgtcttcaaatggccttaacttggattgtctgtttggccaaccatgaaaattaaagagtgaagcagatgtaatggcctgacattccaaaaactctgaattgggtttattagcacaaatgttgtgttcatttgttgagccatatctcagaagaaggaaagggagctacagaaaggaggtttaggattgcagagaagatgcaagagcactttggcccaattctccagctcaacccagcagctgaaaagcttcaagagatctaggaaaagacattttcatgttaatgagaatttccaccattgtagagaatttccttcctactgagaatctacctctattccccctgccctagctcttctctaacttggttaaccataaccataaccagattcccttgcaatcgatttctctttagtcgttggtgttagaagtaccagcacaatttgagcattcccattaacaaaggtgttcacagttgagaaactctcctgccgggcgcggtggctcatgcctgtaattccagcactttgggaggcagagttgggaggatcacctgatgtcaggggtttgagaccagcctggtcaacattgcaaaaccttgtctggcctcaaagaagtcttatgagtcaagttaaggtcctttataaatgatcataaagtatttttctaagcaagtcctatgaataagatatactttagaaacagc

SEQ ID NO: 307197 - DNA, 2560 bp, Homo sapiens
actggaagcgtccaaagagggacggctgtcagccctgcttgactgagaacccaccagctcatcccagacacctcatagcaacctatttatacaaagggggaaagaaacacctgagcagaatggaatcattatttttttcccaaggagaaaaccggggtaaagggagggaagcaattcaatttgaagtccctgtgaatgggctttcagaaggcaattaaagaaatccactcagagaggacttggggtgaaacttgggtcctgtggttttctgattgtaagtggaagcaggtcttgcacacgctgttggcaaatgtcaggaccaggttaagtgactggcagaaaaacttccaggtggaacaagcaacccaggttctgctgcaagcttgaaggagcctggagcgggagaaagctaacttgaacatgacctgttgcatttggcaagttctagcaacatgctcctaaggaagcgatacaggcacagaccatgcagactccagttcctcctgctgctcctgatgctgggatgcgtcctgatgatggtggcgatgttgcaccctccccaccacaccctgcaccagactgtcacagcccaagccagcaagcacagccctgaagccaggtaccgcctggactttggggaatcccaggattgggtactggaagctgaggatgagggtgaagagtacagccctctggagggcctgccaccctttatctcactgcgggaggatcagctgctggtggccgtggccttaccccaggccagaaggaaccagagccagggcaggagaggtgggagctaccgcctcatcaagcagccaaggaggcaggataaggaagccccaaagagggactggggggctgatgaggacggggaggtgtctgaagaagaggagttgaccccgttcagcctggacccacgtggcctccaggaggcactcagtgcccgcatccccctccagagggctctgcccgaggtgcggcacccactgtgtctgcagcagcaccctcaggacagcctgcccacagccagcgtcatcctctgtttccatgatgaggcctggtccactctcctgcggactgtacacagcatcctcgacacagtgcccagggccttcctgaaggagatcatcctcgtggacgacctcagccagcaaggacaactcaagtctgctctcagcgaatatgtggccaggctggagggggtgaagttactcaggagcaacaagaggctgggtgccatcagggcccggatgctgggggccaccagagccaccggggatgtgctcgtcttcatggatgcccactgcgagtgccacccaggctggctggagcccctcctcagcagaatagctggtgacaggagccgagtggtatctccggtgatagatgtgattgactggaagactttccagtattacccctcaaaggacctgcagcgtggggtgttggactggaagctggatttccactgggaacctttgccagagcatgtgaggaaggccctccagtcccccataagccccatcaggagccctgtggtgcccggagaggtggtggccatggacagacattacttccaaaacactggagcgtatgactctcttatgtcgctgcgaggtggtgaaaacctcgaactgtctttcaaggcctggctctgtggtggctctgttgaaatccttccctgctctcgggtaggacacatctaccaaaatcaggattcccattcccccctcgaccaggaggccaccctgaggaacagggttcgcattgctgagacctggctggggtcattcaaagaaaccttctacaagcatagcccagaggccttctccttgagcaaggctgagaagccagactgcatggaacgcttgcagctgcaaaggagactgggttgtcggacattccactggtttctggctaatgtctaccctgagctgtacccatctgaacccaggcccagtttctctggaaagctccacaacactggacttgggctctgtgcagactgccaggcagaaggggacatcctgggctgtcccatggtgttggctccttgcagtgacagccggcagcaacagtacctgcagcacaccagcaggaaggagattcactttggcagcccacagcacctgtgctttgctgtcaggcaggagcaggtgattcttcagaactgcacggaggaaggcctggccatccaccagcagcactgggacttccaggagttctgcaggctgcacaggaagcatggctgaggaggcctcaggaaacttacaatcatggcagaaggcgaagaggaagcaagccccgtccttacatggcggagcaagggagagagagagtgaaggaggaggtgctacacacttccaaacaaccaatcttgtgagaactctatcaagaaaacagcaagggggaagtctgccccatgattcaatcacctcccaccaggcccctcttccaacactgggaattacaattcaacatgagatttcagtggggacacagaaccaaaccatatcaatctcaaacattaataaatgaatgatgaataaataggcat

SEQ ID NO: 307198 - DNA, 278 bp, Homo sapiens
atatttatatatagctatagatagctttcaaatatggctttgaaatatttaaatgtaagtcagaattatatagacaaatggacaaaatctgcaatcatagattttaacatttccatcagaaattgatatactagccaggcttacacctgtaatcccagcactttgggaggctgaggttggaggatcacatgagcccaagagttttgagactagcctgtgtaacatagggagaccacatctctaggaaaaaaaaaatttttttttttttttgagactga

SEQ ID NO: 307199 - DNA, 772 bp, Homo sapiens
tagaagttttttttaataattactatgcttatttaataatttaaagaattgcttaatttgtagaggtggaagaggctttagaaattctatactccactgattttaagtctgtattccaaagtcctagagtactgaggaggcacctcagggtcttctgctggagtgaagtgtagaaaaagtgagtagttccacaccatttgaaccagaggatttgtgtttttatctgttacatagttctgttttactcccaggccctgtgtgaggatgggaatccaggatatgtccatctcagacaggcaggtctcttacttaccctggacagtactgcttcctcttctttagtcaccatcaccattgactccagaatgactaaacaacagaaatgtattctgaaacctgctctagatccctaatgactttattcacagaagtttatctgagaaggttttctgattaaatgaaatagacctcaaagtatcaactttacatctcttgggaggcagcacggtgtctgcaaagataaactttaaagatatataaccctttcacttactagagctatgtatgttggaaggaaaggtgtatcttaacctctttgtacttcagtctactcatttataaaattatcacaacctattttcacaggtactaaaatacctggtaaaatgcctagtatatagtaggtattcattgtttgtatacttccaacctgatattaaagatattaaactttaatatctttgaggtgtctgcctcatttttctatatttct

SEQ ID NO: 307200 - DNA, 1234 bp, Homo sapiens
atgaggagggacgagcgagacgccaaagccatgcggtccctgcagccgccggatggggccggctcgccccccgagagtctgaggaacggctacgtgaagagctgcgtgagccccttgcggcaggaccctccgcgcggcttcttcttccacctctgccgcttctgcaacgtggagctgcggccgccgccggcctctccccagcagccgcggcgctgctcccccttctgccgggcgcgcctctcgctgggcgccctggctgcctttgtcctcgccctgctgctgggcgcggaacccgagagctgggctgccggggccgcctggctgcggacgctgctgagcgtgtgttcgcacagcttgagccccctcttcagcatcgcctgtgccttcttcttcctcacctgcttcctcacccggaccaagcggggacccggcccgggccggagctgcggctcctggtggctgctggcgctgcccgcctgctgttacctgggggacttcttggtgtggcagtggtggtcttggccttggggggatggcgacgcagggtccgcggccccgcacacgcccccggaggcggcagcgggcaggttgctgctggtgctgagctgcgtagggctgctgctgacgctcgcgcacccgctgcggctccggcactgcgttctggtgctgctcctggccagcttcgtctggtgggtctccttcaccagcctcgggtcgctgccctccgccctcaggccgctgctctccggcctggtggggggcgctggctgcctgctggccctggggttggatcacttctttcaaatcagggaagcgcctcttcatcctcgactgtccagtgccgccgaagaaaaagtgcctgtgatccgaccccggaggaggtccagctgcgtgtcgttaggagaaactgcagccagttactatggcagttgcaaaatattcaggagaccgtcgttgccttgtatttccagagaacagatgattctttgggattgggacttaaaacaatggtgtattctggatgtctactcaaggccaaaccccagtattgcctttcgtttccctattcaaggccaaggctagattctcttcattgtctccatttctctttctccagagctcctatagggcaagacactgtttctcatatatttctggatccttggagcttagctcggagcttggcatacatgcccagcatgaacttttctgaataaaataatttcaaatgctg

SEQ ID NO: 307201 - DNA, 5735 bp, Homo sapiens
atgaggagggacgagcgagacgccaaagccatgcggtccctgcagccgccggatggggccggctcgccccccgagagtctgaggaacggctacgtgaagagctgcgtgagccccttgcggcaggaccctccgcgcggcttcttcttccacctctgccgcttctgcaacgtggagctgcggccgccgccggcctctccccagcagccgcggcgctgctcccccttctgccgggcgcgcctctcgctgggcgccctggctgcctttgtcctcgccctgctgctgggcgcggaacccgagagctgggctgccggggccgcctggctgcggacgctgctgagcgtgtgttcgcacagcttgagccccctcttcagcatcgcctgtgccttcttcttcctcacctgcttcctcacccggaccaagcggggacccggcccgggccggagctgcggctcctggtggctgctggcgctgcccgcctgctgttacctgggggacttcttggtgtggcagtggtggtcttggccttggggggatggcgacgcagggtccgcggccccgcacacgcccccggaggcggcagcgggcaggttgctgctggtgctgagctgcgtagggctgctgctgacgctcgcgcacccgctgcggctccggcactgcgttctggtgctgctcctggccagcttcgtctggtgggtctccttcaccagcctcgggtcgctgccctccgccctcaggccgctgctctccggcctggtggggggcgctggctgcctgctggccctggggttggatcacttctttcaaatcagggaagcgcctcttcatcctcgactgtccagtgccgccgaagaaaaagtgcctgtgatccgaccccggaggaggtccagctgcgtgtcgttaggagaaactgcagccagttactatggcagttgcaaaatattcaggagaccgtcgttgccttgtatttccagagaacagatgattctttgggattgggacttaaaacaatggtataagcctcattatcaaaattctggaggtggaaatggagttgatctttcagtgctaaatgaggctcgcaatatggtgtcagatcttctgactgatccaagccttccaccacaagtcatttcctctctacggagtattagtagcttaatgggtgctttctcaggttcctgtaggccaaagattaatcctctcacaccatttcctggattttacccctgttctgaaatagaggacccagctgagaaaggggatagaaaacttaacaagggactaaataggaatagtttgccaactccacagctgaggagaagctcaggaacttcaggattgctacctgttgaacagtcttcaaggtgggatcgtaataatggcaaaaggcctcaccaagaatttggcatttcaagtcaaggatgctatctaaatgggccttttaattcaaatctactgactatcccgaagcaaaggtcatcttctgtatcactgactcaccatgtaggtctcagaagagctggtgttttgtccagtctgagtcctgtgaattcttccaaccatggaccagtgtctactggctctctaactaatcgatcacccatagaatttcctgatactgctgattttcttaataagccaagcgttatcttgcagagatctctgggcaatgcacctaatactccagatttttatcagcaacttagaaattctgatagcaatctgtgtaacagctgtggacatcaaatgctgaaatatgtttcaacatctgaatcagatggtacagattgctgcagtggaaaatcaggtgaagaagaaaacattttctcgaaagaatcattcaaacttatggaaactcaacaagaagaggaaacagagaagaaagacagcagaaaattatttcaggaaggtgataagtggctaacagaagaggcacagagtgaacagcaaacaaatattgaacaggaagtatcactggacctgattttagtagaagagtatgactcattaatagaaaagatgagcaactggaattttccaatttttgaacttgtagaaaagatgggagagaaatcaggaaggattctcagtcaggttatgtataccttatttcaagacactggtttattggaaatatttaaaattcccactcaacaatttatgaactattttcgtgcattagaaaatggctatcgagacattccttatcacaatcgtatacatgccacagatgtgctacatgcagtttggtatctgacaacacggccagttcctggcttacagcagatccacaatggttgtggaacaggaaatgaaacagattctgatggtagaattaaccatgggcgaattgcttatatttcttcgaagagctgctctaatcctgatgagagttatggctgcctgtcttcaaacattcctgcattagaattgatggctctatacgtggcagctgccatgcatgattatgatcacccagggaggacaaatgcatttctagtggctacaaatgcccctcaggcagttttatacaatgacagatctgttctggaaaatcatcatgctgcgtcagcttggaatctatatctttctcgcccagaatacaacttccttcttcatcttgatcatgtggaattcaagcgctttcgttttttagtcattgaagcaatccttgctacggatcttaaaaagcattttgattttctcgcagaattcaatgccaaggcaaatgatgtaaatagtaatggcatagaatggagtaatgaaaatgatcgcctcttggtatgccaggtgtgcatcaaactggcagatataaatggcccagcaaaagttcgagacttgcatttgaaatggacagaaggcattgtcaatgaattttatgagcagggagatgaagaagcaaatcttggtctgcccatcagtccattcatggatcgttcttctcctcaactagcaaaactccaagaatcttttatcacccacatagtgggtcccctgtgtaactcctatgatgctgctggtttgctaccaggtcagtggttagaagcagaagaggataatgatactgaaagtggtgatgatgaagacggtgaagaattagatacagaagatgaagaaatggaaaacaatctaaatccaaaaccaccaagaaggaaaagcagacggcgaatattttgtcagctaatgcaccacctcactgaaaaccacaagatatggaaggaaatcgtagaggaagaagaaaaatgtaaagctgatgggaataaactgcaggtggagaattcctccttacctcaagcagatgagattcaggtaattgaagaggcagatgaagaggaatagcgacagtttgagtaaaagaaaagtcatattgaagaagcccagagggttgtgcccaggggcagaaatcattgcctagtgttcaccggctgactctcaactgaccattcccatgtggacaggccttaatactgtgagaggatccttgctctgctggcagtttcccactcctatgcactttcacaggaactagaaaactattcttaaaccaaaaataccatccgtgttgacccatgttgcagagcccttacttaaatccttcactggtgtatgaatactttgtcataatgctgctttgctgggtagtgagctcttatttttcactgggggtcagctataactaaaaactcaagtgacatatttcagttaccaaagtggccaggaactttttgcttttatgaaaatagattcatattgtatttcccagtgtgtcttttatgtctttgaatgttttggagaaaagtctatgcctgtctaaaaatgaatccagtgttgcctttctgagggatttctgctcaatgcaatacactgttcagtgctattctcccagctaggtttatccatgaaggactgagtgacctttgttgtatttaacaaaatccaggtgcatcaatttctgatgctttttactattgtgtattatctactatgtgtgttttatttctgctgagagtattcaggtttgccatggacatcagaagtttgaattccagtcttatcttatgttccatggctgaattttaaagctgtttaggtttaacaatgaagggatttattctttagtcaaaattgttgtttttactctagctcaggattcgtatttttaaagatttagttaatataaacacagcacagatttgtcagaagaaaaaaaatttgctgtaataccaaaactaacctcatcaaagatacagaaaaaaagaaatatagtgagccctaaaggacacatacattgaataaataattggaacatgtggttatctttagatccacatcttagctgtcatttgttcactctaaaactgatgttcatctttctgttaatttccctctgcctaaagactacatgacagaaatgacctatcactacttattatttctgaagcctaactgcaagactgatttctgagaacaagtaaagaactggaatacttatttttcatataaaaatctaaatgtgttaataaatcatttcatacaaaagtacattattaaataaccacattattaaaataattgcaagaaaatggaccatatttacaatgttttgtaaacttgctagtgtgtggatatgtaccctacttgtgaaatacatttgaagatataaagagcagccaaaatgatggcaaaatggtaggctaatattttctattattattggagaacatatcatattttggaatcatgcaattttgcacacagtgaaaccattaattttccaaggtaattcctttagaatatggtattggcatgcagtttcttacttatctagaatatttggcttatctgaaagatatcaatttaagatctctggaagtgttagaatttttgatccttcacagtgtcaatatttaatgaatcactaagctttatttattagacgtgttgagtgagtgctgagttccttgctgccacttttgttaccattgtcacacactatgtgtaaaccagtcccaccacttattactaataaaattttgactgataatttatatttgcacttacaatatatatatcctgtccttatatttctctagagtacattttccatcatgtttaagtgtatttctgctattatttcctctcctgcagaatacatacaagtgtatgtgtataaagtcatacatgtacaagcatgcatattgagattgaatcacatttccatactgtctgttattttattgggttttatattgggtttctttagtttatgttgttttctcaaaagcagcattttaaattacgaatactggacttattggatttaattataaatccaattactactggaaactcatttttacataatatagtccttaaattatttaacccttgctaagtaattgacatatgtaacaataactagcctaaagaaacccaaaaaagtatctctcccgagctgaaacttaaaaattcgtaagtgtaagaaagaatgtgagaatatattaaatgcacactgtaccattagatgaaatcttacttgagaaattgccataagccatattacagatcttactttgttactgaatcagattaatttcttgttataataattttcatcataaattttctatttttaaagccgctggtactagaaatattcttttaatgctatatctatgtacctactgacacatttttctccataaaagtacttttaaaaattacttcatgatttg

SEQ ID NO: 307202 - DNA, 4475 bp, Homo sapiens
atgaggagggacgagcgagacgccaaagccatgcggtccctgcagccgccggatggggccggctcgccccccgagagtctgaggaacggctacgtgaagagctgcgtgagccccttgcggcaggaccctccgcgcggcttcttcttccacctctgccgcttctgcaacgtggagctgcggccgccgccggcctctccccagcagccgcggcgctgctcccccttctgccgggcgcgcctctcgctgggcgccctggctgcctttgtcctcgccctgctgctgggcgcggaacccgagagctgggctgccggggccgcctggctgcggacgctgctgagcgtgtgttcgcacagcttgagccccctcttcagcatcgcctgtgccttcttcttcctcacctgcttcctcacccggaccaagcggggacccggcccgggccggagctgcggctcctggtggctgctggcgctgcccgcctgctgttacctgggggacttcttggtgtggcagtggtggtcttggccttggggggatggcgacgcagggtccgcggccccgcacacgcccccggaggcggcagcgggcaggttgctgctggtgctgagctgcgtagggctgctgctgacgctcgcgcacccgctgcggctccggcactgcgttctggtgctgctcctggccagcttcgtctggtgggtctccttcaccagcctcgggtcgctgccctccgccctcaggccgctgctctccggcctggtggggggcgctggctgcctgctggccctggggttggatcacttctttcaaatcagggaagcgcctcttcatcctcgactgtccagtgccgccgaagaaaaagtgcctgtgatccgaccccggaggaggtccagctgcgtgtcgttaggagaaactgcagccagttactatggcagttgcaaaatattcaggagaccgtcgttgccttgtatttccagagaacagatgattctttgggattgggacttaaaacaatggtataagcctcattatcaaaattctggaggtggaaatggagttgatctttcagtgctaaatgaggctcgcaatatggtgtcagatcttctgactgatccaagccttccaccacaagtcatttcctctctacggagtattagtagcttaatgggtgctttctcaggttcctgtaggccaaagattaatcctctcacaccatttcctggattttacccctgttctgaaatagaggacccagctgagaaaggggatagaaaacttaacaagggactaaataggaatagtttgccaactccacagctgaggagaagctcaggaacttcaggattgctacctgttgaacagtcttcaaggtgggatcgtaataatggcaaaaggcctcaccaagaatttggcatttcaagtcaaggatgctatctaaatgggccttttaattcaaatctactgactatcccgaagcaaaggtcatcttctgtatcactgactcaccatgtaggtctcagaagagctggtgttttgtccagtctgagtcctgtgaattcttccaaccatggaccagtgtctactggctctctaactaatcgatcacccatagaatttcctgatactgctgattttcttaataagccaagcgttatcttgcagagatctctgggcaatgcacctaatactccagatttttatcagcaacttagaaattctgatagcaatctgtgtaacagctgtggacatcaaatgctgaaatatgtttcaacatctgaatcagatggtacagattgctgcagtggaaaatcaggtgaagaagaaaacattttctcgaaagaatcattcaaacttatggaaactcaacaagaagaggaaacagagaagaaagacagcagaaaattatttcaggaaggtgataagtggctaacagaagaggcacagagtgaacagcaaacaaatattgaacaggaagtatcactggacctgattttagtagaagagtatgactcattaatagaaaagatgagcaactggaattttccaatttttgaacttgtagaaaagatgggagagaaatcaggaaggattctcagtcaggttatgtataccttatttcaagacactggtttattggaaatatttaaaattcccactcaacaatttatgaactattttcgtgcattagaaaatggctatcgagacattccttatcacaatcgtatacatgccacagatgtgctacatgcagtttggtatctgacaacacggccagttcctggcttacagcagatccacaatggttgtggaacaggaaatgaaacagattctgatggtagaattaaccatgggcgaattgcttatatttcttcgaagagctgctctaatcctgatgagagttatggctgcctgtcttcaaacattcctgcattagaattgatggctctatacgtggcagctgccatgcatgattatgatcacccagggaggacaaatgcatttctagtggctacaaatgcccctcaggcagttttatacaatgacagatctgttctggaaaatcatcatgctgcgtcagcttggaatctatatctttctcgcccagaatacaacttccttcttcatcttgatcatgtggaattcaagcgctttcgttttttagtcattgaagcaatccttgctacggatcttaaaaagcattttgattttctcgcagaattcaatgccaaggcaaatgatgtaaatagtaatggcatagaatggagtaatgaaaatgatcgcctcttggtatgccaggtgtgcatcaaactggcagatataaatggcccagcaaaagttcgagacttgcatttgaaatggacagaaggcattgtcaatgaattttatgagcagggagatgaagaagcaaatcttggtctgcccatcagtccattcatggatcgttcttctcctcaactagcaaaactccaagaatcttttatcacccacatagtgggtcccctgtgtaactcctatgatgctgctggtttgctaccaggtcagtggttagaagcagaagaggataatgatactgaaagtggtgatgatgaagacggtgaagaattagatacagaagatgaagaaatggaaaacaatctaaatccaaaaccaccaagaaggaaaagcagacggcgaatattttgtcagctaatgcaccacctcactgaaaaccacaagatatggaaggaaatcgtagaggaagaagaaaaatgtaaagctgatgggaataaactgcaggtggagaattcctccttacctcaagcagatgagattcaggtaattgaagaggcagatgaagaggaatagcgacagtttgagtaaaagaaaagtcatattgaagaagcccagagggttgtgcccaggggcagaaatcattgcctagtgttcaccggctgactctcaactgaccattcccatgtggacaggccttaatactgtgagaggatccttgctctgctggcagtttcccactcctatgcactttcacaggaactagaaaactattcttaaaccaaaaataccatccgtgttgacccatgttgcagagcccttacttaaatccttcactggtgtatgaatactttgtcataatgctgctttgctgggtagtgagctcttatttttcactgggggtcagctataactaaaaactcaagtgacatatttcagttaccaaagtggccaggaactttttgcttttatgaaaatagattcatattgtatttcccagtgtgtcttttatgtctttgaatgttttggagaaaagtctatgcctgtctaaaaatgaatccagtgttgcctttctgagggatttctgctcaatgcaatacactgttcagtgctattctcccagctaggtttatccatgaaggactgagtgacctttgttgtatttaacaaaatccaggtgcatcaatttctgatgctttttactattgtgtattatctactatgtgtgttttatttctgctgagagtattcaggtttgccatggacatcagaagtttgaattccagtcttatcttatgttccatggctgaattttaaagctgtttaggtttaacaatgaagggatttattctttagtcaaaattgttgtttttactctagctcaggattcgtatttttaaagatttagttaatataaacacagcacagatttgtcagaagaaaaaaaatttgctgtaataccaaaactaacctcatcaaagatacagaaaaaaagaaatatagtgagccctaaaggacacatacattgaataaataattggaacatgtggttatcttccaaaaaaaaaaaaaaaaaataaaacacaaaaaacttgtgttggggcgcgcccttgggccctgaaaaaagcttttctaacccctttgcgttgtgggccgggggggccccttgggttggtgtgaccctggggcccagggggttccccagggaaaag

SEQ ID NO: 307203 - DNA, 392 bp, Homo sapiens
taaactttaatatctttgaggtgtctgcctcatttttctatatttctttttaggcagttttatacaatgacagatctgttctggaaaatcatcatgctgcgtcagcttggaatctatatctttctcgcccagaatacaacttccttcttcatcttgatcatgtggaattcaagcgctttcgttttttagtcattgaagcaatccttgctacggatcttaaaaagcattttgattttctcgcagaattcaatgccaaggtttgttatgaaaattagtgcctgatttaaaaaatctttattgtcagtgttactgataaaatatgttttttaatgttaagttagaattattactacttaggaagtaacaataaatagttgatataaaataatata

SEQ ID NO: 307204 - DNA, 769 bp, Homo sapiens
gtaattgtgtttaattcaatacataagaatgcccttaaaggttggtttttaactttgggttattttcatttgaaatttcagcacgcttcttccctctccaccatacccagccagttttccctaaacctcttctctattttgtttttatccgtaacaataccatctaacatattcctgttttgcttctttctgttttcctagctctttccactagaatctgaacaccataacgcagggattatttttatagtactatttcattatattatttttattatactattattttatagtactgtttacttttatactcccagtgcttagatacctagaataggcacttaatatttgttgaatgattaaatcatattgctatgattagaatatatttattttaaatttcacagaaccaccaagaaggaaaagcagacggcgaatattttgtcagctaatgcaccacctcactgaaaaccacaagatatggaaggaaatcgtagaggaagaagaaaaatgtaaagctgatgggaataaactgcaggtggagaattcctccttacctcaagcagatgagattcaggtaattgaagaggcagatgaagaggaatagcgacagtttgagtaaaagaaaagtcatattgaagaagcccagagggttgtgcccaggggcagaaatcattgcctagtgttcaccggctgactctcaactgaccattcccatgtggacaggccttaatactgtgagaggatccttgctctgctggcagtttcc

SEQ ID NO: 307205 - DNA, 2066 bp, Homo sapiens
gtagccctcacgtgaccaagagctgacgtgtgcagaagtccttcttgtcctggtcgttgttcccgtctgagtaccagctccccactgccctgagggcgggccggcctgcggcggagggaaaaaggaagaggagaaggaaattgtcccgaatccctgcagtgggtccaagcctctcccgggtggccagtctttctgtaggttgcggcacaacgccaggcaaaagaagaggaaggaatttaatcctaatcggtggaggtcgatttgagggtctgctgtagcaggtggctccgcttgaagcgagggaggaagtttcctccgatcagtagagattggaaagattgttgggagtggcacaccactagggaaaagaagaaggggcgaactgcttgtcttgaggaggtcaacccccagaatcagctcttgtggccttgaagtggctgaagacgatcaccctccacaggcttgagcccagtcccacagccttcctcccccagcctgagtgactactctattccttggtccctgctattgtcggggacgattgcatgggctacgccaggaaagtaggctgggtgaccgcaggcctggtgattggggctggcgcctgctattgcatttatagactgactaggggaagaaaacagaacaaggaaaaaatggctgagggtggatctggggatgtggatgatgctggggactgttctggggccaggtataatgactggtctgatgatgatgatgacagcaatgagagcaagagtatagtatggtacccaccttgggctcggattgggactgaagctggaaccagagctagggccagggcaagggccagggctacccgggcacgtcgggctgtccagaaacgggcttcccccaattcagatgataccgttttgtcccctcaagagctacaaaaggttctttgcttggttgagatgtctgaaaagccttatattcttgaagcagctttaattgctctgggtaacaatgctgcttatgcatttaacagagatattattcgtgatctgggtggtctcccaattgtcgcaaagattctcaatactcgggatcccatagttaaggaaaaggctttaattgtcctgaataacttgagtgtgaatgctgaaaatcagcgcaggcttaaagtatacatgaatcaagtgtgtgatgacacaatcacttctcgcttgaactcatctgtgcagcttgctggactgagattgcttacaaatatgactgttactaatgagtatcagcacatgcttgctaattccatttctgacttttttcgtttattttcagcgggaaatgaagaaaccaaacttcaggttctgaaactccttttgaatttggctgaaaatccagccatgactagggaactgctcagggcccaagtaccatcttcactgggctccctctttaataagaaggagaacaaagaagttattcttaaacttctggtcatatttgagaacataaatgataatttcaaatgggaagaaaatgaacctactcagaatcaattcggtgaaggttcactttttttctttttaaaagaatttcaagtgtgtgctgataaggttctgggaatagaaagtcaccatgattttttggtgaaagtaaaagttggaaaattcatggccaaacttgctgaacatatgttcccaaagagccaggaataacaccttgattttgtaatttagaagcaacacacattgtaaactattcattttctccaccttgtttatatggtaaaggaatcctttcagctgccagttttgaataatgaatatcatattgtatcatcaatgctgatatttaactgagttggtctttaggtttaagatggataaatgaatatcactacttgttctgaaaacatgtttgttgctttttatctcgctgcctagattgaaatattttgctatttcttctgcataagtgacagtgaaccaattcatcatgagtaagctcccttctgtcattttcattgatttaatttgtgtatcatcaataaaattgtatgttaatgctggaaagaaaaaaagaagaaagaaagaaac

SEQ ID NO: 307206 - DNA, 2039 bp, Homo sapiens
gtagccctcacgtgaccaagagctgacgtgtgcagaagtccttcttgtcctggtcgttgttcccgtctgagtaccagctccccactgccctgagggcgggccggcctgcggcggagggaaaaaggaagaggagaaggaaattgtcccgaatccctgcaggtctttctgtaggttgcggcacaacgccaggcaaaagaagaggaaggaatttaatcctaatcggtggaggtcgatttgagggtctgctgtagcaggtggctccgcttgaagcgagggaggaagtttcctccgatcagtagagattggaaagattgttgggagtggcacaccactagggaaaagaagaaggggcgaactgcttgtcttgaggaggtcaacccccagaatcagctcttgtggccttgaagtggctgaagacgatcaccctccacaggcttgagcccagtcccacagccttcctcccccagcctgagtgactactctattccttggtccctgctattgtcggggacgattgcatgggctacgccaggaaagtaggctgggtgaccgcaggcctggtgattggggctggcgcctgctattgcatttatagactgactaggggaagaaaacagaacaaggaaaaaatggctgagggtggatctggggatgtggatgatgctggggactgttctggggccaggtataatgactggtctgatgatgatgatgacagcaatgagagcaagagtatagtatggtacccaccttgggctcggattgggactgaagctggaaccagagctagggccagggcaagggccagggctacccgggcacgtcgggctgtccagaaacgggcttcccccaattcagatgataccgttttgtcccctcaagagctacaaaaggttctttgcttggttgagatgtctgaaaagccttatattcttgaagcagctttaattgctctgggtaacaatgctgcttatgcatttaacagagatattattcgtgatctgggtggtctcccaattgtcgcaaagattctcaatactcgggatcccatagttaaggaaaaggctttaattgtcctgaataacttgagtgtgaatgctgaaaatcagcgcaggcttaaagtatacatgaatcaagtgtgtgatgacacaatcacttctcgcttgaactcatctgtgcagcttgctggactgagattgcttacaaatatgactgttactaatgagtatcagcacatgcttgctaattccatttctgacttttttcgtttattttcagcgggaaatgaagaaaccaaacttcaggttctgaaactccttttgaatttggctgaaaatccagccatgactagggaactgctcagggcccaagtaccatcttcactgggctccctctttaataagaaggagaacaaagaagttattcttaaacttctggtcatatttgagaacataaatgataatttcaaatgggaagaaaatgaacctactcagaatcaattcggtgaaggttcactttttttctttttaaaagaatttcaagtgtgtgctgataaggttctgggaatagaaagtcaccatgattttttggtgaaagtaaaagttggaaaattcatggccaaacttgctgaacatatgttcccaaagagccaggaataacaccttgattttgtaatttagaagcaacacacattgtaaactattcattttctccaccttgtttatatggtaaaggaatcctttcagctgccagttttgaataatgaatatcatattgtatcatcaatgctgatatttaactgagttggtctttaggtttaagatggataaatgaatatcactacttgttctgaaaacatgtttgttgctttttatctcgctgcctagattgaaatattttgctatttcttctgcataagtgacagtgaaccaattcatcatgagtaagctcccttctgtcattttcattgatttaatttgtgtatcatcaataaaattgtatgttaatgctggaaagaaaaaaagaagaaagaaagaaac

SEQ ID NO: 307207 - DNA, 2801 bp, Homo sapiens
gtagccctcacgtgaccaagagctgacgtgtgcagaagtccttcttgtcctggtcgttgttcccgtctgagtaccagctccccactgccctgagggcgggccggcctgcggcggagggaaaaaggaagaggagaaggaaattgtcccgaatccctgcagtgggtccaagcctctcccgggtggccagtctttctgtaggttgcggcacaacgccaggcaaaagaagaggaaggaatttaatcctaatcggtggaggtcgatttgagggtctgctgtagcaggtggctccgcttgaagcgagggaggaagtttcctccgatcagtagagattggaaagattgttgggagtggcacaccactagggaaaagaagaaggggcgaactgcttgtcttgaggaggtcaacccccagaatcagctcttgtggccttgaagtggctgaagacgatcaccctccacaggcttgagcccagtcccacagccttcctcccccagcctgagtgactactctattccttggtccctgctattgtcggggacgattgcatgggctacgccaggaaagtaggctgggtgaccgcaggcctggtgattggggctggcgcctgctattgcatttatagactgactaggggaagaaaacagaacaaggaaaaaatggctgagggtggatctggggatgtggatgatgctggggactgttctggggccaggtataatgactggtctgatgatgatgatgacagcaatgagagcaagagtatagtatggtacccaccttgggctcggattgggactgaagctggaaccagagctagggccagggcaagggccagggctacccgggcacgtcgggctgtccagaaacgggcttcccccaattcagatgataccgttttgtcccctcaagagctacaaaaggttctttgcttggttgagatgtctgaaaagccttatattcttgaagcagctttaattgctctgggtaacaatgctgcttatgcatttaacagagatattattcgtgatctgggtggtctcccaattgtcgcaaagattctcaatactcgggatcccatagttaaggaaaaggctttaattgtcctgaataacttgagtgtgaatgctgaaaatcagcgcaggcttaaagtatacatgaatcaagtgtgtgatgacacaatcacttctcgcttgaactcatctgtgcagcttgctggactgagattgcttacaaatatgactgttactaatgagtatcagcacatgcttgctaattccatttctgacttttttcgtttattttcagcgggaaatgaagaaaccaaacttcaggttctgaaactccttttgaatttggctgaaaatccagccatgactagggaactgctcagggcccaagtaccatcttcactgggctccctctttaataagaaggagaacaaagaagttattcttaaacttctggtcatatttgagaacataaatgataatttcaaatgggaagaaaatgaacctactcagaatcaattcggtgaaggttcactttttttctttttaaaagaatttcaagtgtgtgctgataaggttctgggaatagaaagtcaccatgattttttggtgaaagtaaaagttggaaaattcatggccaaacttgctgaacatatgttcccaaagagccaggaataacaccttgattttgtaatttagaagcaacacacattgtaaactattcattttctccaccttgtttatatggtaaaggaatcctttcagctgccagttttgaataatgaatatcatattgtatcatcaatgctgatatttaactgagttggtctttaggtttaagatggataaatgaatatcactacttgttctgaaaacatgtttgttgctttttatctcgctgcctagattgaaatattttgctatttcttctgcataagtgacagtgaaccaattcatcatgagtaagctcccttctgtcattttcattgatttaatttgtgtatcatcaataaaattgtatgttaatgctggaaagaaaaaaagaagaaagaaagaaaccatccctgtccttcagtttataatctagttggagagataagaaacgtacaaaccaaaagataacagaatatctgaagcatgtactcattgtcagatgttccctctgagagcacagaggaggcaaaagcttctgtgggatgtgctagtcggctaaagcttcacagaggaggtggcaattgaaaatgagtcctgaatggggtagggtggttagggaattccatgagacaagacaaggggggcatggtgtgagaaaggcatggaagtaggaaccctcttcctatgacaggagatcattctgcttggactgcaccaaggacttcccttgacagttgtgcttctggttgaatttggccaatggagaggccattcaggaaagcagaaagaaaaaggagagtgaagatggaatacttacttgaagtatttatctggatggtgcctctcaaacaaaagtccaattcccatgggatgccttctccaaacagctatatttctagcttctctccttccccttttagacctaggactgccaaagcttccctattgctgctagtcatggagtactgcactaccgcctgtagtttcccttcactctatccacgcatttcatgaactctcttcaaattactcaatatgggtagccatcgacttcttaccaaggccctgactgagacactttcattcttttaaaaatatccgagtcaactaatatattaaaatagaccagcatctcttctc

SEQ ID NO: 307208 - DNA, 3383 bp, Homo sapiens
gtagccctcacgtgaccaagagctgacgtgtgcagaagtccttcttgtcctggtcgttgttcccgtctgagtaccagctccccactgccctgagggcgggccggcctgcggcggagggaaaaaggaagaggagaaggaaattgtcccgaatccctgcaggtctttctgtaggttgcggcacaacgccaggcaaaagaagaggaaggaatttaatcctaatcggtggaggtcgatttgagggtctgctgtagcaggtggctccgcttgaagcgagggaggaagtttcctccgatcagtagagattggaaagattgttgggagtggcacaccactagggaaaagaagaaggggcgaactgcttgtcttgaggaggtcaacccccagaatcagctcttgtggccttgaagtggctgaagacgatcaccctccacaggcttgagcccagtcccacagccttcctcccccagcctgagtgactactctattccttggtccctgctattgtcggggacgattgcatgggctacgccaggaaagtaggctgggtgaccgcaggcctggtgattggggctggcgcctgctattgcatttatagactgactaggggaagaaaacagaacaaggaaaaaatggctgagggtggatctggggatgtggatgatgctggggactgttctggggccaggtataatgactggtctgatgatgatgatgacagcaatgagagcaagagtatagtatggtacccaccttgggctcggattgggactgaagctggaaccagagctagggccagggcaagggccagggctacccgggcacgtcgggctgtccagaaacgggcttcccccaattcagatgataccgttttgtcccctcaagagctacaaaaggttctttgcttggttgagatgtctgaaaagccttatattcttgaagcagctttaattgctctgggtaacaatgctgcttatgcatttaacagagatattattcgtgatctgggtggtctcccaattgtcgcaaagattctcaatactcgggatcccatagttaaggaaaaggctttaattgtcctgaataacttgagtgtgaatgctgaaaatcagcgcaggcttaaagtatacatgaatcaagtgtgtgatgacacaatcacttctcgcttgaactcatctgtgcagcttgctggactgagattgcttacaaatatgactgttactaatgagtatcagcacatgcttgctaattccatttctgacttttttcgtttattttcagcgggaaatgaagaaaccaaacttcaggttctgaaactccttttgaatttggctgaaaatccagccatgactagggaactgctcagggcccaagtaccatcttcactgggctccctctttaataagaaggagaacaaagaagttattcttaaacttctggtcatatttgagaacataaatgataatttcaaatgggaagaaaatgaacctactcagaatcaattcggtgaaggttcactttttttctttttaaaagaatttcaagtgtgtgctgataaggttctgggaatagaaagtcaccatgattttttggtgaaagtaaaagttggaaaattcatggccaaacttgctgaacatatgttcccaaagagccaggaataacaccttgattttgtaatttagaagcaacacacattgtaaactattcattttctccaccttgtttatatggtaaaggaatcctttcagctgccagttttgaataatgaatatcatattgtatcatcaatgctgatatttaactgagttggtctttaggtttaagatggataaatgaatatcactacttgttctgaaaacatgtttgttgctttttatctcgctgcctagattgaaatattttgctatttcttctgcataagtgacagtgaaccaattcatcatgagtaagctcccttctgtcattttcattgatttaatttgtgtatcatcaataaaattgtatgttaatgctggaaagaaaaaaagaagaaagaaagaaaccatccctgtccttcagtttataatctagttggagagataagaaacgtacaaaccaaaagataacagaatatctgaagcatgtactcattgtcagatgttccctctgagagcacagaggaggcaaaagcttctgtgggatgtgctagtcggctaaagcttcacagaggaggtggcaattgaaaatgagtcctgaatggggtagggtggttagggaattccatgagacaagacaaggggggcatggtgtgagaaaggcatggaagtaggaaccctcttcctatgacaggagatcattctgcttagagtggagagtgtggagagtgggagtagataattttggaaagctgggtgaagccagttgtggagaattgtttgaatattatcccattgaatacccagagccactaaatctttttttactagaaaataattggggtccatatgaaagtctctattactgagtagtgtcaatgagggtgtggcaaaatggagcctttcacatcctagtggtggccatttggtaatacagatataagccttaaactatgtaaacccttgtcctaaggaagtaattgaataattgcccaaagattgtatgtatgaggctgttcatcccagcactgtctaagctagtaaaaattggaaacaatttaagtatctagcacattggattggttataaagcaaggaatgttcacacagtaggatattataagtatgctgatggaaatctatattgccaggaaaagctattcattatgcgttgtgaagtcagaaagtaaaaaagggtagatagaagtattcgaagtatagttccattttttgagactaataaaacatatgtttaaaaggacactaaaaactggagttatagatatccagatagaaacagtagttatctttgggtagaagaataatgagtgatctttacttttttactttttattcatctttgtgtttttatttatctaaaatgggtattgatttttaggacggttttgaaaaagaaaagtgttgggaatgaagcaagtgattgattggaaaacatactgaatggaagaaatatttagattaaaaatgaggtaggttgaagtttcttctctgaaatgatagataaatggtgaagataaggcttattgtgaggattcagtgaggtaatatatgcaaagtacttacaatgttctggcacatagtaattaattaagaaaatcgagcacccttaattacctagaatgcagggttgttagttttttggttgacttttgttttgctggggcattctgccatgttttagtgtcatttaataaataatagtaacaataaaggttaacatttattaagtgac

SEQ ID NO: 307209 - DNA, 3268 bp, Homo sapiens
aggctggtacggacccaggagatttaaattgtcccgaatccctggtctttctgtaggttgcggcacaacgccaggcaaaagaagaggaaggaatttaatcctaatcggtggaggtcgatttgagggtctgctgtagcaggtggctccgcttgaagcgagggaggaagtttcctccgatcagtagagattggaaagattgttgggagtggcacaccactagggaaaagaagaaggggcgaactgcttgtcttgaggaggtcaacccccagaatcagctcttgtggccttgaagtggctgaagacgatcaccctccacaggcttgagcccagtcccacagccttcctcccccagcctgagtgactactctattccttggtccctgctattgtcggggacgattgcatgggctacgccaggaaagtaggctgggtgaccgcaggcctggtgattggggctggcgcctgctattgcatttatagactgactaggggaagaaaacagaacaaggaaaaaatggctgagggtggatctggggatgtggatgatgctggggactgttctggggccaggtataatgactggtctgatgatgatgatgacagcaatgagagcaagagtatagtatggtacccaccttgggctcggattgggactgaagctggaaccagagctagggccagggcaagggccagggctacccgggcacgtcgggctgtccagaaacgggcttcccccaattcagatgataccgttttgtcccctcaagagctacaaaaggttctttgcttggttgagatgtctgaaaagccttatattcttgaagcagctttaattgctctgggtaacaatgctgcttatgcatttaacagagatattattcgtgatctgggtggtctcccaattgtcgcaaagattctcaatactcgggatcccatagttaaggaaaaggctttaattgtcctgaataacttgagtgtgaatgctgaaaatcagcgcaggcttaaagtatacatgaatcaagtgtgtgatgacacaatcacttctcgcttgaactcatctgtgcagcttgctggactgagattgcttacaaatatgactgttactaatgagtatcagcacatgcttgctaattccatttctgacttttttcgtttattttcagcgggaaatgaagaaaccaaacttcaggttctgaaactccttttgaatttggctgaaaatccagccatgactagggaactgctcagggcccaagtaccatcttcactgggctccctctttaataagaaggagaacaaagaagttattcttaaacttctggtcatatttgagaacataaatgataatttcaaatgggaagaaaatgaacctactcagaatcaattcggtgaaggttcactttttttctttttaaaagaatttcaagtgtgtgctgataaggttctgggaatagaaagtcaccatgattttttggtgaaagtaaaagttggaaaattcatggccaaacttgctgaacatatgttcccaaagagccaggaataacaccttgattttgtaatttagaagcaacacacattgtaaactattcattttctccaccttgtttatatggtaaaggaatcctttcagctgccagttttgaataatgaatatcatattgtatcatcaatgctgatatttaactgagttggtctttaggtttaagatggataaatgaatatcactacttgttctgaaaacatgtttgttgctttttatctcgctgcctagattgaaatattttgctatttcttctgcataagtgacagtgaaccaattcatcatgagtaagctcccttctgtcattttcattgatttaatttgtgtatcatcaataaaattgtatgttaatgctggaaagaaaaaaagaagaaagaaagaaaccatccctgtccttcagtttataatctagttggagagataagaaacgtacaaaccaaaagataacagaatatctgaagcatgtactcattgtcagatgttccctctgagagcacagaggaggcaaaagcttctgtgggatgtgctagtcggctaaagcttcacagaggaggtggcaattgaaaatgagtcctgaatggggtagggtggttagggaattccatgagacaagacaaggggggcatggtgtgagaaaggcatggaagtaggaaccctcttcctatgacaggagatcattctgcttagagtggagagtgtggagagtgggagtagataattttggaaagctgggtgaagccagttgtggagaattgtttgaatattatcccattgaatacccagagccactaaatctttttttactagaaaataattggggtccatatgaaagtctctattactgagtagtgtcaatgagggtgtggcaaaatggagcctttcacatcctagtggtggccatttggtaatacagatataagccttaaactatgtaaacccttgtcctaaggaagtaattgaataattgcccaaagattgtatgtatgaggctgttcatcccagcactgtctaagctagtaaaaattggaaacaatttaagtatctagcacattggattggttataaagcaaggaatgttcacacagtaggatattataagtatgctgatggaaatctatattgccaggaaaagctattcattatgcgttgtgaagtcagaaagtaaaaaagggtagatagaagtattcgaagtatagttccattttttgagactaataaaacatatgtttaaaaggacactaaaaactggagttatagatatccagatagaaacagtagttatctttgggtagaagaataatgagtgatctttacttttttactttttattcatctttgtgtttttatttatctaaaatgggtattgatttttaggacggttttgaaaaagaaaagtgttgggaatgaagcaagtgattgattggaaaacatactgaatggaagaaatatttagattaaaaatgaggtaggttgaagtttcttctctgaaatgatagataaatggtgaagataaggcttattgtgaggattcagtgaggtaatatatgcaaagtacttacaatgttctggcacatagtaattaattaagaaaatcgagcacccttaattacctagaatgcagggttgttagttttttggttgacttttgttttgctggggcattctgccatgttttagtgtcatttaataaataatagtaacaataaaggttaacatttattaagtgac

SEQ ID NO: 307210 - DNA, 3339 bp, Homo sapiens
tttgagacccgttggatcccccgggctgcttgaattcggcactacctgagggcgggccggcctgcggcggagggaaaaaggaagaggagaaggaaattgtcccgaatccctgcaggtctttctgtaggttgcggcacaacgccaggcaaaagaagaggaaggaatttaatcctaatcggtggaggtcgatttgagggtctgctgtagcaggtggctccgcttgaagcgagggaggaagtttcctccgatcagtagagattggaaagattgttgggagtggcacaccactagggaaaagaagaaggggcgaactgcttgtcttgaggaggtcaacccccagaatcagctcttgtggccttgaagtggctgaagacgatcaccctccacaggcttgagcccagtcccacagccttcctcccccagcctgagtgactactctattccttggtccctgctattgtcggggacgattgcatgggctacgccaggaaagtaggctgggtgaccgcaggcctggtgattggggctggcgcctgctattgcatttatagactgactaggggaagaaaacagaacaaggaaaaaatggctgagggtggatctggggatgtggatgatgctggggactgttctggggccaggtataatgactggtctgatgatgatgatgacagcaatgagagcaagagtatagtatggtacccaccttgggctcggattgggactgaagctggaaccagagctagggccagggcaagggccagggctacccgggcacgtcgggctgtccagaaacgggcttcccccaattcagatgataccgttttgtcccctcaagagctacaaaaggttctttgcttggttgagatgtctgaaaagccttatattcttgaagcagctttaattgctctgggtaacaatgctgcttatgcatttaacagagatattattcgtgatctgggtggtctcccaattgtcgcaaagattctcaatactcgggatcccatagttaaggaaaaggctttaattgtcctgaataacttgagtgtgaatgctgaaaatcagcgcaggcttaaagtatacatgaatcaagtgtgtgatgacacaatcacttctcgcttgaactcatctgtgcagcttgctggactgagattgcttacaaatatgactgttactaatgagtatcagcacatgcttgctaattccatttctgacttttttcgtttattttcagcgggaaatgaagaaaccaaacttcaggttctgaaactccttttgaatttggctgaaaatccagccatgactagggaactgctcagggcccaagtaccatcttcactgggctccctctttaataagaaggagaacaaagaagttattcttaaacttctggtcatatttgagaacataaatgataatttcaaatgggaagaaaatgaacctactcagaatcaattcggtgaaggttcactttttttctttttaaaagaatttcaagtgtgtgctgataaggttctgggaatagaaagtcaccatgattttttggtgaaagtaaaagttggaaaattcatggccaaacttgctgaacatatgttcccaaagagccaggaataacaccttgattttgtaatttagaagcaacacacattgtaaactattcattttctccaccttgtttatatggtaaaggaatcctttcagctgccagttttgaataatgaatatcatattgtatcatcaatgctgatatttaactgagttggtctttaggtttaagatggataaatgaatatcactacttgttctgaaaacatgtttgttgctttttatctcgctgcctagattgaaatattttgctatttcttctgcataagtgacagtgaaccaattcatcatgagtaagctcccttctgtcattttcattgatttaatttgtgtatcatcaataaaattgtatgttaatgctggaaagaaaaaaagaagaaagaaagaaaccatccctgtccttcagtttataatctagttggagagataagaaacgtacaaaccaaaagataacagaatatctgaagcatgtactcattgtcagatgttccctctgagagcacagaggaggcaaaagcttctgtgggatgtgctagtcggctaaagcttcacagaggaggtggcaattgaaaatgagtcctgaatggggtagggtggttagggaattccatgagacaagacaaggggggcatggtgtgagaaaggcatggaagtaggaaccctcttcctatgacaggagatcattctgcttagagtggagagtgtggagagtgggagtagataattttggaaagctgggtgaagccagttgtggagaattgtttgaatattatcccattgaatacccagagccactaaatctttttttactagaaaataattggggtccatatgaaagtctctattactgagtagtgtcaatgagggtgtggcaaaatggagcctttcacatcctagtggtggccatttggtaatacagatataagccttaaactatgtaaacccttgtcctaaggaagtaattgaataattgcccaaagattgtatgtatgaggctgttcatcccagcactgtctaagctagtaaaaattggaaacaatttaagtatctagcacattggattggttataaagcaaggaatgttcacacagtaggatattataagtatgctgatggaaatctatattgccaggaaaagctattcattatgcgttgtgaagtcagaaagtaaaaaagggtagatagaagtattcgaagtatagttccattttttgagactaataaaacatatgtttaaaaggacactaaaaactggagttatagatatccagatagaaacagtagttatctttgggtagaagaataatgagtgatctttacttttttactttttattcatctttgtgtttttatttatctaaaatgggtattgatttttaggacggttttgaaaaagaaaagtgttgggaatgaagcaagtgattgattggaaaacatactgaatggaagaaatatttagattaaaaatgaggtaggttgaagtttcttctctgaaatgatagataaatggtgaagataaggcttattgtgaggattcagtgaggtaatatatgcaaagtacttacaatgttctggcacatagtaattaattaagaaaatcgagcacccttaattacctagaatgcagggttgttagttttttggttgacttttgttttgctggggcattctgccatgttttagtgtcatttaataaataatagtaacaataaaggttaacatttattaagtgac

SEQ ID NO: 307211 - DNA, 3322 bp, Homo sapiens
gtagccctcacgtgaccaagagctgacgtgtgcagaagtccttcttgtcctggtcgttgttcccgtctgagtaccagctccccactgccctgagggcgggccggcctgcggcggagggaaaaaggaagaggagaaggaaattgtcccgaatccctgcaggtctttctgtaggttgcggcacaacgccaggcaaaagaagaggaaggaatttaatcctaatcggtggaggtcgatttgaggattggaaagattgttgggagtggcacaccactagggaaaagaagaaggggcgaactgcttgtcttgaggaggtcaacccccagaatcagctcttgtggccttgaagtggctgaagacgatcaccctccacaggcttgagcccagtcccacagccttcctcccccagcctgagtgactactctattccttggtccctgctattgtcggggacgattgcatgggctacgccaggaaagtaggctgggtgaccgcaggcctggtgattggggctggcgcctgctattgcatttatagactgactaggggaagaaaacagaacaaggaaaaaatggctgagggtggatctggggatgtggatgatgctggggactgttctggggccaggtataatgactggtctgatgatgatgatgacagcaatgagagcaagagtatagtatggtacccaccttgggctcggattgggactgaagctggaaccagagctagggccagggcaagggccagggctacccgggcacgtcgggctgtccagaaacgggcttcccccaattcagatgataccgttttgtcccctcaagagctacaaaaggttctttgcttggttgagatgtctgaaaagccttatattcttgaagcagctttaattgctctgggtaacaatgctgcttatgcatttaacagagatattattcgtgatctgggtggtctcccaattgtcgcaaagattctcaatactcgggatcccatagttaaggaaaaggctttaattgtcctgaataacttgagtgtgaatgctgaaaatcagcgcaggcttaaagtatacatgaatcaagtgtgtgatgacacaatcacttctcgcttgaactcatctgtgcagcttgctggactgagattgcttacaaatatgactgttactaatgagtatcagcacatgcttgctaattccatttctgacttttttcgtttattttcagcgggaaatgaagaaaccaaacttcaggttctgaaactccttttgaatttggctgaaaatccagccatgactagggaactgctcagggcccaagtaccatcttcactgggctccctctttaataagaaggagaacaaagaagttattcttaaacttctggtcatatttgagaacataaatgataatttcaaatgggaagaaaatgaacctactcagaatcaattcggtgaaggttcactttttttctttttaaaagaatttcaagtgtgtgctgataaggttctgggaatagaaagtcaccatgattttttggtgaaagtaaaagttggaaaattcatggccaaacttgctgaacatatgttcccaaagagccaggaataacaccttgattttgtaatttagaagcaacacacattgtaaactattcattttctccaccttgtttatatggtaaaggaatcctttcagctgccagttttgaataatgaatatcatattgtatcatcaatgctgatatttaactgagttggtctttaggtttaagatggataaatgaatatcactacttgttctgaaaacatgtttgttgctttttatctcgctgcctagattgaaatattttgctatttcttctgcataagtgacagtgaaccaattcatcatgagtaagctcccttctgtcattttcattgatttaatttgtgtatcatcaataaaattgtatgttaatgctggaaagaaaaaaagaagaaagaaagaaaccatccctgtccttcagtttataatctagttggagagataagaaacgtacaaaccaaaagataacagaatatctgaagcatgtactcattgtcagatgttccctctgagagcacagaggaggcaaaagcttctgtgggatgtgctagtcggctaaagcttcacagaggaggtggcaattgaaaatgagtcctgaatggggtagggtggttagggaattccatgagacaagacaaggggggcatggtgtgagaaaggcatggaagtaggaaccctcttcctatgacaggagatcattctgcttagagtggagagtgtggagagtgggagtagataattttggaaagctgggtgaagccagttgtggagaattgtttgaatattatcccattgaatacccagagccactaaatctttttttactagaaaataattggggtccatatgaaagtctctattactgagtagtgtcaatgagggtgtggcaaaatggagcctttcacatcctagtggtggccatttggtaatacagatataagccttaaactatgtaaacccttgtcctaaggaagtaattgaataattgcccaaagattgtatgtatgaggctgttcatcccagcactgtctaagctagtaaaaattggaaacaatttaagtatctagcacattggattggttataaagcaaggaatgttcacacagtaggatattataagtatgctgatggaaatctatattgccaggaaaagctattcattatgcgttgtgaagtcagaaagtaaaaaagggtagatagaagtattcgaagtatagttccattttttgagactaataaaacatatgtttaaaaggacactaaaaactggagttatagatatccagatagaaacagtagttatctttgggtagaagaataatgagtgatctttacttttttactttttattcatctttgtgtttttatttatctaaaatgggtattgatttttaggacggttttgaaaaagaaaagtgttgggaatgaagcaagtgattgattggaaaacatactgaatggaagaaatatttagattaaaaatgaggtaggttgaagtttcttctctgaaatgatagataaatggtgaagataaggcttattgtgaggattcagtgaggtaatatatgcaaagtacttacaatgttctggcacatagtaattaattaagaaaatcgagcacccttaattacctagaatgcagggttgttagttttttggttgacttttgttttgctggggcattctgccatgttttagtgtcatttaataaataatagtaacaataaaggttaacatttattaagtgac

SEQ ID NO: 307212 - DNA, 3177 bp, Homo sapiens
gctcgggaccctctaagcatcactccccgtgagggtctgctgtagcaggtggctccgcttgaagcgagggaggaagtttcctccgatcagtagagattggaaagattgttgggagtggcacaccactagggaaaagaagaaggggcgaactgcttgtcttgaggaggtcaacccccagaatcagctcttgtggccttgaagtggctgaagacgatcaccctccacaggcttgagcccagtcccacagccttcctcccccagcctgagtgactactctattccttggtccctgctattgtcggggacgattgcatgggctacgccaggaaagtaggctgggtgaccgcaggcctggtgattggggctggcgcctgctattgcatttatagactgactaggggaagaaaacagaacaaggaaaaaatggctgagggtggatctggggatgtggatgatgctggggactgttctggggccaggtataatgactggtctgatgatgatgatgacagcaatgagagcaagagtatagtatggtacccaccttgggctcggattgggactgaagctggaaccagagctagggccagggcaagggccagggctacccgggcacgtcgggctgtccagaaacgggcttcccccaattcagatgataccgttttgtcccctcaagagctacaaaaggttctttgcttggttgagatgtctgaaaagccttatattcttgaagcagctttaattgctctgggtaacaatgctgcttatgcatttaacagagatattattcgtgatctgggtggtctcccaattgtcgcaaagattctcaatactcgggatcccatagttaaggaaaaggctttaattgtcctgaataacttgagtgtgaatgctgaaaatcagcgcaggcttaaagtatacatgaatcaagtgtgtgatgacacaatcacttctcgcttgaactcatctgtgcagcttgctggactgagattgcttacaaatatgactgttactaatgagtatcagcacatgcttgctaattccatttctgacttttttcgtttattttcagcgggaaatgaagaaaccaaacttcaggttctgaaactccttttgaatttggctgaaaatccagccatgactagggaactgctcagggcccaagtaccatcttcactgggctccctctttaataagaaggagaacaaagaagttattcttaaacttctggtcatatttgagaacataaatgataatttcaaatgggaagaaaatgaacctactcagaatcaattcggtgaaggttcactttttttctttttaaaagaatttcaagtgtgtgctgataaggttctgggaatagaaagtcaccatgattttttggtgaaagtaaaagttggaaaattcatggccaaacttgctgaacatatgttcccaaagagccaggaataacaccttgattttgtaatttagaagcaacacacattgtaaactattcattttctccaccttgtttatatggtaaaggaatcctttcagctgccagttttgaataatgaatatcatattgtatcatcaatgctgatatttaactgagttggtctttaggtttaagatggataaatgaatatcactacttgttctgaaaacatgtttgttgctttttatctcgctgcctagattgaaatattttgctatttcttctgcataagtgacagtgaaccaattcatcatgagtaagctcccttctgtcattttcattgatttaatttgtgtatcatcaataaaattgtatgttaatgctggaaagaaaaaaagaagaaagaaagaaaccatccctgtccttcagtttataatctagttggagagataagaaacgtacaaaccaaaagataacagaatatctgaagcatgtactcattgtcagatgttccctctgagagcacagaggaggcaaaagcttctgtgggatgtgctagtcggctaaagcttcacagaggaggtggcaattgaaaatgagtcctgaatggggtagggtggttagggaattccatgagacaagacaaggggggcatggtgtgagaaaggcatggaagtaggaaccctcttcctatgacaggagatcattctgcttagagtggagagtgtggagagtgggagtagataattttggaaagctgggtgaagccagttgtggagaattgtttgaatattatcccattgaatacccagagccactaaatctttttttactagaaaataattggggtccatatgaaagtctctattactgagtagtgtcaatgagggtgtggcaaaatggagcctttcacatcctagtggtggccatttggtaatacagatataagccttaaactatgtaaacccttgtcctaaggaagtaattgaataattgcccaaagattgtatgtatgaggctgttcatcccagcactgtctaagctagtaaaaattggaaacaatttaagtatctagcacattggattggttataaagcaaggaatgttcacacagtaggatattataagtatgctgatggaaatctatattgccaggaaaagctattcattatgcgttgtgaagtcagaaagtaaaaaagggtagatagaagtattcgaagtatagttccattttttgagactaataaaacatatgtttaaaaggacactaaaaactggagttatagatatccagatagaaacagtagttatctttgggtagaagaataatgagtgatctttacttttttactttttattcatctttgtgtttttatttatctaaaatgggtattgatttttaggacggttttgaaaaagaaaagtgttgggaatgaagcaagtgattgattggaaaacatactgaatggaagaaatatttagattaaaaatgaggtaggttgaagtttcttctctgaaatgatagataaatggtgaagataaggcttattgtgaggattcagtgaggtaatatatgcaaagtacttacaatgttctggcacatagtaattaattaagaaaatcgagcacccttaattacctagaatgcagggttgttagttttttggttgacttttgttttgctggggcattctgccatgttttagtgtcatttaataaataatagtaacaataaaggttaacatttattaagtgac

SEQ ID NO: 307213 - DNA, 3185 bp, Homo sapiens
tgacctgggatggggagggaaaggctgaaatgagaggcatagagatttcgtcaacaatctacatttcctacctagcattcaattattattatcttgtccctctgtgcagctccctgcatggggcaacacaagcagaagagaaactcaaacccaattttcttcttccactcctaggtcaacccccagaatcagctcttgtggccttgaagtggctgaagacgatcaccctccacaggcttgagcccagtcccacagccttcctcccccagcctgagtgactactctattccttggtccctgctattgtcggggacgattgcatgggctacgccaggaaagtaggctgggtgaccgcaggcctggtgattggggctggcgcctgctattgcatttatagactgactaggggaagaaaacagaacaaggaaaaaatggctgagggtggatctggggatgtggatgatgctggggactgttctggggccaggtataatgactggtctgatgatgatgatgacagcaatgagagcaagagtatagtatggtacccaccttgggctcggattgggactgaagctggaaccagagctagggccagggcaagggccagggctacccgggcacgtcgggctgtccagaaacgggcttcccccaattcagatgataccgttttgtcccctcaagagctacaaaaggttctttgcttggttgagatgtctgaaaagccttatattcttgaagcagctttaattgctctgggtaacaatgctgcttatgcatttaacagagatattattcgtgatctgggtggtctcccaattgtcgcaaagattctcaatactcgggatcccatagttaaggaaaaggctttaattgtcctgaataacttgagtgtgaatgctgaaaatcagcgcaggcttaaagtatacatgaatcaagtgtgtgatgacacaatcacttctcgcttgaactcatctgtgcagcttgctggactgagattgcttacaaatatgactgttactaatgagtatcagcacatgcttgctaattccatttctgacttttttcgtttattttcagcgggaaatgaagaaaccaaacttcaggttctgaaactccttttgaatttggctgaaaatccagccatgactagggaactgctcagggcccaagtaccatcttcactgggctccctctttaataagaaggagaacaaagaagttattcttaaacttctggtcatatttgagaacataaatgataatttcaaatgggaagaaaatgaacctactcagaatcaattcggtgaaggttcactttttttctttttaaaagaatttcaagtgtgtgctgataaggttctgggaatagaaagtcaccatgattttttggtgaaagtaaaagttggaaaattcatggccaaacttgctgaacatatgttcccaaagagccaggaataacaccttgattttgtaatttagaagcaacacacattgtaaactattcattttctccaccttgtttatatggtaaaggaatcctttcagctgccagttttgaataatgaatatcatattgtatcatcaatgctgatatttaactgagttggtctttaggtttaagatggataaatgaatatcactacttgttctgaaaacatgtttgttgctttttatctcgctgcctagattgaaatattttgctatttcttctgcataagtgacagtgaaccaattcatcatgagtaagctcccttctgtcattttcattgatttaatttgtgtatcatcaataaaattgtatgttaatgctggaaagaaaaaaagaagaaagaaagaaaccatccctgtccttcagtttataatctagttggagagataagaaacgtacaaaccaaaagataacagaatatctgaagcatgtactcattgtcagatgttccctctgagagcacagaggaggcaaaagcttctgtgggatgtgctagtcggctaaagcttcacagaggaggtggcaattgaaaatgagtcctgaatggggtagggtggttagggaattccatgagacaagacaaggggggcatggtgtgagaaaggcatggaagtaggaaccctcttcctatgacaggagatcattctgcttagagtggagagtgtggagagtgggagtagataattttggaaagctgggtgaagccagttgtggagaattgtttgaatattatcccattgaatacccagagccactaaatctttttttactagaaaataattggggtccatatgaaagtctctattactgagtagtgtcaatgagggtgtggcaaaatggagcctttcacatcctagtggtggccatttggtaatacagatataagccttaaactatgtaaacccttgtcctaaggaagtaattgaataattgcccaaagattgtatgtatgaggctgttcatcccagcactgtctaagctagtaaaaattggaaacaatttaagtatctagcacattggattggttataaagcaaggaatgttcacacagtaggatattataagtatgctgatggaaatctatattgccaggaaaagctattcattatgcgttgtgaagtcagaaagtaaaaaagggtagatagaagtattcgaagtatagttccattttttgagactaataaaacatatgtttaaaaggacactaaaaactggagttatagatatccagatagaaacagtagttatctttgggtagaagaataatgagtgatctttacttttttactttttattcatctttgtgtttttatttatctaaaatgggtattgatttttaggacggttttgaaaaagaaaagtgttgggaatgaagcaagtgattgattggaaaacatactgaatggaagaaatatttagattaaaaatgaggtaggttgaagtttcttctctgaaatgatagataaatggtgaagataaggcttattgtgaggattcagtgaggtaatatatgcaaagtacttacaatgttctggcacatagtaattaattaagaaaatcgagcacccttaattacctagaatgcagggttgttagttttttggttgacttttgttttgctggggcattctgccatgttttagtgtcatttaataaataatagtaacaataaaggttaacatttattaagtgac

SEQ ID NO: 307214 - DNA, 3063 bp, Homo sapiens
tccttgctcgagatccattgtgctctaaaggcgaactgcttgtcttgaggaggtcaacccccagaatcagctcttgtggccttgaagtggctgaagacgatcaccctccacaggcttgagcccagtcccacagccttcctcccccagcctgagtgactactctattccttggtccctgctattgtcggggacgattgcatgggctacgccaggaaagtaggctgggtgaccgcaggcctggtgattggggctggcgcctgctattgcatttatagactgactaggggaagaaaacagaacaaggaaaaaatggctgagggtggatctggggatgtggatgatgctggggactgttctggggccaggtataatgactggtctgatgatgatgatgacagcaatgagagcaagagtatagtatggtacccaccttgggctcggattgggactgaagctggaaccagagctagggccagggcaagggccagggctacccgggcacgtcgggctgtccagaaacgggcttcccccaattcagatgataccgttttgtcccctcaagagctacaaaaggttctttgcttggttgagatgtctgaaaagccttatattcttgaagcagctttaattgctctgggtaacaatgctgcttatgcatttaacagagatattattcgtgatctgggtggtctcccaattgtcgcaaagattctcaatactcgggatcccatagttaaggaaaaggctttaattgtcctgaataacttgagtgtgaatgctgaaaatcagcgcaggcttaaagtatacatgaatcaagtgtgtgatgacacaatcacttctcgcttgaactcatctgtgcagcttgctggactgagattgcttacaaatatgactgttactaatgagtatcagcacatgcttgctaattccatttctgacttttttcgtttattttcagcgggaaatgaagaaaccaaacttcaggttctgaaactccttttgaatttggctgaaaatccagccatgactagggaactgctcagggcccaagtaccatcttcactgggctccctctttaataagaaggagaacaaagaagttattcttaaacttctggtcatatttgagaacataaatgataatttcaaatgggaagaaaatgaacctactcagaatcaattcggtgaaggttcactttttttctttttaaaagaatttcaagtgtgtgctgataaggttctgggaatagaaagtcaccatgattttttggtgaaagtaaaagttggaaaattcatggccaaacttgctgaacatatgttcccaaagagccaggaataacaccttgattttgtaatttagaagcaacacacattgtaaactattcattttctccaccttgtttatatggtaaaggaatcctttcagctgccagttttgaataatgaatatcatattgtatcatcaatgctgatatttaactgagttggtctttaggtttaagatggataaatgaatatcactacttgttctgaaaacatgtttgttgctttttatctcgctgcctagattgaaatattttgctatttcttctgcataagtgacagtgaaccaattcatcatgagtaagctcccttctgtcattttcattgatttaatttgtgtatcatcaataaaattgtatgttaatgctggaaagaaaaaaagaagaaagaaagaaaccatccctgtccttcagtttataatctagttggagagataagaaacgtacaaaccaaaagataacagaatatctgaagcatgtactcattgtcagatgttccctctgagagcacagaggaggcaaaagcttctgtgggatgtgctagtcggctaaagcttcacagaggaggtggcaattgaaaatgagtcctgaatggggtagggtggttagggaattccatgagacaagacaaggggggcatggtgtgagaaaggcatggaagtaggaaccctcttcctatgacaggagatcattctgcttagagtggagagtgtggagagtgggagtagataattttggaaagctgggtgaagccagttgtggagaattgtttgaatattatcccattgaatacccagagccactaaatctttttttactagaaaataattggggtccatatgaaagtctctattactgagtagtgtcaatgagggtgtggcaaaatggagcctttcacatcctagtggtggccatttggtaatacagatataagccttaaactatgtaaacccttgtcctaaggaagtaattgaataattgcccaaagattgtatgtatgaggctgttcatcccagcactgtctaagctagtaaaaattggaaacaatttaagtatctagcacattggattggttataaagcaaggaatgttcacacagtaggatattataagtatgctgatggaaatctatattgccaggaaaagctattcattatgcgttgtgaagtcagaaagtaaaaaagggtagatagaagtattcgaagtatagttccattttttgagactaataaaacatatgtttaaaaggacactaaaaactggagttatagatatccagatagaaacagtagttatctttgggtagaagaataatgagtgatctttacttttttactttttattcatctttgtgtttttatttatctaaaatgggtattgatttttaggacggttttgaaaaagaaaagtgttgggaatgaagcaagtgattgattggaaaacatactgaatggaagaaatatttagattaaaaatgaggtaggttgaagtttcttctctgaaatgatagataaatggtgaagataaggcttattgtgaggattcagtgaggtaatatatgcaaagtacttacaatgttctggcacatagtaattaattaagaaaatcgagcacccttaattacctagaatgcagggttgttagttttttggttgacttttgttttgctggggcattctgccatgttttagtgtcatttaataaataatagtaacaataaaggttaacatttattaagtgac

SEQ ID NO: 307215 - DNA, 3891 bp, Homo sapiens
gtagccctcacgtgaccaagagctgacgtgtgcagaagtccttcttgtcctggtcgttgttcccgtctgagtaccagctccccactgccctgagggcgggccggcctgcggcggagggaaaaaggaagaggagaaggaaattgtcccgaatccctgcaggtctttctgtaggttgcggcacaacgccaggcaaaagaagaggaaggaatttaatcctaatcggtggaggtcgatttgagggtctgctgtagcaggtggctccgcttgaagcgagggaggaagtttcctccgatcagtagagattggaaagattgttgggagtggcacaccactagggaaaagaagaaggggcgaactgcttgtcttgaggaggtcaacccccagaatcagctcttgtggccttgaagtggctgaagacgatcaccctccacaggcttgagcccagtcccacagccttcctcccccagcctgagtgactactctattccttggtccctgctattgtcggggacgattgcatgggctacgccaggaaagtaggctgggtgaccgcaggcctggtgattggggctggcgcctgctattgcatttatagactgactaggggaagaaaacagaacaaggaaaaaatggctgagggtggatctggggatgtggatgatgctggggactgttctggggccaggtataatgactggtctgatgatgatgatgacagcaatgagagcaagagtatagtatggtacccaccttgggctcggattgggactgaagctggaaccagagctagggccagggcaagggccagggctacccgggcacgtcgggctgtccagaaacgggcttcccccaattcagatgataccgttttgtcccctcaagagctacaaaaggttctttgcttggttgagatgtctgaaaagccttatattcttgaagcagctttaattgctctgggtaacaatgctgcttatgcatttaacagagatattattcgtgatctgggtggtctcccaattgtcgcaaagattctcaatactcgggatcccatagttaaggaaaaggctttaattgtcctgaataacttgagtgtgaatgctgaaaatcagcgcaggcttaaagtatacatgaatcaagtgtgtgatgacacaatcacttctcgcttgaactcatctgtgcagcttgctggactgagattgcttacaaatatgactgttactaatgagtatcagcacatgcttgctaattccatttctgacttttttcgtttattttcagcgggaaatgaagaaaccaaacttcaggttctgaaactccttttgaatttggctgaaaatccagccatgactagggaactgctcagggcccaagtaccatcttcactgggctccctctttaataagaaggagaacaaagaagttattcttaaacttctggtcatatttgagaacataaatgataatttcaaatgggaagaaaatgaacctactcagaatcaattcggtgaaggttcactttttttctttttaaaagaatttcaagtgtgtgctgataaggttctgggaatagaaagtcaccatgattttttggtgaaagtaaaagttggaaaattcatggccaaacttgctgaacatatgttcccaaagagccaggaataacaccttgattttgtaatttagaagcaacacacattgtaaactattcattttctccaccttgtttatatggtaaaggaatcctttcagctgccagttttgaataatgaatatcatattgtatcatcaatgctgatatttaactgagttggtctttaggtttaagatggataaatgaatatcactacttgttctgaaaacatgtttgttgctttttatctcgctgcctagattgaaatattttgctatttcttctgcataagtgacagtgaaccaattcatcatgagtaagctcccttctgtcattttcattgatttaatttgtgtatcatcaataaaattgtatgttaatgctggaaagaaaaaaagaagaaagaaagaaaccatccctgtccttcagtttataatctagttggagagataagaaacgtacaaaccaaaagataacagaatatctgaagcatgtactcattgtcagatgttccctctgagagcacagaggaggcaaaagcttctgtgggatgtgctagtcggctaaagcttcacagaggaggtggcaattgaaaatgagtcctgaatggggtagggtggttagggaattccatgagacaagacaaggggggcatggtgtgagaaaggcatggaagtaggaaccctcttcctatgacaggagatcattctgcttagagtggagagtgtggagagtgggagtagataattttggaaagctgggtgaagccagttgtggagaattgtttgaatattatcccattgaatacccagagccactaaatctttttttactagaaaataattggggtccatatgaaagtctctattactgagtagtgtcaatgagggtgtggcaaaatggagcctttcacatcctagtggtggccatttggtaatacagatataagccttaaactatgtaaacccttgtcctaaggaagtaattgaataattgcccaaagattgtatgtatgaggctgttcatcccagcactgtctaagctagtaaaaattggaaacaatttaagtatctagcacattggattggttataaagcaaggaatgttcacacagtaggatattataagtatgctgatggaaatctatattgccaggaaaagctattcattatgcgttgtgaagtcagaaagtaaaaaagggtagatagaagtattcgaagtatagttccattttttgagactaataaaacatatgtttaaaaggacactaaaaactggagttatagatatccagatagaaacagtagttatctttgggtagaagaataatgagtgatctttacttttttactttttattcatctttgtgtttttatttatctaaaatgggtattgatttttaggacggttttgaaaaagaaaagtgttgggaatgaagcaagtgattgattggaaaacatactgaatggaagaaatatttagattaaaaatgagagacataagacataagagtctcattacgttgcccatgctggtatcgaactcctgggctcaagagatcctcccaccccagcctctgaattagctaggactacaggccagtgccagtacacccggctggctagaattttcttctttttaaaggctgcattgtttccattgtatttccatttgcatgtgccacattttctttatccatccaatgatggacacttaggttgattccacatcttggctattgtgaataatgctgcaatgaacatgggagtgaagatatctctttgatacactgatttcaattcctttgaatatatatgcagaagtgggattgctggataatatggtaattaaaattttagttttttgaggggcctccatactcttttccaaaatggctgtactaatttacattcccaccaacaatgttcaaggatttcatattcttgacattcttaccaaaattgtcacagtttgtaaaaggtagtctaataagtggcctaagtgaatgtgacaacacttcattgaaagcaatcttaggtttttccaactatagtcaataataacttaattgtacattctaaaataactcaaagagtgtaattggattgcttgtaacttaaaggataaatgcttgaggggatggatgcctcattctccatgatgtgcttatttcacattgcatgcctgtatcaaaacattacatttatcccataatatacacacttactatgtaccccccaaaaataaacattaaaattaagtttt

SEQ ID NO: 307216 - DNA, 3430 bp, Homo sapiens
gtagccctcacgtgaccaagagctgacgtgtgcagaagtccttcttgtcctggtcgttgttcccgtctgagtaccagctccccactgccctgagggcgggccggcctgcggcggagggaaaaaggaagaggagaaggaaattgtcccgaatccctgcaggtctttctgtaggttgcggcacaacgccaggcaaaagaagaggaaggaatttaatcctaatcggtggaggtcgatttgagggtctgctgtagcaggtggctccgcttgaagcgagggaggaagtttcctccgatcagtagagattggaaagattgttgggagtggcacaccactagggaaaagaagaaggggcgaactgcttgtcttgaggaggtcaacccccagaatcagctcttgtggccttgaagtggctgaagacgatcaccctccacaggcttgagcccagtcccacagccttcctcccccagcctgagtgactactctattccttggtccctgctattgtcggggacgattgcatgggctacgccaggaaagtaggctgggtgaccgcaggcctggtgattggggctggcgcctgctattgcatttatagactgactaggggaagaaaacagaacaaggaaaaaatggctgagggtggatctggggatgtggatgatgctggggactgttctggggccaggtataatgactggtctgatgatgatgatgacagcaatgagagcaagagtatagtatggtacccaccttgggctcggattgggactgaagctggaaccagagctagggccagggcaagggccagggctacccgggcacgtcgggctgtccagaaacgggcttcccccaattcagatgataccgttttgtcccctcaagagctacaaaaggttctttgcttggttgagatgtctgaaaagccttatattcttgaagcagctttaattgctctgggtaacaatgctgcttatgcatttaacagagatattattcgtgatctgggtggtctcccaattgtcgcaaagattctcaatactcgggatcccatagttaaggaaaaggctttaattgtcctgaataacttgagtgtgaatgctgaaaatcagcgcaggcttaaagtatacatgaatcaagtgtgtgatgacacaatcacttctcgcttgaactcatctgtgcagcttgctggactgagattgcttacaaatatgactgttactaatgagtatcagcacatgcttgctaattccatttctgacttttttcgtttattttcagcgggaaatgaagaaaccaaacttcaggttctgaaactccttttgaatttggctgaaaatccagccatgactagggaactgctcagggcccaagtaccatcttcactgggctccctctttaataagaaggagaacaaagaagttattcttaaacttctggtcatatttgagaacataaatgataatttcaaatgggaagaaaatgaacctactcagaatcaattcggtgaaggttcactttttttctttttaaaagaatttcaagtgtgtgctgataaggttctgggaatagaaagtcaccatgattttttggtgaaagtaaaagttggaaaattcatggccaaacttgctgaacatatgttcccaaagagccaggaataacaccttgattttgtaatttagaagcaacacacattgtaaactattcattttctccaccttgtttatatggtaaaggaatcctttcagctgccagttttgaataatgaatatcatattgtatcatcaatgctgatatttaactgagttggtctttaggtttaagatggataaatgaatatcactacttgttctgaaaacatgtttgttgctttttatctcgctgcctagattgaaatattttgctatttcttctgcataagtgacagtgaaccaattcatcatgagtaagctcccttctgtcattttcattgatttaatttgtgtatcatcaataaaattgtatgttaatgctggaaagaaaaaaagaagaaagaaagaaaccatccctgtccttcagtttataatctagttggagagataagaaacgtacaaaccaaaagataacagaatatctgaagcatgtactcattgtcagatgttccctctgagagcacagaggaggcaaaagcttctgtgggatgtgctagtcggctaaagcttcacagaggaggtggcaattgaaaatgagtcctgaatggggtagggtggttagggaattccatgagacaagacaaggggggcatggtgtgagaaaggcatggaagtaggaaccctcttcctatgacaggagatcattctgcttagagtggagagtgtggagagtgggagtagataattttggaaagctgggtgaagccagttgtggagaattgtttgaatattatcccattgaatacccagagccactaaatctttttttactagaaaataattggggtccatatgaaagtctctattactgagtagtgtcaatgagggtgtggcaaaatggagcctttcacatcctagtggtggccatttggtaatacagatataagccttaaactatgtaaacccttgtcctaaggaagtaattgaataattgcccaaagattgtatgtatgaggctgttcatcccagcactgtctaagctagtaaaaattggaaacaatttaagtatctagcacattggattggttataaagcaaggaatgttcacacagtaggatattataagtatgctgatggaaatctatattgccaggaaaagctattcattatgcgttgtgaagtcagaaagtaaaaaagggtagatagaagtattcgaagtatagttccattttttgagactaataaaacatatgtttaaaaggacactaaaaactggagttatagatatccagatagaaacagtagttatctttgggtagaagaataatgagtgatctttacttttttactttttattcatctttgtgtttttatttatctaaaatgggtattgatttttaggacggttttgaaaaagaaaagtgttgggaatgaagcaagtgattgattggaaaacatactgaatggaagaaatatttagattaaaaatgagaatggagataactttgagtacctagagaaggatggagctacaagatggaatgagcctgggaccctgaatggccacgtgtagcagagcctctctgctgacctggaacattaacctcagactcttttgagttgtgcaaccatcaccacaatgaattgtagaatattttcatcactccaaacagaaaccctgcacctatgagttgtcactcttcaacttgcctctgccactcctttcaactattactttactttctgtctctatagatttccctgttgtaaacatttcatataacattaaaaacttaagacca

SEQ ID NO: 307217 - DNA, 2139 bp, Homo sapiens
cagttttccccttgcttcccaggcccttgacatggcttacctgccttcactcccagcaccttgcccaacaggataagctggatccccttggccttctgaatatcccagtgtcttcaggtttcccaagtaccatcttcactgggctccctctttaataagaaggagaacaaagaagttattcttaaacttctggtcatatttgagaacataaatgataatttcaaatgggaagaaaatgaacctactcagaatcaattcggtgaaggttcactttttttctttttaaaagaatttcaagtgtgtgctgataaggttctgggaatagaaagtcaccatgattttttggtgaaagtaaaagttggaaaattcatggccaaacttgctgaacatatgttcccaaagagccaggaataacaccttgattttgtaatttagaagcaacacacattgtaaactattcattttctccaccttgtttatatggtaaaggaatcctttcagctgccagttttgaataatgaatatcatattgtatcatcaatgctgatatttaactgagttggtctttaggtttaagatggataaatgaatatcactacttgttctgaaaacatgtttgttgctttttatctcgctgcctagattgaaatattttgctatttcttctgcataagtgacagtgaaccaattcatcatgagtaagctcccttctgtcattttcattgatttaatttgtgtatcatcaataaaattgtatgttaatgctggaaagaaaaaaagaagaaagaaagaaaccatccctgtccttcagtttataatctagttggagagataagaaacgtacaaaccaaaagataacagaatatctgaagcatgtactcattgtcagatgttccctctgagagcacagaggaggcaaaagcttctgtgggatgtgctagtcggctaaagcttcacagaggaggtggcaattgaaaatgagtcctgaatggggtagggtggttagggaattccatgagacaagacaaggggggcatggtgtgagaaaggcatggaagtaggaaccctcttcctatgacaggagatcattctgcttagagtggagagtgtggagagtgggagtagataattttggaaagctgggtgaagccagttgtggagaattgtttgaatattatcccattgaatacccagagccactaaatctttttttactagaaaataattggggtccatatgaaagtctctattactgagtagtgtcaatgagggtgtggcaaaatggagcctttcacatcctagtggtggccatttggtaatacagatataagccttaaactatgtaaacccttgtcctaaggaagtaattgaataattgcccaaagattgtatgtatgaggctgttcatcccagcactgtctaagctagtaaaaattggaaacaatttaagtatctagcacattggattggttataaagcaaggaatgttcacacagtaggatattataagtatgctgatggaaatctatattgccaggaaaagctattcattatgcgttgtgaagtcagaaagtaaaaaagggtagatagaagtattcgaagtatagttccattttttgagactaataaaacatatgtttaaaaggacactaaaaactggagttatagatatccagatagaaacagtagttatctttgggtagaagaataatgagtgatctttacttttttactttttattcatctttgtgtttttatttatctaaaatgggtattgatttttaggacggttttgaaaaagaaaagtgttgggaatgaagcaagtgattgattggaaaacatactgaatggaagaaatatttagattaaaaatgaggtaggttgaagtttcttctctgaaatgatagataaatggtgaagataaggcttattgtgaggattcagtgaggtaatatatgcaaagtacttacaatgttctggcacatagtaattaattaagaaaatcgagcacccttaattacctagaatgcagggttgttagttttttggttgacttttgttttgctggggcattctgccatgttttagtgtcatttaataaataatagtaacaataaaggttaacatttattaagtgac

SEQ ID NO: 307218 - DNA, 2342 bp, Homo sapiens
gtagccctcacgtgaccaagagctgacgtgtgcagaagtccttcttgtcctggtcgttgttcccgtctgagtaccagctccccactgccctgagggcgggccggcctgcggcggagggaaaaaggaagaggagaaggaaattgtcccgaatccctgcaggtctttctgtaggttgcggcacaacgccaggcaaaagaagaggaaggaatttaatcctaatcggtggaggtcgatttgagggtctgctgtagcaggtggctccgcttgaagcgagggaggaagtttcctccgatcagtagagattggaaagattgttgggagtggcacaccactagggaaaagaagaaggggcgaactgcttgtcttgaggaggtcaacccccagaatcagctcttgtggccttgaagtggctgaagacgatcaccctccacaggcttgagcccagtcccacagccttcctcccccagcctgagtgactactctattccttggtccctgctattgtcggggacgattgcatgggctacgccaggaaagtaggctgggtgaccgcaggcctggtgattggggctggcgcctgctattgcatttatagactgactaggggaagaaaacagaacaaggaaaaaatggctgagggtggatctggggatgtggatgatgctggggactgttctggggccaggtataatgactggtctgatgatgatgatgacagcaatgagagcaagagtatagtatggtacccaccttgggctcggattgggactgaagctggaaccagagctagggccagggcaagggccagggctacccgggcacgtcgggctgtccagaaacgggcttcccccaattcagatgataccgttttgtcccctcaagagctacaaaaggttctttgcttggttgagatgtctgaaaagccttatattcttgaagcagctttaattgctctgggtaacaatgctgcttatgcatttaacagagatattattcgtgatctgggtggtctcccaattgtcgcaaagattctcaatactcgggatcccatagttaaggaaaaggctttaattgtcctgaataacttgagtgtgaatgctgaaaatcagcgcaggcttaaagtatacatgaatcaagtgtgtgatgacacaatcacttctcgcttgaactcatctgtgcagcttgctggactgagattgcttacaaatatgactgttactaatgagtatcagcacatgcttgctaattccatttctgacttttttcgtttattttcagcgggaaatgaagaaaccaaacttcaggttctgaaactccttttgaatttggctgaaaatccagccatgactagggaactgctcagggcccaagtaccatcttcactgggctccctctttaataagaaggagaacaaagaagttattcttaaacttctggtcatatttgagaacataaatgataatttcaaatgggaagaaaatgaacctactcagaatcaattcggtgaaggttcactttttttctttttaaaagaatttcaagtgtgtgctgataaggttctgggaatagaaagtcaccatgattttttggtgaaagtaaaagttggaaaattcatggccaaacttgctgaacatatgttcccaaagagccaggaataacaccttgattttgtaatttagaagcaacacacattgtaaactattcattttctccaccttgtttatatggtaaaggaatcctttcagctgccagttttgaataatgaatatcatattgtatcatcaatgctgatatttaactgagttggtctttaggtttaagatggataaatgaatatcactacttgttctgaaaacatgtttgttgctttttatctcgctgcctagattgaaatattttgctatttcttctgcataagtgacagtgaaccaattcatcatgagtaagctcccttctgtcattttcattgatttaatttgtgtatcatcaataaaattgtatgttaatgctggaaagaaaaaaagaagaaagaaagaaacgaagaaagaagaagggagggaggaagggagggaagggaaggagggaaataacactaacatcagcatacagctatgagagatgaagaccatagaatcaaaccaagccccagacaggggtgggcttaagaagcactttgaatcttctggctatctcactttatttccatagctgccttgcaagatgagaagtgcaagaatggtcatccttattttacagatgaggcccagagatcagagatgatcttgactgggtgtgtacctggtgaccagataaggactggggaaacatcgcgtacaggtcac

SEQ ID NO: 307219 - DNA, 1310 bp, Homo sapiens
acgtactgggatgctagccagtttgaaccagtaatatctgaagcatgtactcattgtcagatgttccctctgagagcacagaggaggcaaaagcttctgtgggatgtgctagtcggctaaagcttcacagaggaggtggcaattgaaaatgagtcctgaatggggtagggtggttagggaattccatgagacaagacaaggggggcatggtgtgagaaaggcatggaagtaggaaccctcttcctatgacaggagatcattctgcttagagtggagagtgtggagagtgggagtagataattttggaaagctgggtgaagccagttgtggagaattgtttgaatattatcccattgaatacccagagccactaaatctttttttactagaaaataattggggtccatatgaaagtctctattactgagtagtgtcaatgagggtgtggcaaaatggagcctttcacatcctagtggtggccatttggtaatacagatataagccttaaactatgtaaacccttgtcctaaggaagtaattgaataattgcccaaagattgtatgtatgaggctgttcatcccagcactgtctaagctagtaaaaattggaaacaatttaagtatctagcacattggattggttataaagcaaggaatgttcacacagtaggatattataagtatgctgatggaaatctatattgccaggaaaagctattcattatgcgttgtgaagtcagaaagtaaaaaagggtagatagaagtattcgaagtatagttccattttttgagactaataaaacatatgtttaaaaggacactaaaaactggagttatagatatccagatagaaacagtagttatctttgggtagaagaataatgagtgatctttacttttttactttttattcatctttgtgtttttatttatctaaaatgggtattgatttttaggacggttttgaaaaagaaaagtgttgggaatgaagcaagtgattgattggaaaacatactgaatggaagaaatatttagattaaaaatgaggtaggttgaagtttcttctctgaaatgatagataaatggtgaagataaggcttattgtgaggattcagtgaggtaatatatgcaaagtacttacaatgttctggcacatagtaattaattaagaaaatcgagcacccttaattacctagaatgcagggttgttagttttttggttgacttttgttttgctggggcattctgccatgttttagtgtcatttaataaataatagtaacaataaaggttaacatttattaagtgac

SEQ ID NO: 307220 - DNA, 1319 bp, Homo sapiens
ccgttcctgtcttcagttttgtacaaaccaaaagataacagaatatctgaagcatgtactcattgtcagatgttccctctgagagcacagaggaggcaaaagcttctgtgggatgtgctagtcggctaaagcttcacagaggaggtggcaattgaaaatgagtcctgaatggggtagggtggttagggaattccatgagacaagacaaggggggcatggtgtgagaaaggcatggaagtaggaaccctcttcctatgacaggagatcattctgcttagagtggagagtgtggagagtgggagtagataattttggaaagctgggtgaagccagttgtggagaattgtttgaatattatcccattgaatacccagagccactaaatctttttttactagaaaataattggggtccatatgaaagtctctattactgagtagtgtcaatgagggtgtggcaaaatggagcctttcacatcctagtggtggccatttggtaatacagatataagccttaaactatgtaaacccttgtcctaaggaagtaattgaataattgcccaaagattgtatgtatgaggctgttcatcccagcactgtctaagctagtaaaaattggaaacaatttaagtatctagcacattggattggttataaagcaaggaatgttcacacagtaggatattataagtatgctgatggaaatctatattgccaggaaaagctattcattatgcgttgtgaagtcagaaagtaaaaaagggtagatagaagtattcgaagtatagttccattttttgagactaataaaacatatgtttaaaaggacactaaaaactggagttatagatatccagatagaaacagtagttatctttgggtagaagaataatgagtgatctttacttttttactttttattcatctttgtgtttttatttatctaaaatgggtattgatttttaggacggttttgaaaaagaaaagtgttgggaatgaagcaagtgattgattggaaaacatactgaatggaagaaatatttagattaaaaatgaggtaggttgaagtttcttctctgaaatgatagataaatggtgaagataaggcttattgtgaggattcagtgaggtaatatatgcaaagtacttacaatgttctggcacatagtaattaattaagaaaatcgagcacccttaattacctagaatgcagggttgttagttttttggttgacttttgttttgctggggcattctgccatgttttagtgtcatttaataaataatagtaacaataaaggttaacatttattaagtgac

SEQ ID NO: 307221 - DNA, 1761 bp, Homo sapiens
gtagccctcacgtgaccaagagctgacgtgtgcagaagtccttcttgtcctggtcgttgttcccgtctgagtaccagctccccactgccctgagggcgggccggcctgcggcggagggaaaaaggaagaggagaaggaaattgtcccgaatccctgcaggtctttctgtaggttgcggcacaacgccaggcaaaagaagaggaaggaatttaatcctaatcggtggaggtcgatttgagggtctgctgtagcaggtggctccgcttgaagcgagggaggaagtttcctccgatcagtagagattggaaagattgttgggagtggcacaccactagggaaaagaagaaggggcgaactgcttgtcttgaggaggtcaacccccagaatcagctcttgtggccttgaagtggctgaagacgatcaccctccacaggcttgagcccagtcccacagccttcctcccccagcctgagtgactactctattccttggtccctgctattgtcggggacgattgcatgggctacgccaggaaagtaggctgggtgaccgcaggcctggtgattggggctggcgcctgctattgcatttatagactgactaggggaagaaaacagaacaaggaaaaaatggctgagggtggatctggggatgtggatgatgctggggactgttctggggccaggtataatgactggtctgatgatgatgatgacagcaatgagagcaagagtatagtatggtacccaccttgggctcggattgggactgaagctggaaccagagctagggccagggcaagggccagggctacccgggcacgtcgggctgtccagaaacgggcttcccccaattcagatgataccgttttgtcccctcaagagctacaaaaggttctttgcttggttgagatgtctgaaaagccttatattcttgaagcagctttaattgctctgggtaacaatgctgcttatgcatttaacagagatattattcgtgatctgggtggtctcccaattgtcgcaaagattctcaatactcgggatcccatagttaaggaaaaggctttaattgtcctgaataacttgagtgtgaatgctgaaaatcagcgcaggcttaaagtatacatgaatcaagtgtgtgatgacacaatcacttctcgcttgaactcatctgtgcagcttgctggactgagattgcttacaaatatgactgttactaatgagtatcagcacatgcttgctaattccatttctgacttttttcgtttattttcagcgggaaatgaagaaaccaaacttcaggttctgaaactccttttgaatttggctgaaaatccagccatgactagggaactgctcagggcccaagtaccatcttcactgggctccctctttaataagaaggagaacaaagaagttattcttaaacttctggtcatatttgagaacataaatgataatttcaaatgggaagaaatatttagattaaaaatgaggtaggttgaagtttcttctctgaaatgatagataaatggtgaagataaggcttattgtgaggattcagtgaggtaatatatgcaaagtacttacaatgttctggcacatagtaattaattaagaaaatcgagcacccttaattacctagaatgcagggttgttagttttttggttgacttttgttttgctggggcattctgccatgttttagtgtcatttaataaataatagtaacaataaaggttaacatttattaagtgac

SEQ ID NO: 307222 - DNA, 230 bp, Homo sapiens
tttgagacccgttggatcccccgggctgcttgaattcggcactacctgagggcgggccggcctgcggcggagggaaaaaggaagaggagaaggaaattgtcccgaatccctgcaggtcagtacctggaagattccataaagtcggggtgcttgagggcgtagggccgagaccgtcgcgggtactgaggcgcctccgtcgtctctcccactcgccgcccgctttccaagac

SEQ ID NO: 307223 - DNA, 871 bp, Homo sapiens
ctgagtaccagctccccactgccctgagggcgggccggcctgcggcggagggaaaaaggaagaggagaaggaaattgtcccgaatccctgcaggtcagtacctggaagattccataaagtcggggtgcttgagggcgtagggccgagaccgtcgcgggtactgaggcgcctccgtcgtctctcccactcgccgcccgctttccaagacatatgtcccgcttgcagcccatttcgatgctgcgaaacggtgagctgcggggtgtttggggaagagctcagagactgggaaatgggaatctgctgggagcctagggccgcaatccggaaagggagctgtggcctgggtgttggcccctagtccaccaggacagtgccggaggggaatggctggatatgggggcgggggtggtgagatgcaacgcgatatgtcagcagaaccccaagagaggtaataggggtgggaaacctctgacaaccaggcctccgaattagaaaagagttttgtgttctggggactagtccgtccaccaagcgctcagtggcggcagtttcccgtctttctgcctgtggctgtgtcttactgaccatggctctgtgtctagtgggtccaagcctctcccgggtggccagtctttctgtaggttgcggcacaacgccaggcaaaagaagaggaaggaatttaatcctaatcggtggaggtcgatttgagggtaagaccatctggggaccctaggagggacgggggtggcggcgggggtggggagaaggcagagaaggtaataatctaggtacatgtctgagtccgaatgtgtttcttgcactccccggactgtggcgaaatggcgtgctttgtgtgtctgtggttgggggg

SEQ ID NO: 307224 - DNA, 7629 bp, Homo sapiens
  misc_feature (3431)..(3431): n is a, c, g, or t
ggaccacactgcatcccaaaatgcccaggatctcataggcatccctcatctaggtgtttctggatcctcaacaaaatggcattccgagctgtccccaacagagggtccccattcagcaggttcatccacacctgggtttttgagccccatggcagaactgtcccatccgtctccccctcccccagcacttggaagtcttcttcagcttccagatggaagcccctcatggtcaatgttggaagtggcttcaggtcctgcatccacccagcagatcaaagctggggtgcctggaagagtgcacaatggggtgtctttgccaacttttaagaatacagaaacagcgacccatgaggctgagcctccacttttccagactgcagaatcaggggccatagaaatgaccagcagaaagctagcctctgccactgcaaatgactctgctaacccgctgcatttgtcagcagctccagagaattccagagggcccgccctttcggcagaacacacctcttctttggtgccttctctgcatatcaccacactgggtcaagagcaagccatcctttctggggcggttcccgcatcaccatcaactgggacagccgactttccctccatacttactttcctccagcccacagagaatcatgcctccccatctcctgtgccagaaatgcccactcttccagcagagggcagtgatgggtcccctcctgcaactagagacttgctcctctcaagcaaagttcctaatcttctttccacatcttggacatttccccggtggaaaaaggacagtgtgacagccattttagggaagaatgaagaggcaaatgtgacgattcctctccaggcctttccaaggaaagaggttttgagtcttcacactgtaaatggatttgtctctgatttcagcaccggtagtgtctcatctcccatcattacagcaccaaggacgaatccccttccttcaggaccacctctaccttccatactctccatacaagccacccagactgttttcccatctctcttggcttttccagcaccaagccagaggcttatgcagctgctgtggaccattctgggttgccagcttcagcttccaaacaggtgagagcatcgccctcctccatggatgtatatgattccttaacaataggagacatgaaaaagccagcaaccacagatgttttctggagttctctttcagcagaaactggatctctttccacagaatcaataatatctggcttgcagcagcaaacaaattatgatttaaatggacacacaattagcaccacaagttgggaaactcatttagctccaacagctcctcccaatggtttaacttcagctgccgatgccataaaatctcaggatttcaaagatactgctgggcattcagtgactgcagaagggtttagtattcaggatctagtcctcggtacaagcattgagcagcctgtgcaacagtcagacatgaccatggttggaagccatatagacctctggcccacaagcaataacaaccattccagagacttccaaacagctgaagttgcatattactcacccacaactcgacattccgtgtctcatcctcagctacagttgcccaaccagccagcacatcctcttttgctaacctcaccaggaccaacttctacaggtagcttgcaggaaatgctttcagatggaacagatacaggttctgaaatttccagtgacatcaattcatcacctgagagaaatgcttccacaccattccagaacatcttgggatatcactctgctgctgaatcttctatatcgaccagtgtctttcccaggacctcctccagagtgctgcgggcttctcagcaccccaagaaatggacagcggacacagtatcatctaaggtacagccaacagcagcagctgccgtcacattgtttctgaggaaatcaagtccacctgcactgtctgcagccctggttgctaagggcaccagcagcagccctttggccgtggcctcaggaccagctaagagcagttcgatgactactcttgctaaaaatgtcacaaacaaggccgcatctggcccaaagaggacaccaggggcagtccatacagccttcccattcacaccaacctacatgtatgcaagaacaggacataccacgagcacacatacagccatgcaaggaaacatggacactgcctctggcctgttgtctacaacttacctccccaggaaaccacaagccatgcacaccggcctcccaaaccccaccaacctggagatgcccagagcatccacgccacgcccactgacagtcacggccgcgctgacatccattacagcctcagtgaaggccacccggttgccaccattgcgagcagaaaacacagatgctgtccttcctgctgcatcggctgcagtggtcacgactggcaaaatggcatccaacctggagtgtcagatgtccagtaagctcctggtgaagacagttctctttctcacccaaaggagagtgcagatcagtgaatccttgaagttcagtatcgccaaagggctcacacaggcattgcggaaggctttccaccagaacgatgtctcagctcacgtggacattctggaatattctcataatgtcacagttggttattatgctaccaaagggaagttggtgtatttgcctgctgtggtgatcgaaatgctgggtgtgtatggagtcagcaacgtcactgcagacctgaagcaacacaccccacacttacagtctgtggcagtacttgcctccccatggaatccccagcctgcaggctacttccagctaaaaacagtgctgcagtttgtgagccaagcggacaacatacagtcctgcaagtttgctcagacaatggaacagaggctgcagaaggcattccaggatgccgagaggaaagtcctgaataccaaaagcaacttgacaattcagattgtgagcacgtccaatgcctcccaggcagtcaccttggtgtacgtcgtgggcaatcagagcacattcctcaacggcaccgtcgccagcagcctcctcagccagctctcggctgagctggtgggattctacctcacctatccgccgctaaccattgctgaaccactggaatatcccaaccttgacatatcagaaacaaccagagactattgggtaattacagtgctgcagggtgtggacaattcgctggtgggcctgcacaaccagagctttgcccgggtcatggagcagcgcctggcccagctattcatgatgtcccagcaacaaggccggcggtttaaacgggccaccaccctgggaagctacactgtgcagatggtgaagatgcagcgtgtcccaggcccgaaggacccagcggagctgacttactataccctgtacaacgggaagcctttgttggggaccgnagctgccaagatcctgagcaccattgattcccaaaggatggccttgacccttcatcacgttgtccttctgcaagctgaccccgtggtgaagaacccgcccaataacctgtggatcatcgctgcagtgctggcgcccattgccgtggtcacggtcatcatcatcatcatcactgccgtgctctgcaggaagaacaagaacgacttcaagcctgacaccatgataaacctgccgcagagagcaaagcctgtgcaaggctttgattatgccaagcaacacctgggccagcaaggggcagatgaggaggtcatccctgtgactcaggagacagtggttctcccactgcccattagagatgctcctcaggaaagagacgtcgctcaggatggaagcaccatcaagaccgccaaatccactgaaaccaggaagagcaggtcgcccagtgagaatggctctgtcatcagcaacgaatcagggaagcccagctcagggagacgctcaccccagaatgtaatggcacagcagaaagtgacaaaggaggaggcaaggaagagaaatgtgccagcgagtgacgaagaggagggagcggttctatttgacaactccagcaaggtggccgctgaaccctttgacacatcttctgggtctgtgcagctcattgccataaaacccacagccctccccatggtgccccccacctcggacaggagccaggagtcatcggcagtcctcaacggcgaggtgaacaaagccctgaagcagaagtcagacatcgagcactatcggaacaagctgcgcctcaaagccaagaggaagggatattacgacttccctgcagtggagacgagcaagggtctgaccgaaagaaagaagatgtatgaaaaagccccgaaggaaatggagcatgttttggatccagattcagaactctgtgctccattcaccgagtctaaaaacaggcaacagatgaagaactctgtctacagaagccggcagtctctgaacagcccgagtccaggggaaaccgagatggaccttctggtgactcgggagcgaccccggcgtggaatccgcaacagcggatacgatactgagcctgaaatcatagaggaaaccaacattgacagagttcctgagccccggggctattccaggtctcgacaggtgaaaggccactcggagacctccacactgagctcccagccatccatcgacgaggtcaggcagcagatgcacatgctgctggaggaggccttcagcctggcatccgcgggccacgcaggccagagccggcaccaagaggcctacggctcagcccagcacctgccctattcggaggtggtgaccagcgctccggggaccatgacgcggcccagggccggggtgcagtgggtgccgacctaccgcccagaaatgtatcagtacagtctgccccggccggcttacaggttttcccagcttcctgagatggtcatgggctcaccgcctccacccgtacctccccggactggtcctgtggctgtcgcttctctcaggcgatccacctcagacatcggcagcaagaccagaatggccgagtctacagggcccgagccggcccagctgcacgacagcgcctccttcacgcagatgtccagaggccctgtgtccgtgacgcagttggatcagtcggctttaaattactcaggtaatacggtgccagcagtgttcgccatcccagctgccaacagacctggcttcaccggctacttcatcccaacgcctccctcatcctataggaaccaggcctggatgtcctatgcaggagagaatgagctcccgagccagtgggcagattcggtgcccctcccagggtacatcgaggcctacccccgatcacggtacccccagagctctccctccaggcttcctcgtcagtacagccagccagccaacctgcaccccagcctggagcaggccccggcgccctccacagcggcctcgcagcagagcctggcagaaaacgacccgtctgacgctcccctgaccaacatctccactgcggcccttgtgaaggccatccgggaggaggtggccaagctggccaaaaaacagacagacatgtttgagttccaggtctaacgccttagccccgtgggactctggacttccaaactctgaggactcagcctttgggtttcccatgcctacgtgttaggacttgagacatagcaatgggtgagtctttctcaccctccatttctgaaaaggtgaactatggggcttctgggaacaggaaactcttgaacgactagattcttggctcatccaactgattgtgggtcaagtccctggcttggggccttatgtttgatactctctcatgtcaaatgtttgaactttgggcatgtgccctatggaagcttagtcacaagaggcactagctaatctacagattcctatccaatgccacattttaataaatcaccggaagcgggagaatgtagctcttatcttcggtgacctctgcatgttaactctgtttctgtgttaaaggcaatgcaggagtgtggattaagcaccagactgtattctcattcaaccatgaccgtgcgcattaaaatcagtttgtaagggagacactgactccagccaagaaacctgagccccttttttttaggttcatattcaaagtcaaatgaactggatgaaagtcagtaccaatggctgtgcctattaaatagacctgattctttgtttccctcgtcaattaaacaaaggccaagaaagagagaagatgagagggaatggtgggatttgcgttgacagattttttaaaaggtgttgccattttggaaataaaagtcccctacaagttaggatctaactgaaagagaatcggtgctaagagcttttaggatcctacaaaagaaacacagttatttgtgaaggtttttctttgccttgttttgaaggtggcctgagaatggagcttctctttttcttgggataatagatacatcaacttttacaagaaaatctctgtctcttcaacaatgatgtccagtgtgtgctgctgagtggtacaaaaggaaatagtacttgattcctgttagaaacaggagtggtagaaccacagtcttcccaggccgcagcctctgtttatagaagcttctgaatgtagaaaagctgttgaatttcatttaaatgtaaataaccttttaaaaagcgtatggagttagccagttccccctagttaatggacataggaagacatttgctgaaatggtagggtggccactttgtgaccatgatgttgcaagttgccctccctggcatggtgagttggcttccagagctgtgggtagaggacatcgcctcacggcactgaggcaccagccgctgcctacccatcaatgcaagcaaaacagctactgactttgtgtagcagggagattggggactctggttccctcgccaagtgtggcagcctgtgcagtgttgggggcttacttggtatctgttggagaatgaggtcctgtcctgctttcacccatgacccatctagcttcagctgtatccattttcttctgagcccatcttccattgtcctcaacgagtttctttggtctttactgaaagaagatagtagaaatttaaaagttgagagaagactagaaatggaactgattagaaggggaggttcaaactgtcaatgcacagacttttcaaagaagttgtttatattttccaatggcaaactgccctttctggaatgttcagagatgatgtgtcatggaaccttcaaacaagtctcttgttcggatgataataggtagtgtccttttagtatgctggttgatctttcatagtgttagtgttttgttacttaaaaaggaaatcagctataaataaaatgtatttttgtaattcccgtgtgtatatatggtatatttctatcaatggccagttgttgtagtccaaaacctaaatcagtttgcaaaacactgtggacagtgcgagattttattgacaggttaacacaatgcctacgtctatccacataggcattcaatgcacttgaatgaacaaagagccaaagaaactcagcctgttcatgcaaatggtatgagtctgataaaatcagctacattgtcctgctttatccaataattaatatttcattagtgcaatgatatcaaccagtactttgtctacttg

SEQ ID NO: 307225 - DNA, 7647 bp, Homo sapiens
  misc_feature (3449)..(3449): n is a, c, g, or t
ggaccacactgcatcccaaaatgcccaggatctcataggcatccctcatctaggtgtttctggatcctcaacaaaatggcattccgagctgtccccaacagagggtccccattcagcaggttcatccacacctgggtttttgagccccatggcagaactgtcccatccgtctccccctcccccagcacttggaagtcttcttcagcttccagatggaagcccctcatggtcaatgttggaagtggcttcaggtcctgcatccacccagcagatcaaagctggggtgcctggaagagtgcacaatggggtgtctttgccaacttttaagaatacagaaacagcgacccatgaggctgagcctccacttttccagactgcagaatcaggggccatagaaatgaccagcagaaagctagcctctgccactgcaaatgactctgctaacccgctgcatttgtcagcagctccagagaattccagagggcccgccctttcggcagaacacacctcttctttggtgccttctctgcatatcaccacactgggtcaagagcaagccatcctttctggggcggttcccgcatcaccatcaactgggacagccgactttccctccatacttactttcctccagcccacagagaatcatgcctccccatctcctgtgccagaaatgcccactcttccagcagagggcagtgatgggtcccctcctgcaactagagacttgctcctctcaagcaaagttcctaatcttctttccacatcttggacatttccccggtggaaaaaggacagtgtgacagccattttagggaagaatgaagaggcaaatgtgacgattcctctccaggcctttccaaggaaagaggttttgagtcttcacactgtaaatggatttgtctctgatttcagcaccggtagtgtctcatctcccatcattacagcaccaaggacgaatccccttccttcaggaccacctctaccttccatactctccatacaagccacccagactgttttcccatctctcttggcttttccagcaccaagccagaggcttatgcagctgctgtggaccattctgggttgccagcttcagcttccaaacaggtgagagcatcgccctcctccatggatgtatatgattccttaacaataggagacatgaaaaagccagcaaccacagatgttttctggagttctctttcagcagaaactggatctctttccacagaatcaataatatctggcttgcagcagcaaacaaattatgatttaaatggacacacaattagcaccacaagttgggaaactcatttagctccaacagctcctcccaatggtttaacttcagctgccgatgccataaaatctcaggatttcaaagatactgctgggcattcagtgactgcagaagggtttagtattcaggatctagtcctcggtacaagcattgagcagcctgtgcaacagtcagacatgaccatggttggaagccatatagacctctggcccacaagcaataacaaccattccagagacttccaaacagctgaagttgcatattactcacccacaactcgacattccgtgtctcatcctcagctacagttgcccaaccagccagcacatcctcttttgctaacctcaccaggaccaacttctacaggtagcttgcaggaaatgctttcagatggaacagatacaggttctgaaatttccagtgacatcaattcatcacctgagagaaatgcttccacaccattccagaacatcttgggatatcactctgctgctgaatcttctatatcgaccagtgtctttcccaggacctcctccagagtgctgcgggcttctcagcaccccaagaaatggacaggtgcagccactaatgcagcggacacagtatcatctaaggtacagccaacagcagcagctgccgtcacattgtttctgaggaaatcaagtccacctgcactgtctgcagccctggttgctaagggcaccagcagcagccctttggccgtggcctcaggaccagctaagagcagttcgatgactactcttgctaaaaatgtcacaaacaaggccgcatctggcccaaagaggacaccaggggcagtccatacagccttcccattcacaccaacctacatgtatgcaagaacaggacataccacgagcacacatacagccatgcaaggaaacatggacactgcctctggcctgttgtctacaacttacctccccaggaaaccacaagccatgcacaccggcctcccaaaccccaccaacctggagatgcccagagcatccacgccacgcccactgacagtcacggccgcgctgacatccattacagcctcagtgaaggccacccggttgccaccattgcgagcagaaaacacagatgctgtccttcctgctgcatcggctgcagtggtcacgactggcaaaatggcatccaacctggagtgtcagatgtccagtaagctcctggtgaagacagttctctttctcacccaaaggagagtgcagatcagtgaatccttgaagttcagtatcgccaaagggctcacacaggcattgcggaaggctttccaccagaacgatgtctcagctcacgtggacattctggaatattctcataatgtcacagttggttattatgctaccaaagggaagttggtgtatttgcctgctgtggtgatcgaaatgctgggtgtgtatggagtcagcaacgtcactgcagacctgaagcaacacaccccacacttacagtctgtggcagtacttgcctccccatggaatccccagcctgcaggctacttccagctaaaaacagtgctgcagtttgtgagccaagcggacaacatacagtcctgcaagtttgctcagacaatggaacagaggctgcagaaggcattccaggatgccgagaggaaagtcctgaataccaaaagcaacttgacaattcagattgtgagcacgtccaatgcctcccaggcagtcaccttggtgtacgtcgtgggcaatcagagcacattcctcaacggcaccgtcgccagcagcctcctcagccagctctcggctgagctggtgggattctacctcacctatccgccgctaaccattgctgaaccactggaatatcccaaccttgacatatcagaaacaaccagagactattgggtaattacagtgctgcagggtgtggacaattcgctggtgggcctgcacaaccagagctttgcccgggtcatggagcagcgcctggcccagctattcatgatgtcccagcaacaaggccggcggtttaaacgggccaccaccctgggaagctacactgtgcagatggtgaagatgcagcgtgtcccaggcccgaaggacccagcggagctgacttactataccctgtacaacgggaagcctttgttggggaccgnagctgccaagatcctgagcaccattgattcccaaaggatggccttgacccttcatcacgttgtccttctgcaagctgaccccgtggtgaagaacccgcccaataacctgtggatcatcgctgcagtgctggcgcccattgccgtggtcacggtcatcatcatcatcatcactgccgtgctctgcaggaagaacaagaacgacttcaagcctgacaccatgataaacctgccgcagagagcaaagcctgtgcaaggctttgattatgccaagcaacacctgggccagcaaggggcagatgaggaggtcatccctgtgactcaggagacagtggttctcccactgcccattagagatgctcctcaggaaagagacgtcgctcaggatggaagcaccatcaagaccgccaaatccactgaaaccaggaagagcaggtcgcccagtgagaatggctctgtcatcagcaacgaatcagggaagcccagctcagggagacgctcaccccagaatgtaatggcacagcagaaagtgacaaaggaggaggcaaggaagagaaatgtgccagcgagtgacgaagaggagggagcggttctatttgacaactccagcaaggtggccgctgaaccctttgacacatcttctgggtctgtgcagctcattgccataaaacccacagccctccccatggtgccccccacctcggacaggagccaggagtcatcggcagtcctcaacggcgaggtgaacaaagccctgaagcagaagtcagacatcgagcactatcggaacaagctgcgcctcaaagccaagaggaagggatattacgacttccctgcagtggagacgagcaagggtctgaccgaaagaaagaagatgtatgaaaaagccccgaaggaaatggagcatgttttggatccagattcagaactctgtgctccattcaccgagtctaaaaacaggcaacagatgaagaactctgtctacagaagccggcagtctctgaacagcccgagtccaggggaaaccgagatggaccttctggtgactcgggagcgaccccggcgtggaatccgcaacagcggatacgatactgagcctgaaatcatagaggaaaccaacattgacagagttcctgagccccggggctattccaggtctcgacaggtgaaaggccactcggagacctccacactgagctcccagccatccatcgacgaggtcaggcagcagatgcacatgctgctggaggaggccttcagcctggcatccgcgggccacgcaggccagagccggcaccaagaggcctacggctcagcccagcacctgccctattcggaggtggtgaccagcgctccggggaccatgacgcggcccagggccggggtgcagtgggtgccgacctaccgcccagaaatgtatcagtacagtctgccccggccggcttacaggttttcccagcttcctgagatggtcatgggctcaccgcctccacccgtacctccccggactggtcctgtggctgtcgcttctctcaggcgatccacctcagacatcggcagcaagaccagaatggccgagtctacagggcccgagccggcccagctgcacgacagcgcctccttcacgcagatgtccagaggccctgtgtccgtgacgcagttggatcagtcggctttaaattactcaggtaatacggtgccagcagtgttcgccatcccagctgccaacagacctggcttcaccggctacttcatcccaacgcctccctcatcctataggaaccaggcctggatgtcctatgcaggagagaatgagctcccgagccagtgggcagattcggtgcccctcccagggtacatcgaggcctacccccgatcacggtacccccagagctctccctccaggcttcctcgtcagtacagccagccagccaacctgcaccccagcctggagcaggccccggcgccctccacagcggcctcgcagcagagcctggcagaaaacgacccgtctgacgctcccctgaccaacatctccactgcggcccttgtgaaggccatccgggaggaggtggccaagctggccaaaaaacagacagacatgtttgagttccaggtctaacgccttagccccgtgggactctggacttccaaactctgaggactcagcctttgggtttcccatgcctacgtgttaggacttgagacatagcaatgggtgagtctttctcaccctccatttctgaaaaggtgaactatggggcttctgggaacaggaaactcttgaacgactagattcttggctcatccaactgattgtgggtcaagtccctggcttggggccttatgtttgatactctctcatgtcaaatgtttgaactttgggcatgtgccctatggaagcttagtcacaagaggcactagctaatctacagattcctatccaatgccacattttaataaatcaccggaagcgggagaatgtagctcttatcttcggtgacctctgcatgttaactctgtttctgtgttaaaggcaatgcaggagtgtggattaagcaccagactgtattctcattcaaccatgaccgtgcgcattaaaatcagtttgtaagggagacactgactccagccaagaaacctgagccccttttttttaggttcatattcaaagtcaaatgaactggatgaaagtcagtaccaatggctgtgcctattaaatagacctgattctttgtttccctcgtcaattaaacaaaggccaagaaagagagaagatgagagggaatggtgggatttgcgttgacagattttttaaaaggtgttgccattttggaaataaaagtcccctacaagttaggatctaactgaaagagaatcggtgctaagagcttttaggatcctacaaaagaaacacagttatttgtgaaggtttttctttgccttgttttgaaggtggcctgagaatggagcttctctttttcttgggataatagatacatcaacttttacaagaaaatctctgtctcttcaacaatgatgtccagtgtgtgctgctgagtggtacaaaaggaaatagtacttgattcctgttagaaacaggagtggtagaaccacagtcttcccaggccgcagcctctgtttatagaagcttctgaatgtagaaaagctgttgaatttcatttaaatgtaaataaccttttaaaaagcgtatggagttagccagttccccctagttaatggacataggaagacatttgctgaaatggtagggtggccactttgtgaccatgatgttgcaagttgccctccctggcatggtgagttggcttccagagctgtgggtagaggacatcgcctcacggcactgaggcaccagccgctgcctacccatcaatgcaagcaaaacagctactgactttgtgtagcagggagattggggactctggttccctcgccaagtgtggcagcctgtgcagtgttgggggcttacttggtatctgttggagaatgaggtcctgtcctgctttcacccatgacccatctagcttcagctgtatccattttcttctgagcccatcttccattgtcctcaacgagtttctttggtctttactgaaagaagatagtagaaatttaaaagttgagagaagactagaaatggaactgattagaaggggaggttcaaactgtcaatgcacagacttttcaaagaagttgtttatattttccaatggcaaactgccctttctggaatgttcagagatgatgtgtcatggaaccttcaaacaagtctcttgttcggatgataataggtagtgtccttttagtatgctggttgatctttcatagtgttagtgttttgttacttaaaaaggaaatcagctataaataaaatgtatttttgtaattcccgtgtgtatatatggtatatttctatcaatggccagttgttgtagtccaaaacctaaatcagtttgcaaaacactgtggacagtgcgagattttattgacaggttaacacaatgcctacgtctatccacataggcattcaatgcacttgaatgaacaaagagccaaagaaactcagcctgttcatgcaaatggtatgagtctgataaaatcagctacattgtcctgctttatccaataattaatatttcattagtgcaatgatatcaaccagtactttgtctacttg

SEQ ID NO: 307226 - DNA, 780 bp, Homo sapiens
gatgcctgagataaatgggtagccagatgcacctgtactctgctcacacacccaggcccctgcccagtcccactacatcccaaatcccttttgttttcttgctctgatagagacatcaactttgtgatttctcagactaggaccagagaatagctccaggaagttggcatttcatccgaattcgggacatgaggctatagcccttcttctccagcttcctgtatctcctgcacttcatggcccgaggcaccttgcattcttatattttccatccttgcctgccctttagaattgtcctaggtcctaggagtagctggtaaaggcacatagctgtccctcatgtcctgagctctcagaggacttggtatggaatgctgcctatgcctgtgaactttgtaattagaaacaggttcaagttttggggttttctttttgccagatactagctgtgtgattttgagcaagttaacctccctgtgcctcagtttcttctgctgtaaaatgggggtgacaatggtccctataccttaggacagtgagctgtgcacatgaagcccttaacacagtggctggaatgtgataagggatattaacttgtagataccttgtggagtgaaacattgaggtgattttgtagacaacaagaggagaaggaaggtattttaaaatccaggcgctaccctcatgccgactaaggtgtgagaggctcacagctcacatgagagggtgatcttgcctgaagcacatgatttttaagtggctggaacctgggaaaccgaa

SEQ ID NO: 307227 - DNA, 3828 bp, Homo sapiens
gcggccgctctccgggggggaggctgagagcaggcccgcctcgcccccccgcgggcccgccgcccctccctccctgtcctcagcccggcagcggcggcggcggcggcagtggcagtcgccggagaagcatcatgccgaggaggaagcagcaggcgccccggcgcgcagcagcctatgtttccgaagagttaaaggctgctgccctggtggacgaaggtttagacccagaggagcatacggcagatggagagccctcggccaagtacatgtgcccggagaaggagctcgccagggcctgccccagctaccagaactccccggccgccgagttttcctgccatgaaatggacagcgagtcacacatcagtgagaccagtgaccgaatggctgactttgaaagcggctccatcaagaacgaagaggagaccaaggaggtcacggtcccactggaagacacgactgtgtcggatagcctggagcagatgaaggccgtgtacaacaacttcctctccaactcctactggtccaacctcaacctcaacctgcaccagccctcctcggagaagaacaacggcagcagcagcagcagcagtagcagcagcagcagctgtggcagcgggagcttcgactggcaccagagcgccatggctaagacgctgcagcaggtgtcacagagccgcatgctcccggagcccagcctcttcagcaccgtgcagctgtaccggcagagcagcaagctctatggctccatcttcacgggggccagcaagttccgctgtaaggactgcagcgctgcctacgacaccctggtggagttgacggtgcacatgaacgagacggggcattaccgcgacgacaaccatgagaccgataacaacaaccccaagcgctggtccaagcctcgcaaacgctccttgctggaaatggaagggaaggaagacgcccagaaggtgctgaagtgcatgtactgtggccactcctttgagtccctgcaggatttgagtgtccatatgatcaaaacaaaacactaccaaaaagtgcctctgaaggaacccgtcactcctgtcgccgccaaaatcatccctgccactcggaagaaagcttccctggagctggagctccccagctccccagattccacaggtggaacccccaaagccaccatctcagacaccaacgatgcacttcagaagaactccaacccttacatcacgccaaataatcggtacggccaccagaatggggccagctatgcatggcactttgaggcccggaagtcgcagatcctgaagtgcatggagtgtgggagctcgcatgacaccctgcaggagctcactgcccacatgatggtcactggccacttcatcaaggtcaccaactctgctatgaaaaaggggaagcccattgtggagacgcctgtcacacctaccatcacaaccctgctggatgagaaggtccagtccgtgcccctggcagccaccaccttcacgtccccctccaatacacctgccagcatctccccaaaactgaatgtggaggtcaagaaggaagtcgacaaggagaaagcggtcactgacgagaaacctaagcaaaaagacaagcctggcgaagaagaggagaagtgtgacatctcttccaaataccattacttgactgaaaatgacttagaagagagtcccaagggggggcttgatatcctcaaatccttggaaaacacagtgacatccgcaatcaacaaggcccagaacggcactcctagctgggggggctatcccagcatccatgccgcctaccaacttcccaacatgatgaagttgtccctgggctcgtcggggaagagcacgcccctgaaacccatgtttggcaacagtgagattgtctccccgacgaaaaaccagaccctggtctctccacccagcagccagacgtcccccatgcccaagacaaactttcatgccatggaggagctggtgaaaaaggtcactgagaaagttgccaaagtggaggagaagatgaaggagccggatgggaagctttccccgcccaagcgggccactccctccccatgtagcagcgaagtcggggaacccatcaagatggaggcatccagcgatgggggcttccgcagccaggagaacagccccagccccccgcgggatgggtgcaaggatgggagccccctcgctgagccggtggagaatggcaaggagctggtgaagcccctagccagcagtttgagtggcagcacggccatcatcaccgaccacccgcctgaacagccttttgttaaccctttgagcgccctgcagtcagtcatgaacattcacctgggcaaggccgccaagccctccctgcctgccctggaccccatgagcatgcttttcaagatgagcaacagcctggcggagaaggctgctgtggccaccccgccgcccctgcagtccaagaaggcagaccacctcgaccgctatttctaccacgtcaacaacgaccagcccatagacttgacaaaagggaagagtgacaaaggctgctccttgggttcagtgcttctgtcacccacgtccacagccccggcaacctcctcatccacggtgacaacggcaaagacatctgccgtcgtatcattcatgtcaaactcgccgctacgcgagaatgccttgtcagatatatccgatatgctgaagaacttgacagagagccacacgtcaaaatcctccactccttccagcatctccgagaagtctgacattgacggggccactctggaggaggctgaggagtcgacgcccgcccagaagaggaagggccgccagtcaaactggaacccccagcacctcctgatcctccaggcccagtttgccgccagcctccggcagacctcagaagggaagtacatcatgtcagacctgagcccccaggagcggatgcatatctccaggttcaccgggctgtccatgaccaccatcagccactggctggccaacgtgaaataccagcttcgaaggacaggtggaacaaagttcctcaaaaacttggacactggccaccccgtcttcttttgtaacgattgtgcgtcccaaatcaggactccttccacgtacatcagtcacctagagtcacacttaggcttccggctacgggacttatccaaactgtccaccgaacagattaacagtcagatagcacaaaccaagtcaccgtcagaaaaaatggtgacgtcctcccccgaggaagacctggggacttcctatcagtgcaaactttgcaatcggacctttgccagcaagcacgctgttaaacttcaccttagcaaaacacacgggaaatctccggaagaccaccttctgtatgtctctgagttagagaagcagtagcatttgcttttgatagaaaggactgcagtttgctttgagggaaactgtggaaggcaccttcaggccccctctgacttgttgttcttggcacatgttcttattttaactgcagagaatcactctgggctggactgttttgtataactgtacagtgtttaatagaggtgcataatcagctgttgttactggtaaaatatgaaggttaaaatgcagtggtaagtgtttggaactttgtgtaaacgggatttagttgtgagcatcctcccgatgcttcaagctgcatgcattaacagacagtttaattaagcatttataacggaatcaggcacaccttttccacgagactcgagtgtgctggcatttctcaccctttcatctttagccctctgagtactttgaagcacttttgcattaatttggttaaaaaataaaataaaataataataatgta

SEQ ID NO: 307228 - DNA, 546 bp, Homo sapiens
gcggccgctctccgggggggaggctgagagcaggcccgcctcgcccccccgcgggcccgccgcccctccctccctgtcctcagcccggcagcggcggcggcggcggcagtggcagtcgccggagaagcatcatgccgaggaggaagcagcaggcgccccggcgcgcagcagacaagagcatcaattgggtggaggttctcagcacgtggtgggtggagaacgtgctgccctagtctcttcacactacccctgtgtacctgtggagcctaaaacacctgggaaggaagcaaaccccagagctccgaaacctccatttccaaaaaggatcgagagccagtctcctagaaatggagcccttagtggtggtccacgctggagacgatgacaaacaattggacccttgtgtccccaagctgtgggctccctggcgatgacaccggagctgtctctattttgcctgtcgggggaatgttccagcgcattttcccttattatgacttgattaaggacacaataaacccttgccatgatttttatctatttgca

SEQ ID NO: 307229 - DNA, 4979 bp, Homo sapiens
gcggccgctctccgggggggaggctgagagcaggcccgcctcgcccccccgcgggcccgccgcccctccctccctgtcctcagcccggcagcggcggcggcggcggcagtggcagtcgccggagaagcatcatgccgaggaggaagcagcaggcgccccggcgcgcagcagcctatgtttccgaagagttaaaggctgctgccctggtggacgaaggtttagacccagaggagcatacggcagatggagagccctcggccaagtacatgtgcccggagaaggagctcgccagggcctgccccagctaccagaactccccggccgccgagttttcctgccatgaaatggacagcgagtcacacatcagtgagaccagtgaccgaatggctgactttgaaagcggctccatcaagaacgaagaggagaccaaggaggtcacggtcccactggaagacacgactgtgtcggatagcctggagcagatgaaggccgtgtacaacaacttcctctccaactcctactggtccaacctcaacctcaacctgcaccagccctcctcggagaagaacaacggcagcagcagcagcagcagtagcagcagcagcagctgtggcagcgggagcttcgactggcaccagagcgccatggctaagacgctgcagcaggtgtcacagagccgcatgctcccggagcccagcctcttcagcaccgtgcagctgtaccggcagagcagcaagctctatggctccatcttcacgggggccagcaagttccgctgtaaggactgcagcgctgcctacgacaccctggtggagttgacggtgcacatgaacgagacggggcattaccgcgacgacaaccatgagaccgataacaacaaccccaagcgctggtccaagcctcgcaaacgctccttgctggaaatggaagggaaggaagacgcccagaaggtgctgaagtgcatgtactgtggccactcctttgagtccctgcaggatttgagtgtccatatgatcaaaacaaaacactaccaaaaagtgcctctgaaggaacccgtcactcctgtcgccgccaaaatcatccctgccactcggaagaaagcttccctggagctggagctccccagctccccagattccacaggtggaacccccaaagccaccatctcagacaccaacgatgcacttcagaagaactccaacccttacatcacgccaaataatcggtacggccaccagaatggggccagctatgcatggcactttgaggcccggaagtcgcagatcctgaagtgcatggagtgtgggagctcgcatgacaccctgcaggagctcactgcccacatgatggtcactggccacttcatcaaggtcaccaactctgctatgaaaaaggggaagcccattgtggagacgcctgtcacacctaccatcacaaccctgctggatgagaaggtccagtccgtgcccctggcagccaccaccttcacgtccccctccaatacacctgccagcatctccccaaaactgaatgtggaggtcaagaaggaagtcgacaaggagaaagcggtcactgacgagaaacctaagcaaaaagacaagcctggcgaagaagaggagaagtgtgacatctcttccaaataccattacttgactgaaaatgacttagaagagagtcccaagggggggcttgatatcctcaaatccttggaaaacacagtgacatccgcaatcaacaaggcccagaacggcactcctagctgggggggctatcccagcatccatgccgcctaccaacttcccaacatgatgaagttgtccctgggctcgtcggggaagagcacgcccctgaaacccatgtttggcaacagtgagattgtctccccgacgaaaaaccagaccctggtctctccacccagcagccagacgtcccccatgcccaagacaaactttcatgccatggaggagctggtgaaaaaggtcactgagaaagttgccaaagtggaggagaagatgaaggagccggatgggaagctttccccgcccaagcgggccactccctccccatgtagcagcgaagtcggggaacccatcaagatggaggcatccagcgatgggggcttccgcagccaggagaacagccccagccccccgcgggatgggtgcaaggatgggagccccctcgctgagccggtggagaatggcaaggagctggtgaagcccctagccagcagtttgagtggcagcacggccatcatcaccgaccacccgcctgaacagccttttgttaaccctttgagcgccctgcagtcagtcatgaacattcacctgggcaaggccgccaagccctccctgcctgccctggaccccatgagcatgcttttcaagatgagcaacagcctggcggagaaggctgctgtggccaccccgccgcccctgcagtccaagaaggcagaccacctcgaccgctatttctaccacgtcaacaacgaccagcccatagacttgacaaaagggaagagtgacaaaggctgctccttgggttcagtgcttctgtcacccacgtccacagccccggcaacctcctcatccacggtgacaacggcaaagacatctgccgtcgtatcattcatgtcaaactcgccgctacgcgagaatgccttgtcagatatatccgatatgctgaagaacttgacagagagccacacgtcaaaatcctccactccttccagcatctccgagaagtctgacattgacggggccactctggaggaggctgaggagtcgacgcccgcccagaagaggaagggccgccagtcaaactggaacccccagcacctcctgatcctccaggcccagtttgccgccagcctccggcagacctcagaagggaagtacatcatgtcagacctgagcccccaggagcggatgcatatctccaggttcaccgggctgtccatgaccaccatcagccactggctggccaacgtgaaataccagcttcgaaggacaggtggaacaaagttcctcaaaaacttggacactggccaccccgtcttcttttgtaacgattgtgcgtcccaaatcaggactccttccacgtacatcagtcacctagagtcacacttaggcttccggctacgggacttatccaaactgtccaccgaacagattaacagtcagatagcacaaaccaagtcaccgtcagaaaaaatggtgacgtcctcccccgaggaagacctggggacttcctatcagtgcaaactttgcaatcggacctttgccagcaagcacgctgttaaacttcaccttagcaaaacacacgggaaatctccggaagaccaccttctgtatgtctctgagttagagaagcagtagcatttgcttttgatagaaaggactgcagtttgctttgagggaaactgtggaaggcaccttcaggccccctctgacttgttgttcttggcacatgttcttattttaactgcagagaatcactctgggctggactgttttgtataactgtacagtgtttaatagaggtgcataatcagctgttgttactggtaaaatatgaaggttaaaatgcagtggtaagtgtttggaactttgtgtaaacgggatttagttgtgagcatcctcccgatgcttcaagctgcatgcattaacagacagtttaattaagcatttataacggaatcaggcacaccttttccacgagactcgagtgtgctggcatttctcaccctttcatctttagccctctgagtactttgaagcacttttgcattaatttggttaaaaaataaaataaaataataataatgtatgaagctctgttttttaaactccttaccagcttagttataatgaataatatgaacctccatttatgcaggtctgcaggggtataacacgccttgaaatttaaaagaatattattttcacattgaaacatagatgtatatattgtatagatttcagactctcttatgaaaaaaaatgtgattgtggttaaatgacctttttcttgcatttatagcaacagtgttttatgcacctgctatgctctgggcataagctgtgcctatgtatagtgtatatttctttttttcttttttttaaggtctatgggttttgttttttacatgcaaacattgtaaattatacagaagataccacagatagcatttataaagtatacagaaacattatctgaaagcaaagtatgatagtttgttttgctatacagtacatctatattgatagaggttcatgtttaaattatacatatttattagcatcatattgtcatttgttttgagcagtctgaataaacgagaccgggaaagacatccctggcaggcatcagaactattttgcacatgatttttaaaggtatttattagaaatcaaagaacactcaaaataaactcagtgctcaaagggttaagtctatttgaaaaggttaaaaaaaagaacaaaaaaaaaaaaagaacttgtactgtatttcctaaacattgataaagcctttaaaatgtttgtactgtaatactttgcttaaaagtcatgaggcattctgtgatccaacctctttcacttatttataagccctcttggttgctattccatattgtaggatgcctttctatttcaattggtaactttctgttttgttcttcctaattattctcccaagatcccacactgcagctttatctttaggcttatgaaaggtaacccgtggttaccggctctccaagtgattctgttcttctccatttttggcagttaatttgcagaagtaactgacagctgacaccatatgagaacctttgtataaaatattggcatgtaaacagcacagacaccgtaacacactctgtgccctgtttggttgttgacaatgaagcaccattatgtgactcttcatataacccttttttctacggcagcattaaaattgtctttttgctataa

SEQ ID NO: 307230 - DNA, 2267 bp, Homo sapiens
gtcccgaggggactggctccgccacgccccgcccctggctcccccgggagggcggctcaggggcggggacgggggcgtggtcccgccgtataagaacggagggggcggcggcgggacggctcactcggtgccgctgcctaggggctgtagaggtcgcgccgctcctgctggggcctgcccacgccaaggacctgcctctgtcgcctcctcttctattgcccagtttccccagccagaacatcccctgaagatggcagaggagagcagctgtaccagggattgcatgtccttcagcgtgctcaactgggatcaggttagccggctgcatgaggtcctcactgaagttgtacctatccacggacgaggcaactttccaaccttggagataactctgaaggacatcgtccagaccgtccgcagtcggctggaggaggcaggcatcaaagtgcacgacgtccggctgaatggctccgcagctggccacgttttggtcaaagacaatggcttgggctgcaaagacctggacctaatcttccatgtggctcttccaacagaggcagaatttcagctggttagagatgtggttctgtgttcccttctgaacttcctgccagagggtgtgaacaagctcaaaatcagtccagtcactctgaaggaggcatatgtgcagaagctagtgaaggtttgcacggacactgaccgctggagcctgatctccctctccaacaagaacgggaagaacgtggagctgaagtttgtcgactccattcggcgtcagtttgagttcagtgtggactctttccaaatcatcctggattctttgcttttcttctatgactgttccaataatcccatctctgagcacttccaccccaccgtgattggggagagcatgtacggggactttgaggaagcttttgaccatctgcagaacagactgatcgccaccaagaacccagaagaaatcagaggcgggggacttctcaagtacagcaaccttcttgtgcgggacttcaggcccacagaccaggaagaaatcaaaactctagagcgctacatgtgctccaggttcttcatcgacttcccggacatccttgaacagcagaggaagttggagacttaccttcaaaaccacttcgctgaagaagagagaagcaagtacgactacctcatgatccttcgcagggtggtgaacgagagcaccgtgtgtctcatggggcatgaacgcaggcagactctgaacctcatctccctcctggccttgcgtgtgctggcggaacaaaacatcatccccagtgccaccaacgtcacctgttactaccagccggccccttacgtcagtgatggcaacttcagcaactactacgttgcccatcctccagtcacctacagccagccttaccctacctggctgccctgtaactaaccttgagacctgagggtttccacagtgggaaccccaatagggctagggctctcaggtaggggagcctccttctagatgtaggcatttggcttttaaaggggaactcagctctgattctgcttttttttttttttttcctttgtgtacccattggaatgggtctacagtgtatcatgagccaaccctcaaaggacccgtattacagtgccacgttggaaaacgctacaggaagcatgacctatccacatctttccaagatagacactaacatgtcatgtcccaaacattagcacgtgggggttgagctctgtgcagtaatcgagattgggagaatttgggcagcgcgtgagaagtgctaagctacttgttttctcacttgagcccgggtaggctgtgttggccctcacttgggattctcagcagttacatgaaagttgtgctgataatctcttctcttgtaccaattttagtcaggcagaaaatggtaaacatgagggtgctcttgtgacttaatttttgttcaagggactaaattgcttatgtttattccctgtcagcggagtggagaatgtcattcatcaataaaccaaagccaatagctggagaattgagatctggttgaaagtggtttatggtttacatgctgtactatcctgaggaattgcgagatattgctgaggggaaaaaaaaatgaccttttcttgaaatgtaacttgaaaacaaaataaaatgtggaacataatgtttaattagaattgtggtggtggtagtggaaggggataattgtaaataggaaacatgaatgttcatttttttctttaaagaattcttattaaatggc

SEQ ID NO: 307231 - DNA, 2166 bp, Homo sapiens
gtcccgaggggactggctccgccacgccccgcccctggctcccccgggagggcggctcaggggcggggacgggggcgtggtcccgccgtataagaacggagggggcggcggcgggacggctcactcggtgccgctgcctaggggctgtagaggtcgcgccgctcctgctggggcctgcccacgccaaggacctgcctctgtcgcctcctcttctattgcccagtttccccagccagaacatcccctgaagatggcagaggagagcagctgtaccagggattgcatgtccttcagcgtgctcaactgggatcaggttagccggctgcatgaggtcctcactgaagttgtacctatccacggacgaggcaactttccaaccttggagataactctgaaggacatcgtccagaccgtccgcagtcggctggaggaggcaggcatcaaagtgcacgacgtccggctgaatggctccgcagctggccacgttttggtcaaagacaatggcttgggctgcaaagacctggacctaatcttccatgtggctcttccaacagaggcagaatttcagctggttagagatgtggttctgtgttcccttctgaacttcctgccagagggtgtgaacaagctcaaaatcagtccagtcactctgaaggaggcatatgtgcagaagctagtgaaggtttgcacggacactgaccgctggagcctgatctccctctccaacaagaacgggaagaacgtggagctgaagtttgtcgactccattcggcgtcagtttgagttcagtgtggactctttccaaatcatcctggattctttgcttttcttctatgactgttccaataatcccatctctgagcacttccaccccaccgtgattggggagagcatgtacggggactttgaggaagcttttgaccatctgcagaacagactgatcgccaccaagaacccagaagaaatcagaggcgggggacttctcaagtacagcaaccttcttgtgcgggacttcaggcccacagaccaggaagaaatcaaaactctagagcgctacatgtgctccaggttcttcatcgacttcccggacatccttgaacagcagaggaagttggagacttaccttcaaaaccacttcgctgaagaagagagaagcaagtacgactacctcatgatccttcgcagggtggtgaacgagagcaccgtgtgtctcatggggcatgaacgcaggcagactctgaacctcatctccctcctggccttgcgtgtgctggcggaacaaaacatcatccccagtgccaccaacgtcacctgttactaccagccggccccttacgtcagtgatggcaacttcagcaactactacgttgcccatcctccagtcacctacagccagccttaccctacctggctgccctgtaactaaccttgagacctgagggtttccacagtgggaaccccaatagggctagggctctcaggtaggggagcctccttctagatgtaggcatttggcttttaaaggggaactcagctctgattctgcttttttttttttttttcctttgtgtacccattggaatgggtctacagtgtatcatgagccaaccctcaaaggacccgtattacagtgccacgttggaaaacgctacaggaagcatgacctatccacatctttccaagatagacactaacatgtcatgtcccaaacattagcacgtgggggttgagctctgtgcagtaatcgagattgggagaatttgggcagcgcgtgagaagtgctaagctacttgttttctcacttgagcccgggtaggctgtgttggccctcacttgggattctcagcagttacatgaaagttgtgctgataatctcttctcttgtaccaattttagtcaggcagaaaatggtaaacatgagggtgctcttgtgacttaatttttgttcaagggactaaattgcttatgtttattccctgtcagcggagtggagaatgtcattcatcaataaaccaaagccaatagctggagaattgagatctggttgaaagtggtttatggtttacatgctgtactatcctgaggaattgcgagatattgctgaggggaaaaaaaaatgaccttttcttgaaatgtaacttgaaaacaaaataaaatgtggaacat

SEQ ID NO: 307232 - DNA, 528 bp, Homo sapiens
tgaggtaccttttttaattcaccagattagcaaagatgaacaagtcacgtagtatcacatatgacaagcatgtcaaatgtaaattgggatagccattcctgagacaatttggttgtatcagttaaaatgaaaatgggcataaactgtgacccaggaattccactgttaagtatcttctgagtagaaacacttatacatgttcaaaaggaagtatgtatcaaaaaaagacatactggtgaggatgcaaaggcatgggagccctcagacattgctggtggaaatataaaatggtacaggtgctttggaaacagtttttcagtttcttaaaatgttaagcatcagattgccatacccagcaatgtgcacttctagaaaaatagccaagagagctaaaaacactcctccacacaataatttgtacttgaatattcatagcatcattattcttagttgctatacagtggcaacaattggtgagtaaagagaatattgtttatccatacaattcaatactattcaacaataaaa

SEQ ID NO: 307233 - DNA, 494 bp, Homo sapiens
cgagctcggtacccactagtccacggttggctatgaatccatggtattactctggatactagccattccttaggattttaaggtcacattttattcctggatgctttatgtccccacctccacctgagccctcatcctctgttccctactatactcccaacttctactctttgttttatccacctatccctattacctgaccctttgtcttccctgtctcccatccttggggggacatgtagccctgtggtcatggttctgatgacatcatcagggcagcccccctgcccaggtattatggcctgtcagcattccctgtgccctccaaaccttaggcctagaatgcggagctgccaacataacattcacccttttgaacagatggagtcaggcacactaacacagccttctgtcctcaataacacagccaaccgtggactagacacctgtgactgatgtagccaaccagtggactagtagccaacctgatgtga

SEQ ID NO: 307234 - DNA, 388 bp, Homo sapiens
  misc_feature (296)..(296): n is a, c, g, or t
  misc_feature (354)..(354): n is a, c, g, or t
caggagaattgcttgaacccgggaggcagaggttgcagtgagctgggatcacaccactgcactccagcttggcaatagagtgagactccatctcaaaaaacaaaacaaaacaacaacaaaataaactactgtggcagcgttggtaccctgcatcactgccatggttgtgctattctcatctcaacatagaattggtggggttcattgcaacttgattctttgcggcaaccggatcacccgttcgaacgggtgatgcggttggaactcctgggctcaagcggtcctcccaccctggnctcccgaagccgctgggattacaggtgtgagccattgtagcagggcttttctccctgntccttatgatgcttccatggctttctgttctgca

SEQ ID NO: 307235 - DNA, 851 bp, Homo sapiens
caggagaattgcttgaacccgggaggcagaggttgcagtgagctgggatcacaccactgcactccagcttggcaatagagtgagactccatctcaaaaaacaaaacaaaacaacaacaaaataaactactgtggcagcgttggtaccctgcatcactgccatggttgtgctattctcatctcaacatagaattggtgggttctcctaagggtgtcaggaacctctaaaaagatgtgattctttgggaggggatatttgaaattccaacttccattccccctagcaaaaggaagcagctgctgtttaagggttttatctgagccactttaaagatgaatccatggtattactctggatactagccattccttaggattttaaggtcacattttattcctggatgctttatgtccccacctccacctgagccctcatcctctgttccctactatactcccaacttctactctttgttttatccacctatccctattacctgaccctttgtcttccctgtctcccatccttggggggacatgtagccctgtggtcatggttctgatgacatcatcagggcagcccccctgcccaggtattatggcctgtcagcattccctgtgccctccaaaccttaggcctagaatgcggagctgccaacataacattcacccttttgaacagatggagtcaggcacactaacacagccttctgtcctcaataacacagccattattgccacttgctcagtcgtcaatgtaaaccctcagagtcagctgaactattttaggccaaacatactgtttttgtaaagtatttttcattaataaatctataagacagttctatttaa

SEQ ID NO: 307236 - DNA, 1275 bp, Homo sapiens
caggagaattgcttgaacccgggaggcagaggttgcagtgagctgggatcacaccactgcactccagcttggcaatagagtgagactccatctcaaaaaacaaaacaaaacaacaacaaaataaactactgtggcagcgttggtaccctgcatcactgccatggttgtgctattctcatctcaacatagaattggtgggttctcctaagggtgtcaggaacctctaaaaagatgtgattctttgggaggggatatttgaaattccaacttccattccccctagcaaaaggaagcagctgctgtttaagggttttatctgagccactttaaagatgaatccatggtattactctggatactagccattccttaggattttaaggtcacattttattcctggatgctttatgtccccacctccacctgagccctcatcctctgttccctactatactcccaacttctactctttgttttatccacctatccctattacctgaccctttgtcttccctgtctcccatccttggggggacatgtagccctgtggtcatggttctgatgacatcatcagggcagcccccctgcccaggtattatggcctgtcagcattccctgtgccctccaaaccttaggcctagaatgcggagctgccaacataacattcacccttttgaacagatggagtcaggcacactaacacagccttctgtcctcaataacacagccattattgccacttgctcagtcgtcaatgtaaaccctcagagtcagctgaactattttaggccaaacatactgtttttgtaaagtatttttcattaataaatctataagacagttctatttaaaaaaaaaaaaaaaaaaaaaaaaaaaaaaaaaaaaaaaaaaaaaaaaacaaaaaaaaaaaaaaaaaaaaaaaaaaaaacaggtgggggccgcgcgcgggcgcgcccccgagagaaaatttccacaaacacccgtgggggggcggcgggcgccccaagtgagtgacagagaaagaaagacgaggagcacaacaggaggtccgtcctccagaagaaaacaaccgcgtgcggcacagaacaaaggaggtggcggggggtgcgctccaccacgacaaataagaaaaccccgcgggggggggaaaaacagcagacgagtgtcgtgaagaacaacaacccacaggagagaggcctcgtggacaaggcacacagggggtgctcacaaaacaagggggtacaaagaaggagacgcaagaaaacataattgccc

SEQ ID NO: 307237 - DNA, 639 bp, Homo sapiens
actaagaccgcaaggcattcatttcctcctacggtggatgcggacgccgggaggaggagagccccagagagaggagctgggagcggaggcgcagagaacacgtagcgactccgaagatcagccccaatgaacatgtcagtgttgactttacaagaatatgaattcgaaaagcagttcaacgagaatgaagccatccaatggatgcaggaaaactgggtgatgtctgcgcgacagggaaggcgggagagatgccacagtccagatcgcctacctgtgctcccctcccctcccccggttttcatctagatttgggttttctcgcttggcctctcccgcaaccggagtgtgaaaggcagtggagggaggaccttgtctcctgttgcctttaaccctctcccgcccgccgcccttggccctggtcctcgctgtctctccatccctcgtgtccttcctttctccttgcagcgctcctacttcaccgtcctcctctgtctgccgctcctcaggcggatgccccctttttagtacccctttccccacgcggttccctttccggtttcatagagagaccgggtgggagggaggaggggacaatgaaaacagtaataaatgaatgaacccgagcgagtggagccacgc

SEQ ID NO: 307238 - DNA, 3035 bp, Homo sapiens
actaagaccgcaaggcattcatttcctcctacggtggatgcggacgccgggaggaggagagccccagagagaggagctgggagcggaggcgcaggcaatgctcagccctggatgtagctgagaggctgggagaagagacgaccgctggagaccgagcggcgtggggaagacctaggggggtgggtgggggaagcagacaggagaacactcgaaatcaagcgctttacagattattttattttgtatagagaacacgtagcgactccgaagatcagccccaatgaacatgtcagtgttgactttacaagaatatgaattcgaaaagcagttcaacgagaatgaagccatccaatggatgcaggaaaactggaagaaatctttcctgttttctgctctgtatgctgcctttatattcggtggtcggcacctaatgaataaacgagcaaagtttgaactgaggaagccattagtgctctggtctctgacccttgcagtcttcagtatattcggtgctcttcgaactggtgcttatatggtgtacattttgatgaccaaaggcctgaagcagtcagtttgtgaccagggtttttacaatggacctgtcagcaaattctgggcttatgcatttgtgctaagcaaagcacccgaactaggagatacaatattcattattctgaggaagcagaagctgatcttcctgcactggtatcaccacatcactgtgctcctgtactcttggtactcctacaaagacatggttgccgggggaggttggttcatgactatgaactatggcgtgcacgccgtgatgtactcttactatgccttgcgggcggcaggtttccgagtctcccggaagtttgccatgttcatcaccttgtcccagatcactcagatgctgatgggctgtgtggttaactacctggtcttctgctggatgcagcatgaccagtgtcactctcactttcagaacatcttctggtcctcactcatgtacctcagctaccttgtgctcttctgccatttcttctttgaggcctacatcggcaaaatgaggaaaacaacgaaagctgaatagtgttggaactgaggaggaagccatagctcagggtcatcaagaaaaataatagacaaaagaaaatggcacaaggaatcacacgtggtgcagctaaaacaaaacaaaacatgagcaaacacaaaacccaaggcagcttagggataattaggttgatttaacccagtaagtttatgatccttttagggtgaggactcactgagtgcacctccatctccaagcactgctgctggaagaccccattccctctttatctatcaactctaggacaagggagaacaaaagcaagccagaagcagaggagactaatcaaaggcaaacaaaggctattaacacataggaaaaaatgtatttactaagtgtcacatttctctaagatgaaagatttttactctagaaactgtgcgagcacaacacacacaatcctttctaactttatggacactaaactggagccaatagaaaagacaaaaatgaaagagacacagggtgtatatctagaacgataatgcttttgcagaaactaaagcctttttaagaaatgccagctgctgtagaccccatgagaaaagatgtcttaatcatccttatgaaaacagatgtaaacaactatatttcaactaacttcatcttcactgcatagcctcaggctagtgagtttgccaaaaccaaagggggtgaatacttccccaagattcttcctgggaggatggaaacagtgcagcccaggtcccatgggggcagctccatcccagagcatttctgatagttgaactgtaatttctactcttaagtgagatatgaagcattatccttttgttcagttgccccgggcttttgaacagaagagtaaatacagaattgaaaaagataaacactcaaccaaacaatgtgaaaacgggttctgtagtatttgtaaaaaggcccggcccaggaccactgtgagctggaaaagggagaaaggcagtgggaaaagaggtgagccgaagatcaattcgacagacagacggtgtgtatgcccctccctgtttgacttcacacacactcataactttccaaatgaaaccccacagtatagcgcatattttcgatatttttgtgaattccaaaaggaaatcacagggctgttcgaaatattgggggaacactgtgtttctgcatcatctgcatttgctccccaagcaatgtagaggtgtttaaagggccctctgctggctgagtggcaatactacaacaaacttcaaggcaagtttggctgaaaacagttgacaacaaagggcccccatacacttatccctcaaattttaagtgatatgaaatacttgtcatgtctttggccaaatcagaagatattcatcctgcttcaagtcagcttcagaaatgttttaaaagggactttagctctggaactcaaaatcaatttattaagagccatattctttaaaaaaaaaaagctggataatattctctgtaatatttcagtcctttacaagccaaatacatgtgtcaatgtttctagtatttcaaagaagcaattatgtaaagttgttcaatgtgacataatagtattataattggttaagtagcttaatgattaggcaaactagatgaaaagattaggggcttccacactgcatagattacacgcacatagccacgcatacacacacagacacacagatgtggggtacactgaacttcaaagcccaaatgaatagaaacacattttctggctagcagaaaaaaacaaaacaaaactgttgtttctctttcttgctttgagagtgtacagtaaaagggattttttcgaattatttttatattattttagctttaattgtgctgtcgttcatgaaacagagctgctctgcttttctgtcagagatggcaagggctttttcagcatctcgtttatgtgtggaatttaaaaagaataaagttttattccattctgtgtgaa

SEQ ID NO: 307239 - DNA, 2727 bp, Homo sapiens
actaagaccgcaaggcattcatttcctcctacggtggatgcggacgccgggaggaggagagccccagagagaggagctgggagcggaggcgcagagaacacgtagcgactccgaagatcagccccaatgaacatgtcagtgttgactttacaagaatatgaattcgaaaagcagttcaacgagaatgaagccatccaatggatgcaggaaaactggaagaaatctttcctgttttctgctctgtatgctgcctttatattcggtggtcggcacctaatgaataaacgagcaaagtttgaactgaggaagccattagtgctctggtctctgacccttgcagtcttcagtatattcggtgctcttcgaactggtgcttatatggtgtacattttgatgaccaaaggcctgaagcagtcagtttgtgaccagggtttttacaatggacctgtcagcaaattctgggcttatgcatttgtgctaagcaaagcacccgaactaggagatacaatattcattattctgaggaagcagaagctgatcttcctgcactggtatcaccacatcactgtgctcctgtactcttggtactcctacaaagacatggttgccgggggaggttggttcatgactatgaactatggcgtgcacgccgtgatgtactcttactatgccttgcgggcggcaggtttccgagtctcccggaagtttgccatgttcatcaccttgtcccagatcactcagatgctgatgggctgtgtggttaactacctggtcttctgctggatgcagcatgaccagtgtcactctcactttcagaacatcttctggtcctcactcatgtacctcagctaccttgtgctcttctgccatttcttctttgaggcctacatcggcaaaatgaggaaaacaacgaaagctgaatagtgttggaactgaggaggaagccatagctcagggtcatcaagaaaaataatagacaaaagaaaatggcacaaggaatcacacgtggtgcagctaaaacaaaacaaaacatgagcaaacacaaaacccaaggcagcttagggataattaggttgatttaacccagtaagtttatgatccttttagggtgaggactcactgagtgcacctccatctccaagcactgctgctggaagaccccattccctctttatctatcaactctaggacaagggagaacaaaagcaagccagaagcagaggagactaatcaaaggcaaacaaaggctattaacacataggaaaaaatgtatttactaagtgtcacatttctctaagatgaaagatttttactctagaaactgtgcgagcacaacacacacaatcctttctaactttatggacactaaactggagccaatagaaaagacaaaaatgaaagagacacagggtgtatatctagaacgataatgcttttgcagaaactaaagcctttttaagaaatgccagctgctgtagaccccatgagaaaagatgtcttaatcatccttatgaaaacagatgtaaacaactatatttcaactaacttcatcttcactgcatagcctcaggctagtgagtttgccaaaaccaaagggggtgaatacttccccaagattcttcctgggaggatggaaacagtgcagcccaggtcccatgggggcagctccatcccagagcatttctgatagttgaactgtaatttctactcttaagtgagatatgaagcattatccttttgttcagttgccccgggcttttgaacagaagagtaaatacagaattgaaaaagataaacactcaaccaaacaatgtgaaaacgggttctgtagtatttgtaaaaaggcccggcccaggaccactgtgagctggaaaagggagaaaggcagtgggaaaagaggtgagccgaagatcaattcgacagacagacggtgtgtatgcccctccctgtttgacttcacacacactcataactttccaaatgaaaccccacagtatagcgcatattttcgatatttttgtgaattccaaaaggaaatcacagggctgttcgaaatattgggggaacactgtgtttctgcatcatctgcatttgctccccaagcaatgtagaggtgtttaaagggccctctgctggctgagtggcaatactacaacaaacttcaaggcaagtttggctgaaaacagttgacaacaaagggcccccatacacttatccctcaaattttaagtgatatgaaatacttgtcatgtctttggccaaatcagaagatattcatcctgcttcaagtcagcttcagaaatgttttaaaagggactttagctctggaactcaaaatcaatttattaagagccatattctttaaaaaaaaaaagctggataatattctctgtaatatttcagtcctttacaagccaaatacatgtgtcaatgtttctagtatttcaaagaagcaattatgtaaagttgttcaatgtgacataatagtattataattggttaagtagcttaatgattaggcaaactagatgaaaagattaggggcttccacactgcatagattacacgcacatagccacgcatacacacacagacacacagatgtggggtacactgaacttcaaagcccaaatgaatagaaacacattttctggctagcagaaaaaaacaaaacaaaactgttgtttctctttcttgctttgagagtgtacagtaaaagggattttt

SEQ ID NO: 307240 - DNA, 168 bp, Homo sapiens
gcggccgcctactactactactactgctcgaattcaagcttctaacgatgtacggggacatgaaacagagctgctctgcttttctgtcagagatggcaagggctttttcagcatctcgtttatgtgtggaatttaaaaagaataaagttttattccattctgtgtgaa

SEQ ID NO: 307241 - DNA, 2886 bp, Homo sapiens
  misc_feature (16)..(16): n is a, c, g, or t
ccacggacaacacaanggaaaccaacggctaggtgcgaggctgggtggcgggagaacactcgaaatcaagcgctttacagattattttattttgtatagagaacacgtagcgactccgaagatcagccccaatgaacatgtcagtgttgactttacaagaatatgaattcgaaaagcagttcaacgagaatgaagccatccaatggatgcaggaaaactggaagaaatctttcctgttttctgctctgtatgctgcctttatattcggtggtcggcacctaatgaataaacgagcaaagtttgaactgaggaagccattagtgctctggtctctgacccttgcagtcttcagtatattcggtgctcttcgaactggtgcttatatggtgtacattttgatgaccaaaggcctgaagcagtcagtttgtgaccagggtttttacaatggacctgtcagcaaattctgggcttatgcatttgtgctaagcaaagcacccgaactaggagatacaatattcattattctgaggaagcagaagctgatcttcctgcactggtatcaccacatcactgtgctcctgtactcttggtactcctacaaagacatggttgccgggggaggttggttcatgactatgaactatggcgtgcacgccgtgatgtactcttactatgccttgcgggcggcaggtttccgagtctcccggaagtttgccatgttcatcaccttgtcccagatcactcagatgctgatgggctgtgtggttaactacctggtcttctgctggatgcagcatgaccagtgtcactctcactttcagaacatcttctggtcctcactcatgtacctcagctaccttgtgctcttctgccatttcttctttgaggcctacatcggcaaaatgaggaaaacaacgaaagctgaatagtgttggaactgaggaggaagccatagctcagggtcatcaagaaaaataatagacaaaagaaaatggcacaaggaatcacacgtggtgcagctaaaacaaaacaaaacatgagcaaacacaaaacccaaggcagcttagggataattaggttgatttaacccagtaagtttatgatccttttagggtgaggactcactgagtgcacctccatctccaagcactgctgctggaagaccccattccctctttatctatcaactctaggacaagggagaacaaaagcaagccagaagcagaggagactaatcaaaggcaaacaaaggctattaacacataggaaaaaatgtatttactaagtgtcacatttctctaagatgaaagatttttactctagaaactgtgcgagcacaacacacacaatcctttctaactttatggacactaaactggagccaatagaaaagacaaaaatgaaagagacacagggtgtatatctagaacgataatgcttttgcagaaactaaagcctttttaagaaatgccagctgctgtagaccccatgagaaaagatgtcttaatcatccttatgaaaacagatgtaaacaactatatttcaactaacttcatcttcactgcatagcctcaggctagtgagtttgccaaaaccaaagggggtgaatacttccccaagattcttcctgggaggatggaaacagtgcagcccaggtcccatgggggcagctccatcccagagcatttctgatagttgaactgtaatttctactcttaagtgagatatgaagcattatccttttgttcagttgccccgggcttttgaacagaagagtaaatacagaattgaaaaagataaacactcaaccaaacaatgtgaaaacgggttctgtagtatttgtaaaaaggcccggcccaggaccactgtgagctggaaaagggagaaaggcagtgggaaaagaggtgagccgaagatcaattcgacagacagacggtgtgtatgcccctccctgtttgacttcacacacactcataactttccaaatgaaaccccacagtatagcgcatattttcgatatttttgtgaattccaaaaggaaatcacagggctgttcgaaatattgggggaacactgtgtttctgcatcatctgcatttgctccccaagcaatgtagaggtgtttaaagggccctctgctggctgagtggcaatactacaacaaacttcaaggcaagtttggctgaaaacagttgacaacaaagggcccccatacacttatccctcaaattttaagtgatatgaaatacttgtcatgtctttggccaaatcagaagatattcatcctgcttcaagtcagcttcagaaatgttttaaaagggactttagctctggaactcaaaatcaatttattaagagccatattctttaaaaaaaaaaagctggataatattctctgtaatatttcagtcctttacaagccaaatacatgtgtcaatgtttctagtatttcaaagaagcaattatgtaaagttgttcaatgtgacataatagtattataattggttaagtagcttaatgattaggcaaactagatgaaaagattaggggcttccacactgcatagattacacgcacatagccacgcatacacacacagacacacagatgtggggtacactgaacttcaaagcccaaatgaatagaaacacattttctggctagcagaaaaaaacaaaacaaaactgttgtttctctttcttgctttgagagtgtacagtaaaagggattttttcgaattatttttatattattttagctttaattgtgctgtcgttcatgaaacagagctgctctgcttttctgtcagagatggcaagggctttttcagcatctcgtttatgtgtggaatttaaaaagaataaagttttattccattctgtgtgaa

SEQ ID NO: 307242 - DNA, 4095 bp, Homo sapiens
actaagaccgcaaggcattcatttcctcctacggtggatgcggacgccgggaggaggagagccccagagagaggagctgggagcggaggcgcaggcaatgctcagccctggatgtagctgagaggctgggagaagagacgaccgctggagaccgagcggcgtggggaagacctaggggggtgggtgggggaagcagacaggagaacactcgaaatcaagcgctttacagattattttattttgtatagagaacacgtagcgactccgaagatcagccccaatgaacatgtcagtgttgactttacaagaatatgaattcgaaaagcagttcaacgagaatgaagccatccaatggatgcaggaaaactggaagaaatctttcctgttttctgctctgtatgctgcctttatattcggtggtcggcacctaatgaataaacgagcaaagtttgaactgaggaagccattagtgctctggtctctgacccttgcagtcttcagtatattcggtgctcttcgaactggtgcttatatggtgtacattttgatgaccaaaggcctgaagcagtcagtttgtgaccagggtttttacaatggacctgtcagcaaattctgggcttatgcatttgtgctaagcaaagcacccgaactaggagatacaatattcattattctgaggaagcagaagctgatcttcctgcactggtatcaccacatcactgtgctcctgtactcttggtactcctacaaagacatggttgccgggggaggttggttcatgactatgaactatggcgtgcacgccgtgatgtactcttactatgccttgcgggcggcaggtttccgagtctcccggaagtttgccatgttcatcaccttgtcccagatcactcagatgctgatgggctgtgtggttaactacctggtcttctgctggatgcagcatgaccagtgtcactctcactttcagaacatcttctggtcctcactcatgtacctcagctaccttgtgctcttctgccatttcttctttgaggcctacatcggcaaaatgaggaaaacaacgaaagctgaatagtgttggaactgaggaggaagccatagctcagggtcatcaagaaaaataatagacaaaagaaaatggcacaaggaatcacacgtggtgcagctaaaacaaaacaaaacatgagcaaacacaaaacccaaggcagcttagggataattaggttgatttaacccagtaagtttatgatccttttagggtgaggactcactgagtgcacctccatctccaagcactgctgctggaagaccccattccctctttatctatcaactctaggacaagggagaacaaaagcaagccagaagcagaggagactaatcaaaggcaaacaaaggctattaacacataggaaaaaatgtatttactaagtgtcacatttctctaagatgaaagatttttactctagaaactgtgcgagcacaacacacacaatcctttctaactttatggacactaaactggagccaatagaaaagacaaaaatgaaagagacacagggtgtatatctagaacgataatgcttttgcagaaactaaagcctttttaagaaatgccagctgctgtagaccccatgagaaaagatgtcttaatcatccttatgaaaacagatgtaaacaactatatttcaactaacttcatcttcactgcatagcctcaggctagtgagtttgccaaaaccaaagggggtgaatacttccccaagattcttcctgggaggatggaaacagtgcagcccaggtcccatgggggcagctccatcccagagcatttctgatagttgaactgtaatttctactcttaagtgagatatgaagcattatccttttgttcagttgccccgggcttttgaacagaagagtaaatacagaattgaaaaagataaacactcaaccaaacaatgtgaaaacgggttctgtagtatttgtaaaaaggcccggcccaggaccactgtgagctggaaaagggagaaaggcagtgggaaaagaggtgagccgaagatcaattcgacagacagacggtgtgtatgcccctccctgtttgacttcacacacactcataactttccaaatgaaaccccacagtatagcgcatattttcgatatttttgtgaattccaaaaggaaatcacagggctgttcgaaatattgggggaacactgtgtttctgcatcatctgcatttgctccccaagcaatgtagaggtgtttaaagggccctctgctggctgagtggcaatactacaacaaacttcaaggcaagtttggctgaaaacagttgacaacaaagggcccccatacacttatccctcaaattttaagtgatatgaaatacttgtcatgtctttggccaaatcagaagatattcatcctgcttcaagtcagcttcagaaatgttttaaaagggactttagctctggaactcaaaatcaatttattaagagccatattctttaaaaaaaaaaagctggataatattctctgtaatatttcagtcctttacaagccaaatacatgtgtcaatgtttctagtatttcaaagaagcaattatgtaaagttgttcaatgtgacataatagtattataattggttaagtagcttaatgattaggcaaactagatgaaaagattaggggcttccacactgcatagattacacgcacatagccacgcatacacacacagacacacagatgtggggtacactgaacttcaaagcccaaatgaatagaaacacattttctggctagcagaaaaaaacaaaacaaaactgttgtttctctttcttgctttgagagtgtacagtaaaagggattttttcgaattatttttatattattttagctttaattgtgctgtcgttcatgaaacagagctgctctgcttttctgtcagagatggcaagggctttttcagcatctcgtttatgtgtggaatttaaaaagaataaagttttattccattctgtgtgaatggtttgagcagtgaacaaagaatccatgcaaaccaagtcatgactggaagaaatggggagtgggggacagtgcaggggaggaaagctgttacatctatgttaaatgattgtgagcagtctataatgtcttgatgttggttcataggtgagacacaactgatggaggaatgtattataaattatgcaaaatctgacatgagctgaaaagacaggtccttttataagagctaatagatgcttaggatgcaaatgttattttgagcttcgcaaatacatgataccgtgcaataagccttttttccttataacagaaaatgagaataattaaaatgaggagaaggccacataacagttgacttgaatttaattgaaggacccattggaggctcatctggttgatttaattatttaattgagtgatttattgcagatctcttaatgcaggttagaaacggaagtgagcataaaccttaaaaagactctaaatgatgcttccaaagcactttcattttggtattaggttcatgtttgtttgtctttacttgtaaaataatttggaatttttgtttacagggtgaatgtcttaatagttttaaaattagctaaatatatctaaaggcatttccaatgtttatcatgggaggaaaaaagccacattttttttaaaacaaaacaaaacaaaacaaaattttggtaatataggttcaatacactgtttttaacatctcagcttagccgctttaatcatatcaagatatgaggctggatcactggcccatgacaaatctgaaacctaccagagaattgactgctgcatagataatcctgctgccagttaacattccagaaaaacttgggcaggcaagtttttatagctgccccactatgctgcaatagagtatctttctattgaagattttccactgcgatcccgatcctactatggtgaaagcattgttcttgggctaaaaaaaaatcctttatttcatacccacatgatttcatacactaagtctgagcattaagccaagtccctgagtttgcaatgaagttctagtg

SEQ ID NO: 307243 - DNA, 793 bp, Homo sapiens
actaagaccgcaaggcattcatttcctcctacggtggatgcggacgccgggaggaggagagccccagagagaggagctgggagcggaggcgcaggcaatgctcagccctggatgtagctgagaggctgggagaagagacgaccgctggagaccgagcggcgtggggaagacctaggggggtgggtgggggaagcagacaggagaacactcgaaatcaagcgctttacagattattttattttgtatagagaacacgtagcgactccgaagatcagccccaatgaacatgtcagtgttgactttacaagaatatgaattcgaaaagcagttcaacgagaatgaagccatccaatggatgcaggaaaactgggtgatgtctgcgcgacagggaaggcgggagagatgccacagtccagatcgcctacctgtgctcccctcccctcccccggttttcatctagatttgggttttctcgcttggcctctcccgcaaccggagtgtgaaaggcagtggagggaggaccttgtctcctgttgcctttaaccctctcccgcccgccgcccttggccctggtcctcgctgtctctccatccctcgtgtccttcctttctccttgcagcgctcctacttcaccgtcctcctctgtctgccgctcctcaggcggatgccccctttttagtacccctttccccacgcggttccctttccggtttcatagagagaccgggtgggagggaggaggggacaatgaaaacagtaataaatgaatgaacccgagcgagtggagccacgc

SEQ ID NO: 307244 - DNA, 914 bp, Homo sapiens
  misc_feature (16)..(16): n is a, c, g, or t
ccacggacaacacaanggaaaccaacggctaggtgcgaggctgggtggcgggagaacactcgaaatcaagcgctttacagattattttattttgtatagagaacacgtagcgactccgaagatcagccccaatgaacatgtcagtgttgactttacaagaatatgaattcgaaaagcagttcaacgagaatgaagccatccaatggatgcaggaaaactggtacgtgatgctttcgcctgatactgttcccgggagccctgcgcgtcttcccggagtgccttaatgtcggtattccctgcctgggcgtgaatggagcgatgaatcgcgggcagccagctgatcgctgagttctcgggtctcccgggtgcaggagacgctgggggggggggtacatgaagcgcgaggtctgtgggtgcccctgtgtgaaccgcggctacataggcatcttttatatagattatataacacagaacatatgtgtgtgcacagggtgatgtctgcgcgacagggaaggcgggagagatgccacagtccagatcgcctacctgtgctcccctcccctcccccggttttcatctagatttgggttttctcgcttggcctctcccgcaaccggagtgtgaaaggcagtggagggaggaccttgtctcctgttgcctttaaccctctcccgcccgccgcccttggccctggtcctcgctgtctctccatccctcgtgtccttcctttctccttgcagcgctcctacttcaccgtcctcctctgtctgccgctcctcaggcggatgccccctttttagtacccctttccccacgcggttccctttccggtttcatagagagaccgggtgggagggaggaggggacaatgaaaacagtaataaatgaatgaacccgagcgagtggagccacgc

SEQ ID NO: 307245 - DNA, 1612 bp, Homo sapiens
  misc_feature (12)..(12): n is a, c, g, or t
atgcgtattccngtagatccgagcaccagccggcgcttcagccccccctccagcagcctgcagcccggcaaaatgagcgacgtgagcccggtggtggctgcgcaacagcagcagcaacagcagcagcagcaacagcagcagcagcagcagcaacagcagcagcagcagcaggaggcggcggcggcggctgcggcggcagcggcggctgcggcggcggcagctgcagtgccccggttgcggccgccccacgacaaccgcaccatggtggagatcatcgccgaccacccggccgaactcgtccgcaccgacagccccaacttcctgtgctcggtgctgccctcgcactggcgctgcaacaagaccctgcccgtggccttcaaggtggtagccctcggagaggtaccagatgggactgtggttactgtcatggcgggtaacgatgaaaattattctgctgagctccggaatgcctctgctgttatgaaaaaccaagtagcaaggttcaacgatctgagatttgtgggccggagtggacgaggcaagagtttcaccttgaccataaccgtcttcacaaatcctccccaagtagctacctatcacagagcaattaaagttacagtagatggacctcgggaacccagaaggcacagacagaagcttgatgactctaaacctagtttgttctctgaccgcctcagtgatttagggcgcattcctcatcccagtatgagagtaggtgtcccgcctcagaacccacggccctccctgaactctgcaccaagtccttttaatccacaaggacagagtcagattacagaccccaggcaggcacagtcttccccgccgtggtcctatgaccagtcttacccctcctacctgagccagatgacgtccccgtccatccactctaccaccccgctgtcttccacacggggcactgggcttcctgccatcaccgatgtgcctaggcgcatttcagatgatgacactgccacctctgacttctgcctctggccttccactctcagtaagaagagccaggcaggtgcttcagaactgggccctttttcagaccccaggcagttcccaagcatttcatccctcactgagagccgcttctccaacccacgaatgcactatccagccacctttacttacaccccgccagtcacctcaggcatgtccctcggtatgtccgccaccactcactaccacacctacctgccaccaccctaccccggctcttcccaaagccagagtggacccttccagaccagcagcactccatatctctactatggcacttcgtcaggatcctatcagtttcccatggtgccggggggagaccggtctccttccagaatgcttccgccatgcaccaccacctcgaatggcagcacgctattaaatccaaatttgcctaaccagaatgatggtgttgacgctgatggaagccacagcagttccccaactgttttgaattctagtggcagaatggatgaatctgtttggcgaccatattgaaattcctcagcagtggcccagtggtatctgggggccacatcccacacgtatcaatatatacatatatagagagagtgcatatatatgt

SEQ ID NO: 307246 - DNA, 1546 bp, Homo sapiens
  misc_feature (12)..(12): n is a, c, g, or t
atgcgtattccngtagatccgagcaccagccggcgcttcagccccccctccagcagcctgcagcccggcaaaatgagcgacgtgagcccggtggtggctgcgcaacagcagcagcaacagcagcagcagcaacagcagcagcagcagcagcaacagcagcagcagcagcaggaggcggcggcggcggctgcggcggcagcggcggctgcggcggcggcagctgcagtgccccggttgcggccgccccacgacaaccgcaccatggtggagatcatcgccgaccacccggccgaactcgtccgcaccgacagccccaacttcctgtgctcggtgctgccctcgcactggcgctgcaacaagaccctgcccgtggccttcaaggtggtagccctcggagaggtaccagatgggactgtggttactgtcatggcgggtaacgatgaaaattattctgctgagctccggaatgcctctgctgttatgaaaaaccaagtagcaaggttcaacgatctgagatttgtgggccggagtggacgaggcaagagtttcaccttgaccataaccgtcttcacaaatcctccccaagtagctacctatcacagagcaattaaagttacagtagatggacctcgggaacccagaaggcacagacagaagcttgatgactctaaacctagtttgttctctgaccgcctcagtgatttagggcgcattcctcatcccagtatgagagtaggtgtcccgcctcagaacccacggccctccctgaactctgcaccaagtccttttaatccacaaggacagagtcagattacagaccccaggcaggcacagtcttccccgccgtggtcctatgaccagtcttacccctcctacctgagccagatgacgtccccgtccatccactctaccaccccgctgtcttccacacggggcactgggcttcctgccatcaccgatgtgcctaggcgcatttcaggtgcttcagaactgggccctttttcagaccccaggcagttcccaagcatttcatccctcactgagagccgcttctccaacccacgaatgcactatccagccacctttacttacaccccgccagtcacctcaggcatgtccctcggtatgtccgccaccactcactaccacacctacctgccaccaccctaccccggctcttcccaaagccagagtggacccttccagaccagcagcactccatatctctactatggcacttcgtcaggatcctatcagtttcccatggtgccggggggagaccggtctccttccagaatgcttccgccatgcaccaccacctcgaatggcagcacgctattaaatccaaatttgcctaaccagaatgatggtgttgacgctgatggaagccacagcagttccccaactgttttgaattctagtggcagaatggatgaatctgtttggcgaccatattgaaattcctcagcagtggcccagtggtatctgggggccacatcccacacgtatcaatatatacatatatagagagagtgcatatatatgt

SEQ ID NO: 307247 - DNA, 739 bp, Homo sapiens
taaaacataaaaattactttaaaaaaatttaaagaggccgggcacagtggcttatgcctgtaatcccagaaatttgggaggccgaggcaggaggatcacttgagcccgggagtccaagaccagcctcgttaatataatgagagcttatcatctctacaaaaaataaacaaaattagccaggcatggtggcatgtgcctgtagttccagctactcaggaggctgaggtaggaggatcactggagcccagggggtggaggagcagtaagccaagattctgccactgcactccagcctggctgacagagtaagaccctatctcaaaaaacaaaaagcagaaagaacaaagaagtaaacaaaagcttaaaagtaaatcagccaggtgcagtagctcatgcctgtaatcccagtactttgggaggcctaggcaggcagattactgcaggtcaagagtttgagaccagcctggccaacatgatgaaaccctgtctctactaaaactacaaaaattagccaggcatggtggtgcgcacctgtaatcccagctactccggaggctgagacaagagaatcgcttgaacctaggaagtggaggttgcagtggcagtgagccaagatagcgccactgcactccagcctgggcaacagagcaagactccatatatggagatcccttgagatcaagagttcgagaccagcctggccaacacggcaaaaccctgtctctactaaaaataaaaa

SEQ ID NO: 307248 - DNA, 6731 bp, Homo sapiens
taacgcctttcacaaatgtttattttgctaggtgtatgaacagttaaagccagcctgaaagataaaaaatactaactcttgatttcgatttcttacattttctgctccaaagtacaaaggaacttaaatttgaagttataaaacggatcccacattgtttctgtaattatcatttcgcagtattggtaataggaataacatctttgtcgaataaccattcctaaaacttacttttagactcattcttacatattaatttgcaaataagcaaatgttaaggacagtatcaaaaaagactttaaaacacatctagtgaacgttctgagttacttctagtttcgaaaattctattgaattccaaggtcacatgtattatgtacattaaacttgtttccctaaataaaagttactgatatgggaaagttgctttaggggaattttcgctagtaaatccataatccttaaaattctaagtgaattaaacattgatactttgcaaatatttacagcagtgtaaatattactttttaaaggtgcgttagtttcaagaatgctggggtcctacaagcatgatgacactttgtaacacatactttttttttggtcttttcctctgctttctaaatctcttaattgccataagtattaaatagaactgatgtcaaggtatcttctgttcaagatggatgtttactaaacatgcaaagtatttttagagatatagattctaatttggaagaagaaaaatagcaacaaattttcttattcatttcttttctcatctttaaaatacaagttaaatcgtaattggaatcccttttcccatcgtgtagtcaagagtctgtgccagacttgaaggctttactttgttagccatgtgtttatgaacccccagcgctttccctagatcttttggctgataatctcaaacatggaggatgcttctgaatcttcacgaggggttgctccattaattaataatgtagttctcccaggctctccgctgtctcttcctgtatcagtgacaggctgtaaaagtcatcgagtagccaataaaaaggtagaagcgaggagtgaaaagctcctcccaacagctcttcctccttcagagccgaaagtagatcagaaacttcccaggagctccgagaggcggggaagtggcggtgggacgcaattccccgcgcggagtcgggcagtggcagcgggagaagcggcagccaggggcgcggcggggccggagagaggcggtcccctgggaggacggggtctcccctcgttgcctttgtagtggagaaggtggacaagtggcagtcggcgtgatcgcagggaagcggggccggcgcgggcggccgagggtccaggcgagcccgcgggcggacgggagatgccgctgctacaccgaaagccgtttgtgagacagaagccgcccgcggacctgcggcccgacgaggaagttttctactgtaaagtcaccaacgagatcttccgccactacgatgacttttttgaacgaaccattctgtgcaacagccttgtgtggagttgtgctgtgacgggtagacctggactgacgtatcaggaagcacttgagtcagaaaaaaaagcaagacagaatcttcagagttttccagaaccactaattattccagttttatacttgaccagccttacccatcgttcgcgcttacatgaaatttgtgatgatatctttgcatatgtcaaggatcgatattttgtcgaagaaactgtggaagtcattaggaacaatggtgcaaggttgcagtgtaggattttggaagtcctccctccatcacatcaaaatggttttgctaatggacatgttaacagtgtggatggagaaactattatcatcagtgatagtgatgattcagaaacacaaagctgttcttttcaaaatgggaagaaaaaagatgcaattgatcccttactattcaagtataaagtgcaacccactaaaaaagaattacatgagtctgctattgttaaagcaacacaaatcagccggagaaaacacctattttctcgtgataaactaaagctttttctgaagcaacactgtgaaccacaagatggagtcattaaaataaaggcatcatctctttcaacgtataaaatagcagaacaagatttttcttatttcttccctgatgatccacccacatttatcttcagtcctgctaacagacgaagagggagacctcccaaacgaatacatattagtcaagaggacaatgttgctaataaacagactcttgcaagttataggagcaaagctactaaagaaagagataaacttttgaaacaagaagaaatgaagtcactggcttttgaaaaggctaaattaaaaagagaaaaagcagatgccctagaagcgaagaaaaaagaaaaagaagataaagagaaaaagagggaagaattgaaaaaaattgttgaagaagagagactaaagaaaaaagaagaaaaagagaggcttaaagtagaaagagaaaaggaaagagagaagttacgtgaagaaaagcgaaagtatgtggaatacttaaaacagtggagtaaacctagagaagatatggaatgtgatgaccttaaggaacttccagaaccaacaccagtgaaaactagactacctcctgaaatctttggtgatgctctgatggttttggagttccttaatgcatttggggaactttttgatcttcaagatgagtttcctgatggagtaaccctagaagtattagaggaagctcttgtaggaaatgacagtgaaggcccactgtgtgaattgctttttttcttcctgactgcaatcttccaggcaatagctgaagaagaagaggaagtagccaaagagcaactaactgatgctgacaccaaaggctgcagtttgaaaagtttggatcttgatagctgcactctttcagaaatcctcagactgcacatcttagcttcaggtgctgatgtaacatcagcaaatgcaaagtatagatatcaaaaacgaggaggatttgatgctacagatgatgcttgtatggagcttcgtttgagcaatcccagtctagtgaagaaactgtcaagcacctcagtgtatgatttgacaccaggagaaaaaatgaagatactccatgctctctgtggaaagctactgaccctagtttcaactagggattttattgaagattatgttgatatattacgacaggcaaagcaggagttccgggaattaaaagcagaacaacatcgaaaagagagggaagaagcagctgccagaattcgtaaaaggaaggaagaaaaacttaaggagcaagaacaaaaaatgaaagagaaacaagaaaaactgaaagaagatgagcaaagaaattcaacggcagatatatctattggggaggaagaaagggaagattttgatactagcattgagagcaaagacacagagcaaaaggaattagatcaagatatggtcactgaagatgaagatgacccaggatcacataaaagaggcagaagggggaaaagaggacaaaatggatttaaagaatttacaaggcaagaacagatcaactgtgtaacaagagagcctcttactgctgatgaggaagaagcattaaaacaggaacaccaacgaaaagagaaagagctcttagaaaaaatccaaagtgccatagcctgtaccaatatctttcccttgggtcgcgaccgcatgtatagacgatactggattttcccttctattcctggactctttattgaagaggattattctggtcttactgaagacatgctgttgcctagaccttcatcatttcagaataatgtacagtctcaagatcctcaggtatccactaaaactggagagcctttgatgtctgaatctacctccaacattgaccaaggtccacgtgaccattctgtgcagctgccaaaaccagtgcataagccaaatcggtggtgcttttacagttcttgtgaacagctagaccagcttattgaagctcttaattctagaggacatagagaaagtgccttaaaagaaactttgttacaagagaaaagcagaatatgtgcacagctagcccgtttttctgaagagaaatttcatttttcagacaaacctcagcctgatagcaaaccaacatatagtcggggaagatcttccaatgcatatgatccatctcagatgtgtgcagaaaagcaacttgaactaaggctgagagattttcttttagatattgaagatagaatctaccaaggaacattaggagccatcaaggttacagatcgacatatctggagatcagcattagaaagtggacggtatgagctgttaagtgaggaaaacaaggaaaatgggataattaaaactgtgaatgaagacgtagaagagatggaaattgatgaacaaacaaaggtcatagtaaaagacagacttttggggataaaaacagaaactccaagtactgtatcaacaaatgcaagtacaccacaatcagtgagcagtgtggttcattatctggcaatggcactctttcaaatagagcagggcattgagcggcgttttctgaaagctccacttgatgccagtgacagtgggcgttcttataaaacagttctggaccgttggagagagtctctcctttcttctgctagtctatcccaagtttttcttcacctatccaccttggatcgtagcgtgatatggtctaaatctatactgaatgcgcgttgcaagatatgtcgaaagaaaggcgatgctgaaaacatggttctttgtgatggctgtgataggggtcatcatacctactgtgttcgaccaaagctcaagactgtgcctgaaggagactggttttgtccagaatgtcgaccaaagcaacgttctagaagactctcctctagacagagaccatccttggaaagtgatgaagatgtggaagacagtatgggaggtgaggatgatgaagttgatggcgatgaagaagaaggtcaaagtgaggaggaagagtatgaggtagaacaagatgaagatgactctcaagaagaggaagaagtcagcctacccaaacgaggaagaccacaagttagattgccagttaaaacaagagggaaacttagctcttctttctcaagtcgtggccaacaacaagaacctggaagatacccttcaaggagtcagcagagcacacccaaaacaactgtttcttctaaaactggtagaagcctaagaaagataaactctgctcctcctacagaaacaaaatctttaagaattgccagtcgttctactcgccacagtcatggcccactgcaagcagatgtatttgtggaattgcttagtcctcgtagaaaacgcagaggcaggaaaagtgctaataatacaccagaaaatagtcccaacttccctaacttcagagtcattgccacaaagtcaagtgaacagtcaagatctgtaaatattgcttcaaaactttctctccaagagagtgaatccaaaagaagatgcagaaaaagacaatctccagagccatcgcctgtgacactgggtcgaaggagttctggccgacagggaggagttcatgaattgtctgcttttgaacaacttgttgtagaattggtacgacatgatgacagctggccttttttgaaacttgtttctaaaatccaggtcccagactactatgacatcatcaaaaagcccattgccttaaatataattcgtgaaaaagtgaataagtgtgaatataaattagcatctgagtttattgatgacattgagttaatgttttcgaactgctttgaatacaaccctcgtaacacaagtgaagcaaaagctggaactaggcttcaagcattttttcatattcaggctcaaaagcttggactccacgtcacacccagtaatgtggaccaagttagcacaccaccggctgcgaaaaagtcacgaatctgactttgtccttctaaaggatatatttgaagaaaaacaaattgttcatgaaaatggaacattaaatcatgctgtataaagcaataacaattgattgaccacatgaaagtgtggcctgcactatattctcaattttaatattaagcactcaggagaatgtaggaaagatatcctttgctacagttttgttcagtatctaataagtttgatagatgtattggatacagtactggtttacagaggtttttgtacatttttgagatcattcatgtgtccagagatcttggaaaatattttttcacccacgatttattttgttattgatgatttttttttaaagtggtggtattaagggagagttatctacatggatgagtcttccgctatagcacagtttagaaaaggtgtttatgtcttaattaattgtttgagtacattctttcaacactacacatgaatgaatccaatcttataaccttgaagtgctgtaccagtgctggctgcaggtattaagtccaagtttattaactagatatttatttagtattgagagtaatttgtgaatttgttttgtatttataaaatttatacctgaaaaatgttccttaatgttttaaaccttttactgtgtttttattcctctaacttccttaatgatcaatcaaaaaaagtaacaccctccctttttcctgacagttctttcagctttacagaactgtattataagtttctatgtataactttttaactgtacaaataaaataacattttttca

SEQ ID NO: 307249 - DNA, 520 bp, Homo sapiens
aagtttgagtttccagggcttacaaactggggctattttgtttgattcacacagccttttaaaacattgcttcccaaacttgaatgtacatatgaatcacttggggatcttgtcaaaatgatgaagattctaaattagtaggtctggtgggggaatgagattctgcattttttaacaaggtgatgataaccttgctgctggtcttcagatcacactttgggtattagggctttcaaaggcacagatatgtttgtcccagtactgtagtttgtcataaacttagccaatttgcttttcctgttttaataatctgctggctccctgtaggaattttaagagtctctactaatctcatttaactttaaattatttcaaggattctgttgttacatcaaaaaaattgccaagtgttattttgtctatatatatagttctaagtttgatttttcttcacagcttttgaaaaggctaaattaaaaagagaaaaagcagatgccctagaagcgaagaaaaaagaaaa

SEQ ID NO: 307250 - DNA, 6827 bp, Homo sapiens
taacgcctttcacaaatgtttattttgctaggtgtatgaacagttaaagccagcctgaaagataaaaaatactaactcttgatttcgatttcttacattttctgctccaaagtacaaaggaacttaaatttgaagttataaaacggatcccacattgtttctgtaattatcatttcgcagtattggtaataggaataacatctttgtcgaataaccattcctaaaacttacttttagactcattcttacatattaatttgcaaataagcaaatgttaaggacagtatcaaaaaagactttaaaacacatctagtgaacgttctgagttacttctagtttcgaaaattctattgaattccaaggtcacatgtattatgtacattaaacttgtttccctaaataaaagttactgatatgggaaagttgctttaggggaattttcgctagtaaatccataatccttaaaattctaagtgaattaaacattgatactttgcaaatatttacagcagtgtaaatattactttttaaaggtgcgttagtttcaagaatgctggggtcctacaagcatgatgacactttgtaacacatactttttttttggtcttttcctctgctttctaaatctcttaattgccataagtattaaatagaactgatgtcaaggtatcttctgttcaagatggatgtttactaaacatgcaaagtatttttagagatatagattctaatttggaagaagaaaaatagcaacaaattttcttattcatttcttttctcatctttaaaatacaagttaaatcgtaattggaatcccttttcccatcgtgtagtcaagagtctgtgccagacttgaaggctttactttgttagccatgtgtttatgaacccccagcgctttccctagatcttttggctgataatctcaaacatggaggatgcttctgaatcttcacgaggggttgctccattaattaataatgtagttctcccaggctctccgctgtctcttcctgtatcagtgacaggctgtaaaagtcatcgagtagccaataaaaaggtagaagcgaggagtgaaaagctcctcccaacagctcttcctccttcagagccgaaagtagatcagaaacttcccaggagctccgagaggcggggaagtggcggtgggacgcaattccccgcgcggagtcgggcagtggcagcgggagaagcggcagccaggggcgcggcggggccggagagaggcggtcccctgggaggacggggtctcccctcgttgcctttgtagtggagaaggtggacaagtggcagtcggcgtgatcgcagggaagcggggccggcgcgggcggccgagggtccaggcgagcccgcgggcggacgggagatgccgctgctacaccgaaagccgtttgtgagacagaagccgcccgcggacctgcggcccgacgaggaagttttctactgtaaagtcaccaacgagatcttccgccactacgatgacttttttgaacgaaccattctgtgcaacagccttgtgtggagttgtgctgtgacgggtagacctggactgacgtatcaggaagcacttgagtcagaaaaaaaagcaagacagaatcttcagagttttccagaaccactaattattccagttttatacttgaccagccttacccatcgttcgcgcttacatgaaatttgtgatgatatctttgcatatgtcaaggatcgatattttgtcgaagaaactgtggaagtcattaggaacaatggtgcaaggttgcagtgtaggattttggaagtcctccctccatcacatcaaaatggttttgctaatggacatgttaacagtgtggatggagaaactattatcatcagtgatagtgatgattcagaaacacaaagctgttcttttcaaaatgggaagaaaaaagatgcaattgatcccttactattcaagtataaagtgcaacccactaaaaaagaattacatgagtctgctattgttaaagcaacacaaatcagccggagaaaacacctattttctcgtgataaactaaagctttttctgaagcaacactgtgaaccacaagatggagtcattaaaataaaggcatcatctctttcaacgtataaaatagcagaacaagatttttcttatttcttccctgatgatccacccacatttatcttcagtcctgctaacagacgaagagggagacctcccaaacgaatacatattagtcaagaggacaatgttgctaataaacagactcttgcaagttataggagcaaagctactaaagaaagagataaacttttgaaacaagaagaaatgaagtcactggcttttgaaaaggctaaattaaaaagagaaaaagcagatgccctagaagcgaagaaaaaagaaaaagaagataaagagaaaaagagggaagaattgaaaaaaattgttgaagaagagagactaaagaaaaaagaagaaaaagagaggcttaaagtagaaagagaaaaggaaagagagaagttacgtgaagaaaagcgaaagtatgtggaatacttaaaacagtggagtaaacctagagaagatatggaatgtgatgaccttaaggaacttccagaaccaacaccagtgaaaactagactacctcctgaaatctttggtgatgctctgatggttttggagttccttaatgcatttggggaactttttgatcttcaagatgagtttcctgatggagtaaccctagaagtattagaggaagctcttgtaggaaatgacagtgaaggcccactgtgtgaattgctttttttcttcctgactgcaatcttccaggcaatagctgaagaagaagaggaagtagccaaagagcaactaactgatgctgacaccaaagatttaacagaggctttggatgaagatgcagaccccacaaaatctgcactgtctgcagttgcatctttggcagctgcatggccacagttacaccagggctgcagtttgaaaagtttggatcttgatagctgcactctttcagaaatcctcagactgcacatcttagcttcaggtgctgatgtaacatcagcaaatgcaaagtatagatatcaaaaacgaggaggatttgatgctacagatgatgcttgtatggagcttcgtttgagcaatcccagtctagtgaagaaactgtcaagcacctcagtgtatgatttgacaccaggagaaaaaatgaagatactccatgctctctgtggaaagctactgaccctagtttcaactagggattttattgaagattatgttgatatattacgacaggcaaagcaggagttccgggaattaaaagcagaacaacatcgaaaagagagggaagaagcagctgccagaattcgtaaaaggaaggaagaaaaacttaaggagcaagaacaaaaaatgaaagagaaacaagaaaaactgaaagaagatgagcaaagaaattcaacggcagatatatctattggggaggaagaaagggaagattttgatactagcattgagagcaaagacacagagcaaaaggaattagatcaagatatggtcactgaagatgaagatgacccaggatcacataaaagaggcagaagggggaaaagaggacaaaatggatttaaagaatttacaaggcaagaacagatcaactgtgtaacaagagagcctcttactgctgatgaggaagaagcattaaaacaggaacaccaacgaaaagagaaagagctcttagaaaaaatccaaagtgccatagcctgtaccaatatctttcccttgggtcgcgaccgcatgtatagacgatactggattttcccttctattcctggactctttattgaagaggattattctggtcttactgaagacatgctgttgcctagaccttcatcatttcagaataatgtacagtctcaagatcctcaggtatccactaaaactggagagcctttgatgtctgaatctacctccaacattgaccaaggtccacgtgaccattctgtgcagctgccaaaaccagtgcataagccaaatcggtggtgcttttacagttcttgtgaacagctagaccagcttattgaagctcttaattctagaggacatagagaaagtgccttaaaagaaactttgttacaagagaaaagcagaatatgtgcacagctagcccgtttttctgaagagaaatttcatttttcagacaaacctcagcctgatagcaaaccaacatatagtcggggaagatcttccaatgcatatgatccatctcagatgtgtgcagaaaagcaacttgaactaaggctgagagattttcttttagatattgaagatagaatctaccaaggaacattaggagccatcaaggttacagatcgacatatctggagatcagcattagaaagtggacggtatgagctgttaagtgaggaaaacaaggaaaatgggataattaaaactgtgaatgaagacgtagaagagatggaaattgatgaacaaacaaaggtcatagtaaaagacagacttttggggataaaaacagaaactccaagtactgtatcaacaaatgcaagtacaccacaatcagtgagcagtgtggttcattatctggcaatggcactctttcaaatagagcagggcattgagcggcgttttctgaaagctccacttgatgccagtgacagtgggcgttcttataaaacagttctggaccgttggagagagtctctcctttcttctgctagtctatcccaagtttttcttcacctatccaccttggatcgtagcgtgatatggtctaaatctatactgaatgcgcgttgcaagatatgtcgaaagaaaggcgatgctgaaaacatggttctttgtgatggctgtgataggggtcatcatacctactgtgttcgaccaaagctcaagactgtgcctgaaggagactggttttgtccagaatgtcgaccaaagcaacgttctagaagactctcctctagacagagaccatccttggaaagtgatgaagatgtggaagacagtatgggaggtgaggatgatgaagttgatggcgatgaagaagaaggtcaaagtgaggaggaagagtatgaggtagaacaagatgaagatgactctcaagaagaggaagaagtcagcctacccaaacgaggaagaccacaagttagattgccagttaaaacaagagggaaacttagctcttctttctcaagtcgtggccaacaacaagaacctggaagatacccttcaaggagtcagcagagcacacccaaaacaactgtttcttctaaaactggtagaagcctaagaaagataaactctgctcctcctacagaaacaaaatctttaagaattgccagtcgttctactcgccacagtcatggcccactgcaagcagatgtatttgtggaattgcttagtcctcgtagaaaacgcagaggcaggaaaagtgctaataatacaccagaaaatagtcccaacttccctaacttcagagtcattgccacaaagtcaagtgaacagtcaagatctgtaaatattgcttcaaaactttctctccaagagagtgaatccaaaagaagatgcagaaaaagacaatctccagagccatcgcctgtgacactgggtcgaaggagttctggccgacagggaggagttcatgaattgtctgcttttgaacaacttgttgtagaattggtacgacatgatgacagctggccttttttgaaacttgtttctaaaatccaggtcccagactactatgacatcatcaaaaagcccattgccttaaatataattcgtgaaaaagtgaataagtgtgaatataaattagcatctgagtttattgatgacattgagttaatgttttcgaactgctttgaatacaaccctcgtaacacaagtgaagcaaaagctggaactaggcttcaagcattttttcatattcaggctcaaaagcttggactccacgtcacacccagtaatgtggaccaagttagcacaccaccggctgcgaaaaagtcacgaatctgactttgtccttctaaaggatatatttgaagaaaaacaaattgttcatgaaaatggaacattaaatcatgctgtataaagcaataacaattgattgaccacatgaaagtgtggcctgcactatattctcaattttaatattaagcactcaggagaatgtaggaaagatatcctttgctacagttttgttcagtatctaataagtttgatagatgtattggatacagtactggtttacagaggtttttgtacatttttgagatcattcatgtgtccagagatcttggaaaatattttttcacccacgatttattttgttattgatgatttttttttaaagtggtggtattaagggagagttatctacatggatgagtcttccgctatagcacagtttagaaaaggtgtttatgtcttaattaattgtttgagtacattctttcaacactacacatgaatgaatccaatcttataaccttgaagtgctgtaccagtgctggctgcaggtattaagtccaagtttattaactagatatttatttagtattgagagtaatttgtgaatttgttttgtatttataaaatttatacctgaaaaatgttccttaatgttttaaaccttttactgtgtttttattcctctaacttccttaatgatcaatcaaaaaaagtaacaccctccctttttcctgacagttctttcagctttacagaactgtattataagtttctatgtataactttttaactgtacaaataaaataacattttttca

SEQ ID NO: 307251 - DNA, 7260 bp, Homo sapiens
taacgcctttcacaaatgtttattttgctaggtgtatgaacagttaaagccagcctgaaagataaaaaatactaactcttgatttcgatttcttacattttctgctccaaagtacaaaggaacttaaatttgaagttataaaacggatcccacattgtttctgtaattatcatttcgcagtattggtaataggaataacatctttgtcgaataaccattcctaaaacttacttttagactcattcttacatattaatttgcaaataagcaaatgttaaggacagtatcaaaaaagactttaaaacacatctagtgaacgttctgagttacttctagtttcgaaaattctattgaattccaaggtcacatgtattatgtacattaaacttgtttccctaaataaaagttactgatatgggaaagttgctttaggggaattttcgctagtaaatccataatccttaaaattctaagtgaattaaacattgatactttgcaaatatttacagcagtgtaaatattactttttaaaggtgcgttagtttcaagaatgctggggtcctacaagcatgatgacactttgtaacacatactttttttttggtcttttcctctgctttctaaatctcttaattgccataagtattaaatagaactgatgtcaaggtatcttctgttcaagatggatgtttactaaacatgcaaagtatttttagagatatagattctaatttggaagaagaaaaatagcaacaaattttcttattcatttcttttctcatctttaaaatacaagttaaatcgtaattggaatcccttttcccatcgtgtagtcaagagtctgtgccagacttgaaggctttactttgttagccatgtgtttatgaacccccagcgctttccctagatcttttggctgataatctcaaacatggaggatgcttctgaatcttcacgaggggttgctccattaattaataatgtagttctcccaggctctccgctgtctcttcctgtatcagtgacaggctgtaaaagtcatcgagtagccaataaaaaggtagaagcgaggagtgaaaagctcctcccaacagctcttcctccttcagagccgaaagtagatcagaaacttcccaggagctccgagagggcagtggcagcgggagaagcggcagccaggggcgcggcggggccggagagaggcggtcccctgggaggacggggtctcccctcgttgcctttgtagtggagaaggtggacaagtggcagtcggcgtgatcgcaggtgagggtcgctcgggagccggccggcgccggcggggaagtggaggcgagccgggaacaaagcggagcagctccggggtccgcccgcggcgagcgctctggcggcgttgggctggccggccggccagctgcgcgccgagcacgttgtgagcctggcggcggcggcgggcgaggagccggcgctgggggagggggccgccgccgctcccgcactgccccccgcggcggggcgtcctgccccattgtgaggcggcggcaggacgagaggaggtagggcgcgctcggggggcaggggcggcggcggctccgctcgctcgacacccgggcagcggcaggaacgaactcggctccggtagcggccgcggcgcgtcagtcacacaaaaggcagccgagcttctcccagcgcgcggaccggcccacgctgccgccgagggctccccaccttaccggctttcctttccctccaattttgatagggaagcggggccggcgcgggcggccgagggtccaggcgagcccgcgggcggacgggagatgccgctgctacaccgaaagccgtttgtgagacagaagccgcccgcggacctgcggcccgacgaggaagttttctactgtaaagtcaccaacgagatcttccgccactacgatgacttttttgaacgaaccattctgtgcaacagccttgtgtggagttgtgctgtgacgggtagacctggactgacgtatcaggaagcacttgagtcagaaaaaaaagcaagacagaatcttcagagttttccagaaccactaattattccagttttatacttgaccagccttacccatcgttcgcgcttacatgaaatttgtgatgatatctttgcatatgtcaaggatcgatattttgtcgaagaaactgtggaagtcattaggaacaatggtgcaaggttgcagtgtaggattttggaagtcctccctccatcacatcaaaatggttttgctaatggacatgttaacagtgtggatggagaaactattatcatcagtgatagtgatgattcagaaacacaaagctgttcttttcaaaatgggaagaaaaaagatgcaattgatcccttactattcaagtataaagtgcaacccactaaaaaagaattacatgagtctgctattgttaaagcaacacaaatcagccggagaaaacacctattttctcgtgataaactaaagctttttctgaagcaacactgtgaaccacaagatggagtcattaaaataaaggcatcatctctttcaacgtataaaatagcagaacaagatttttcttatttcttccctgatgatccacccacatttatcttcagtcctgctaacagacgaagagggagacctcccaaacgaatacatattagtcaagaggacaatgttgctaataaacagactcttgcaagttataggagcaaagctactaaagaaagagataaacttttgaaacaagaagaaatgaagtcactggcttttgaaaaggctaaattaaaaagagaaaaagcagatgccctagaagcgaagaaaaaagaaaaagaagataaagagaaaaagagggaagaattgaaaaaaattgttgaagaagagagactaaagaaaaaagaagaaaaagagaggcttaaagtagaaagagaaaaggaaagagagaagttacgtgaagaaaagcgaaagtatgtggaatacttaaaacagtggagtaaacctagagaagatatggaatgtgatgaccttaaggaacttccagaaccaacaccagtgaaaactagactacctcctgaaatctttggtgatgctctgatggttttggagttccttaatgcatttggggaactttttgatcttcaagatgagtttcctgatggagtaaccctagaagtattagaggaagctcttgtaggaaatgacagtgaaggcccactgtgtgaattgctttttttcttcctgactgcaatcttccaggcaatagctgaagaagaagaggaagtagccaaagagcaactaactgatgctgacaccaaagatttaacagaggctttggatgaagatgcagaccccacaaaatctgcactgtctgcagttgcatctttggcagctgcatggccacagttacaccagggctgcagtttgaaaagtttggatcttgatagctgcactctttcagaaatcctcagactgcacatcttagcttcaggtgctgatgtaacatcagcaaatgcaaagtatagatatcaaaaacgaggaggatttgatgctacagatgatgcttgtatggagcttcgtttgagcaatcccagtctagtgaagaaactgtcaagcacctcagtgtatgatttgacaccaggagaaaaaatgaagatactccatgctctctgtggaaagctactgaccctagtttcaactagggattttattgaagattatgttgatatattacgacaggcaaagcaggagttccgggaattaaaagcagaacaacatcgaaaagagagggaagaagcagctgccagaattcgtaaaaggaaggaagaaaaacttaaggagcaagaacaaaaaatgaaagagaaacaagaaaaactgaaagaagatgagcaaagaaattcaacggcagatatatctattggggaggaagaaagggaagattttgatactagcattgagagcaaagacacagagcaaaaggaattagatcaagatatggtcactgaagatgaagatgacccaggatcacataaaagaggcagaagggggaaaagaggacaaaatggatttaaagaatttacaaggcaagaacagatcaactgtgtaacaagagagcctcttactgctgatgaggaagaagcattaaaacaggaacaccaacgaaaagagaaagagctcttagaaaaaatccaaagtgccatagcctgtaccaatatctttcccttgggtcgcgaccgcatgtatagacgatactggattttcccttctattcctggactctttattgaagaggattattctggtcttactgaagacatgctgttgcctagaccttcatcatttcagaataatgtacagtctcaagatcctcaggtatccactaaaactggagagcctttgatgtctgaatctacctccaacattgaccaaggtccacgtgaccattctgtgcagctgccaaaaccagtgcataagccaaatcggtggtgcttttacagttcttgtgaacagctagaccagcttattgaagctcttaattctagaggacatagagaaagtgccttaaaagaaactttgttacaagagaaaagcagaatatgtgcacagctagcccgtttttctgaagagaaatttcatttttcagacaaacctcagcctgatagcaaaccaacatatagtcggggaagatcttccaatgcatatgatccatctcagatgtgtgcagaaaagcaacttgaactaaggctgagagattttcttttagatattgaagatagaatctaccaaggaacattaggagccatcaaggttacagatcgacatatctggagatcagcattagaaagtggacggtatgagctgttaagtgaggaaaacaaggaaaatgggataattaaaactgtgaatgaagacgtagaagagatggaaattgatgaacaaacaaaggtcatagtaaaagacagacttttggggataaaaacagaaactccaagtactgtatcaacaaatgcaagtacaccacaatcagtgagcagtgtggttcattatctggcaatggcactctttcaaatagagcagggcattgagcggcgttttctgaaagctccacttgatgccagtgacagtgggcgttcttataaaacagttctggaccgttggagagagtctctcctttcttctgctagtctatcccaagtttttcttcacctatccaccttggatcgtagcgtgatatggtctaaatctatactgaatgcgcgttgcaagatatgtcgaaagaaaggcgatgctgaaaacatggttctttgtgatggctgtgataggggtcatcatacctactgtgttcgaccaaagctcaagactgtgcctgaaggagactggttttgtccagaatgtcgaccaaagcaacgttctagaagactctcctctagacagagaccatccttggaaagtgatgaagatgtggaagacagtatgggaggtgaggatgatgaagttgatggcgatgaagaagaaggtcaaagtgaggaggaagagtatgaggtagaacaagatgaagatgactctcaagaagaggaagaagtcagcctacccaaacgaggaagaccacaagttagattgccagttaaaacaagagggaaacttagctcttctttctcaagtcgtggccaacaacaagaacctggaagatacccttcaaggagtcagcagagcacacccaaaacaactgtttcttctaaaactggtagaagcctaagaaagataaactctgctcctcctacagaaacaaaatctttaagaattgccagtcgttctactcgccacagtcatggcccactgcaagcagatgtatttgtggaattgcttagtcctcgtagaaaacgcagaggcaggaaaagtgctaataatacaccagaaaatagtcccaacttccctaacttcagagtcattgccacaaagtcaagtgaacagtcaagatctgtaaatattgcttcaaaactttctctccaagagagtgaatccaaaagaagatgcagaaaaagacaatctccagagccatcgcctgtgacactgggtcgaaggagttctggccgacagggaggagttcatgaattgtctgcttttgaacaacttgttgtagaattggtacgacatgatgacagctggccttttttgaaacttgtttctaaaatccaggtcccagactactatgacatcatcaaaaagcccattgccttaaatataattcgtgaaaaagtgaataagtgtgaatataaattagcatctgagtttattgatgacattgagttaatgttttcgaactgctttgaatacaaccctcgtaacacaagtgaagcaaaagctggaactaggcttcaagcattttttcatattcaggctcaaaagcttggactccacgtcacacccagtaatgtggaccaagttagcacaccaccggctgcgaaaaagtcacgaatctgactttgtccttctaaaggatatatttgaagaaaaacaaattgttcatgaaaatggaacattaaatcatgctgtataaagcaataacaattgattgaccacatgaaagtgtggcctgcactatattctcaattttaatattaagcactcaggagaatgtaggaaagatatcctttgctacagttttgttcagtatctaataagtttgatagatgtattggatacagtactggtttacagaggtttttgtacatttttgagatcattcatgtgtccagagatcttggaaaatattttttcacccacgatttattttgttattgatgatttttttttaaagtggtggtattaagggagagttatctacatggatgagtcttccgctatagcacagtttagaaaaggtgtttatgtcttaattaattgtttgagtacattctttcaacactacacatgaatgaatccaatcttataaccttgaagtgctgtaccagtgctggctgcaggtattaagtccaagtttattaactagatatttatttagtattgagagtaatttgtgaatttgttttgtatttataaaatttatacctgaaaaatgttccttaatgttttaaaccttttactgtgtttttattcctctaacttccttaatgatcaatcaaaaaaagtaacaccctccctttttcctgacagttctttcagctttacagaactgtattataagtttctatgtataactttttaactgtacaaataaaataacattttttca

SEQ ID NO: 307252 - DNA, 6807 bp, Homo sapiens
taacgcctttcacaaatgtttattttgctaggtgtatgaacagttaaagccagcctgaaagataaaaaatactaactcttgatttcgatttcttacattttctgctccaaagtacaaaggaacttaaatttgaagttataaaacggatcccacattgtttctgtaattatcatttcgcagtattggtaataggaataacatctttgtcgaataaccattcctaaaacttacttttagactcattcttacatattaatttgcaaataagcaaatgttaaggacagtatcaaaaaagactttaaaacacatctagtgaacgttctgagttacttctagtttcgaaaattctattgaattccaaggtcacatgtattatgtacattaaacttgtttccctaaataaaagttactgatatgggaaagttgctttaggggaattttcgctagtaaatccataatccttaaaattctaagtgaattaaacattgatactttgcaaatatttacagcagtgtaaatattactttttaaaggtgcgttagtttcaagaatgctggggtcctacaagcatgatgacactttgtaacacatactttttttttggtcttttcctctgctttctaaatctcttaattgccataagtattaaatagaactgatgtcaaggtatcttctgttcaagatggatgtttactaaacatgcaaagtatttttagagatatagattctaatttggaagaagaaaaatagcaacaaattttcttattcatttcttttctcatctttaaaatacaagttaaatcgtaattggaatcccttttcccatcgtgtagtcaagagtctgtgccagacttgaaggctttactttgttagccatgtgtttatgaacccccagcgctttccctagatcttttggctgataatctcaaacatggaggatgcttctgaatcttcacgaggggttgctccattaattaataatgtagttctcccaggctctccgctgtctcttcctgtatcagtgacaggctgtaaaagtcatcgagtagccaataaaaaggtagaagcgaggagtgaaaagctcctcccaacagctcttcctccttcagagccgaaagtagatcagaaacttcccaggagctccgagaggcggggaagtggcggtgggacgcaattccccgcgcggagtcgggcagtggcagcgggagaagcggcagccaggggcgcggcggggccggagagaggcggtcccctgggaggacggggtctcccctcgttgcctttgtagtggagaaggtggacaagtggcagtcggcgtgatcgcagggaagcggggccggcgcgggcggccgagggtccaggcgagcccgcgggcggaccgaaagccgtttgtgagacagaagccgcccgcggacctgcggcccgacgaggaagttttctactgtaaagtcaccaacgagatcttccgccactacgatgacttttttgaacgaaccattctgtgcaacagccttgtgtggagttgtgctgtgacgggtagacctggactgacgtatcaggaagcacttgagtcagaaaaaaaagcaagacagaatcttcagagttttccagaaccactaattattccagttttatacttgaccagccttacccatcgttcgcgcttacatgaaatttgtgatgatatctttgcatatgtcaaggatcgatattttgtcgaagaaactgtggaagtcattaggaacaatggtgcaaggttgcagtgtaggattttggaagtcctccctccatcacatcaaaatggttttgctaatggacatgttaacagtgtggatggagaaactattatcatcagtgatagtgatgattcagaaacacaaagctgttcttttcaaaatgggaagaaaaaagatgcaattgatcccttactattcaagtataaagtgcaacccactaaaaaagaattacatgagtctgctattgttaaagcaacacaaatcagccggagaaaacacctattttctcgtgataaactaaagctttttctgaagcaacactgtgaaccacaagatggagtcattaaaataaaggcatcatctctttcaacgtataaaatagcagaacaagatttttcttatttcttccctgatgatccacccacatttatcttcagtcctgctaacagacgaagagggagacctcccaaacgaatacatattagtcaagaggacaatgttgctaataaacagactcttgcaagttataggagcaaagctactaaagaaagagataaacttttgaaacaagaagaaatgaagtcactggcttttgaaaaggctaaattaaaaagagaaaaagcagatgccctagaagcgaagaaaaaagaaaaagaagataaagagaaaaagagggaagaattgaaaaaaattgttgaagaagagagactaaagaaaaaagaagaaaaagagaggcttaaagtagaaagagaaaaggaaagagagaagttacgtgaagaaaagcgaaagtatgtggaatacttaaaacagtggagtaaacctagagaagatatggaatgtgatgaccttaaggaacttccagaaccaacaccagtgaaaactagactacctcctgaaatctttggtgatgctctgatggttttggagttccttaatgcatttggggaactttttgatcttcaagatgagtttcctgatggagtaaccctagaagtattagaggaagctcttgtaggaaatgacagtgaaggcccactgtgtgaattgctttttttcttcctgactgcaatcttccaggcaatagctgaagaagaagaggaagtagccaaagagcaactaactgatgctgacaccaaagatttaacagaggctttggatgaagatgcagaccccacaaaatctgcactgtctgcagttgcatctttggcagctgcatggccacagttacaccagggctgcagtttgaaaagtttggatcttgatagctgcactctttcagaaatcctcagactgcacatcttagcttcaggtgctgatgtaacatcagcaaatgcaaagtatagatatcaaaaacgaggaggatttgatgctacagatgatgcttgtatggagcttcgtttgagcaatcccagtctagtgaagaaactgtcaagcacctcagtgtatgatttgacaccaggagaaaaaatgaagatactccatgctctctgtggaaagctactgaccctagtttcaactagggattttattgaagattatgttgatatattacgacaggcaaagcaggagttccgggaattaaaagcagaacaacatcgaaaagagagggaagaagcagctgccagaattcgtaaaaggaaggaagaaaaacttaaggagcaagaacaaaaaatgaaagagaaacaagaaaaactgaaagaagatgagcaaagaaattcaacggcagatatatctattggggaggaagaaagggaagattttgatactagcattgagagcaaagacacagagcaaaaggaattagatcaagatatggtcactgaagatgaagatgacccaggatcacataaaagaggcagaagggggaaaagaggacaaaatggatttaaagaatttacaaggcaagaacagatcaactgtgtaacaagagagcctcttactgctgatgaggaagaagcattaaaacaggaacaccaacgaaaagagaaagagctcttagaaaaaatccaaagtgccatagcctgtaccaatatctttcccttgggtcgcgaccgcatgtatagacgatactggattttcccttctattcctggactctttattgaagaggattattctggtcttactgaagacatgctgttgcctagaccttcatcatttcagaataatgtacagtctcaagatcctcaggtatccactaaaactggagagcctttgatgtctgaatctacctccaacattgaccaaggtccacgtgaccattctgtgcagctgccaaaaccagtgcataagccaaatcggtggtgcttttacagttcttgtgaacagctagaccagcttattgaagctcttaattctagaggacatagagaaagtgccttaaaagaaactttgttacaagagaaaagcagaatatgtgcacagctagcccgtttttctgaagagaaatttcatttttcagacaaacctcagcctgatagcaaaccaacatatagtcggggaagatcttccaatgcatatgatccatctcagatgtgtgcagaaaagcaacttgaactaaggctgagagattttcttttagatattgaagatagaatctaccaaggaacattaggagccatcaaggttacagatcgacatatctggagatcagcattagaaagtggacggtatgagctgttaagtgaggaaaacaaggaaaatgggataattaaaactgtgaatgaagacgtagaagagatggaaattgatgaacaaacaaaggtcatagtaaaagacagacttttggggataaaaacagaaactccaagtactgtatcaacaaatgcaagtacaccacaatcagtgagcagtgtggttcattatctggcaatggcactctttcaaatagagcagggcattgagcggcgttttctgaaagctccacttgatgccagtgacagtgggcgttcttataaaacagttctggaccgttggagagagtctctcctttcttctgctagtctatcccaagtttttcttcacctatccaccttggatcgtagcgtgatatggtctaaatctatactgaatgcgcgttgcaagatatgtcgaaagaaaggcgatgctgaaaacatggttctttgtgatggctgtgataggggtcatcatacctactgtgttcgaccaaagctcaagactgtgcctgaaggagactggttttgtccagaatgtcgaccaaagcaacgttctagaagactctcctctagacagagaccatccttggaaagtgatgaagatgtggaagacagtatgggaggtgaggatgatgaagttgatggcgatgaagaagaaggtcaaagtgaggaggaagagtatgaggtagaacaagatgaagatgactctcaagaagaggaagaagtcagcctacccaaacgaggaagaccacaagttagattgccagttaaaacaagagggaaacttagctcttctttctcaagtcgtggccaacaacaagaacctggaagatacccttcaaggagtcagcagagcacacccaaaacaactgtttcttctaaaactggtagaagcctaagaaagataaactctgctcctcctacagaaacaaaatctttaagaattgccagtcgttctactcgccacagtcatggcccactgcaagcagatgtatttgtggaattgcttagtcctcgtagaaaacgcagaggcaggaaaagtgctaataatacaccagaaaatagtcccaacttccctaacttcagagtcattgccacaaagtcaagtgaacagtcaagatctgtaaatattgcttcaaaactttctctccaagagagtgaatccaaaagaagatgcagaaaaagacaatctccagagccatcgcctgtgacactgggtcgaaggagttctggccgacagggaggagttcatgaattgtctgcttttgaacaacttgttgtagaattggtacgacatgatgacagctggccttttttgaaacttgtttctaaaatccaggtcccagactactatgacatcatcaaaaagcccattgccttaaatataattcgtgaaaaagtgaataagtgtgaatataaattagcatctgagtttattgatgacattgagttaatgttttcgaactgctttgaatacaaccctcgtaacacaagtgaagcaaaagctggaactaggcttcaagcattttttcatattcaggctcaaaagcttggactccacgtcacacccagtaatgtggaccaagttagcacaccaccggctgcgaaaaagtcacgaatctgactttgtccttctaaaggatatatttgaagaaaaacaaattgttcatgaaaatggaacattaaatcatgctgtataaagcaataacaattgattgaccacatgaaagtgtggcctgcactatattctcaattttaatattaagcactcaggagaatgtaggaaagatatcctttgctacagttttgttcagtatctaataagtttgatagatgtattggatacagtactggtttacagaggtttttgtacatttttgagatcattcatgtgtccagagatcttggaaaatattttttcacccacgatttattttgttattgatgatttttttttaaagtggtggtattaagggagagttatctacatggatgagtcttccgctatagcacagtttagaaaaggtgtttatgtcttaattaattgtttgagtacattctttcaacactacacatgaatgaatccaatcttataaccttgaagtgctgtaccagtgctggctgcaggtattaagtccaagtttattaactagatatttatttagtattgagagtaatttgtgaatttgttttgtatttataaaatttatacctgaaaaatgttccttaatgttttaaaccttttactgtgtttttattcctctaacttccttaatgatcaatcaaaaaaagtaacaccctccctttttcctgacagttctttcagctttacagaactgtattataagtttctatgtataactttttaactgtacaaataaaataacattttttca

SEQ ID NO: 307253 - DNA, 5624 bp, Homo sapiens
ttagctgcttaaagttttcagtttttcactgaaaagcagatggaactcaaagtctggttttgactgatgtacctttaaattgcaaaatataaatatttagtttaaatatactttttcttatgtttgtattaatgttataagttgaccagttaccaaacccttgagttctgtgagtctacataaaattttgcattaaaggcacaaaaataacctgataatgctatcagtttttaatgtaaaatttgtgaaatgataggtaatgggcttttgtttttgtttttgttttttaatcagtgacttttttgaacgaaccattctgtgcaacagccttgtgtggagttgtgctgtgacgggtagacctggactgacgtatcaggaagcacttgagtcagaaaaaaaagcaagacagaatcttcagagttttccagaaccactaattattccagttttatacttgaccagccttacccatcgttcgcgcttacatgaaatttgtgatgatatctttgcatatgtcaaggatcgatattttgtcgaagaaactgtggaagtcattaggaacaatggtgcaaggttgcagtgtaggattttggaagtcctccctccatcacatcaaaatggttttgctaatggacatgttaacagtgtggatggagaaactattatcatcagtgatagtgatgattcagaaacacaaagctgttcttttcaaaatgggaagaaaaaagatgcaattgatcccttactattcaagtataaagtgcaacccactaaaaaagaattacatgagtctgctattgttaaagcaacacaaatcagccggagaaaacacctattttctcgtgataaactaaagctttttctgaagcaacactgtgaaccacaagatggagtcattaaaataaaggcatcatctctttcaacgtataaaatagcagaacaagatttttcttatttcttccctgatgatccacccacatttatcttcagtcctgctaacagacgaagagggagacctcccaaacgaatacatattagtcaagaggacaatgttgctaataaacagactcttgcaagttataggagcaaagctactaaagaaagagataaacttttgaaacaagaagaaatgaagtcactggcttttgaaaaggctaaattaaaaagagaaaaagcagatgccctagaagcgaagaaaaaagaaaaagaagataaagagaaaaagagggaagaattgaaaaaaattgttgaagaagagagactaaagaaaaaagaagaaaaagagaggcttaaagtagaaagagaaaaggaaagagagaagttacgtgaagaaaagcgaaagtatgtggaatacttaaaacagtggagtaaacctagagaagatatggaatgtgatgaccttaaggaacttccagaaccaacaccagtgaaaactagactacctcctgaaatctttggtgatgctctgatggttttggagttccttaatgcatttggggaactttttgatcttcaagatgagtttcctgatggagtaaccctagaagtattagaggaagctcttgtaggaaatgacagtgaaggcccactgtgtgaattgctttttttcttcctgactgcaatcttccaggcaatagctgaagaagaagaggaagtagccaaagagcaactaactgatgctgacaccaaagatttaacagaggctttggatgaagatgcagaccccacaaaatctgcactgtctgcagttgcatctttggcagctgcatggccacagttacaccagggctgcagtttgaaaagtttggatcttgatagctgcactctttcagaaatcctcagactgcacatcttagcttcaggtgctgatgtaacatcagcaaatgcaaagtatagatatcaaaaacgaggaggatttgatgctacagatgatgcttgtatggagcttcgtttgagcaatcccagtctagtgaagaaactgtcaagcacctcagtgtatgatttgacaccaggagaaaaaatgaagatactccatgctctctgtggaaagctactgaccctagtttcaactagggattttattgaagattatgttgatatattacgacaggcaaagcaggagttccgggaattaaaagcagaacaacatcgaaaagagagggaagaagcagctgccagaattcgtaaaaggaaggaagaaaaacttaaggagcaagaacaaaaaatgaaagagaaacaagaaaaactgaaagaagatgagcaaagaaattcaacggcagatatatctattggggaggaagaaagggaagattttgatactagcattgagagcaaagacacagagcaaaaggaattagatcaagatatggtcactgaagatgaagatgacccaggatcacataaaagaggcagaagggggaaaagaggacaaaatggatttaaagaatttacaaggcaagaacagatcaactgtgtaacaagagagcctcttactgctgatgaggaagaagcattaaaacaggaacaccaacgaaaagagaaagagctcttagaaaaaatccaaagtgccatagcctgtaccaatatctttcccttgggtcgcgaccgcatgtatagacgatactggattttcccttctattcctggactctttattgaagaggattattctggtcttactgaagacatgctgttgcctagaccttcatcatttcagaataatgtacagtctcaagatcctcaggtatccactaaaactggagagcctttgatgtctgaatctacctccaacattgaccaaggtccacgtgaccattctgtgcagctgccaaaaccagtgcataagccaaatcggtggtgcttttacagttcttgtgaacagctagaccagcttattgaagctcttaattctagaggacatagagaaagtgccttaaaagaaactttgttacaagagaaaagcagaatatgtgcacagctagcccgtttttctgaagagaaatttcatttttcagacaaacctcagcctgatagcaaaccaacatatagtcggggaagatcttccaatgcatatgatccatctcagatgtgtgcagaaaagcaacttgaactaaggctgagagattttcttttagatattgaagatagaatctaccaaggaacattaggagccatcaaggttacagatcgacatatctggagatcagcattagaaagtggacggtatgagctgttaagtgaggaaaacaaggaaaatgggataattaaaactgtgaatgaagacgtagaagagatggaaattgatgaacaaacaaaggtcatagtaaaagacagacttttggggataaaaacagaaactccaagtactgtatcaacaaatgcaagtacaccacaatcagtgagcagtgtggttcattatctggcaatggcactctttcaaatagagcagggcattgagcggcgttttctgaaagctccacttgatgccagtgacagtgggcgttcttataaaacagttctggaccgttggagagagtctctcctttcttctgctagtctatcccaagtttttcttcacctatccaccttggatcgtagcgtgatatggtctaaatctatactgaatgcgcgttgcaagatatgtcgaaagaaaggcgatgctgaaaacatggttctttgtgatggctgtgataggggtcatcatacctactgtgttcgaccaaagctcaagactgtgcctgaaggagactggttttgtccagaatgtcgaccaaagcaacgttctagaagactctcctctagacagagaccatccttggaaagtgatgaagatgtggaagacagtatgggaggtgaggatgatgaagttgatggcgatgaagaagaaggtcaaagtgaggaggaagagtatgaggtagaacaagatgaagatgactctcaagaagaggaagaagtcagcctacccaaacgaggaagaccacaagttagattgccagttaaaacaagagggaaacttagctcttctttctcaagtcgtggccaacaacaagaacctggaagatacccttcaaggagtcagcagagcacacccaaaacaactgtttcttctaaaactggtagaagcctaagaaagataaactctgctcctcctacagaaacaaaatctttaagaattgccagtcgttctactcgccacagtcatggcccactgcaagcagatgtatttgtggaattgcttagtcctcgtagaaaacgcagaggcaggaaaagtgctaataatacaccagaaaatagtcccaacttccctaacttcagagtcattgccacaaagtcaagtgaacagtcaagatctgtaaatattgcttcaaaactttctctccaagagagtgaatccaaaagaagatgcagaaaaagacaatctccagagccatcgcctgtgacactgggtcgaaggagttctggccgacagggaggagttcatgaattgtctgcttttgaacaacttgttgtagaattggtacgacatgatgacagctggccttttttgaaacttgtttctaaaatccaggtcccagactactatgacatcatcaaaaagcccattgccttaaatataattcgtgaaaaagtgaataagtgtgaatataaattagcatctgagtttattgatgacattgagttaatgttttcgaactgctttgaatacaaccctcgtaacacaagtgaagcaaaagctggaactaggcttcaagcattttttcatattcaggctcaaaagcttggactccacgtcacacccagtaatgtggaccaagttagcacaccaccggctgcgaaaaagtcacgaatctgactttgtccttctaaaggatatatttgaagaaaaacaaattgttcatgaaaatggaacattaaatcatgctgtataaagcaataacaattgattgaccacatgaaagtgtggcctgcactatattctcaattttaatattaagcactcaggagaatgtaggaaagatatcctttgctacagttttgttcagtatctaataagtttgatagatgtattggatacagtactggtttacagaggtttttgtacatttttgagatcattcatgtgtccagagatcttggaaaatattttttcacccacgatttattttgttattgatgatttttttttaaagtggtggtattaagggagagttatctacatggatgagtcttccgctatagcacagtttagaaaaggtgtttatgtcttaattaattgtttgagtacattctttcaacactacacatgaatgaatccaatcttataaccttgaagtgctgtaccagtgctggctgcaggtattaagtccaagtttattaactagatatttatttagtattgagagtaatttgtgaatttgttttgtatttataaaatttatacctgaaaaatgttccttaatgttttaaaccttttactgtgtttttattcctctaacttccttaatgatcaatcaaaaaaagtaacaccctccctttttcctgacagttctttcagctttacagaactgtattataagtttctatgtataactttttaactgtacaaataaaataacattttttca

SEQ ID NO: 307254 - DNA, 4740 bp, Homo sapiens
  misc_feature (139)..(139): n is a, c, g, or t
  misc_feature (144)..(144): n is a, c, g, or t
gtaacaagagagcctcttactgctgatgaggaagaagcattaaaacaggaacaccaacgaaaagagaaagagctcttagaaaaaatccaaagtgccatagcctgtaccaatatctttcccttgggtcgcgacctcccanacgantacatattagtcaagaggacaatgttgctaataaacagactcttgcaagttataggagcaaagctactaaagaaagagataaacttttgaaacaagaagaaatgaagtcactggcttttgaaaaggctaaattaaaaagagaaaaagcagatgccctagaagcgaagaaaaaagaaaaagaagataaagagaaaaagagggaagaattgaaaaaaattgttgaagaagagagactaaagaaaaaagaagaaaaagagaggcttaaagtagaaagagaaaaggaaagagagaagttacgtgaagaaaagcgaaagtatgtggaatacttaaaacagtggagtaaacctagagaagatatggaatgtgatgaccttaaggaacttccagaaccaacaccagtgaaaactagactacctcctgaaatctttggtgatgctctgatggttttggagttccttaatgcatttggggaactttttgatcttcaagatgagtttcctgatggagtaaccctagaagtattagaggaagctcttgtaggaaatgacagtgaaggcccactgtgtgaattgctttttttcttcctgactgcaatcttccaggcaatagctgaagaagaagaggaagtagccaaagagcaactaactgatgctgacaccaaagatttaacagaggctttggatgaagatgcagaccccacaaaatctgcactgtctgcagttgcatctttggcagctgcatggccacagttacaccagggctgcagtttgaaaagtttggatcttgatagctgcactctttcagaaatcctcagactgcacatcttagcttcaggtgctgatgtaacatcagcaaatgcaaagtatagatatcaaaaacgaggaggatttgatgctacagatgatgcttgtatggagcttcgtttgagcaatcccagtctagtgaagaaactgtcaagcacctcagtgtatgatttgacaccaggagaaaaaatgaagatactccatgctctctgtggaaagctactgaccctagtttcaactagggattttattgaagattatgttgatatattacgacaggcaaagcaggagttccgggaattaaaagcagaacaacatcgaaaagagagggaagaagcagctgccagaattcgtaaaaggaaggaagaaaaacttaaggagcaagaacaaaaaatgaaagagaaacaagaaaaactgaaagaagatgagcaaagaaattcaacggcagatatatctattggggaggaagaaagggaagattttgatactagcattgagagcaaagacacagagcaaaaggaattagatcaagatatggtcactgaagatgaagatgacccaggatcacataaaagaggcagaagggggaaaagaggacaaaatggatttaaagaatttacaaggcaagaacagatcaactgtgtaacaagagagcctcttactgctgatgaggaagaagcattaaaacaggaacaccaacgaaaagagaaagagctcttagaaaaaatccaaagtgccatagcctgtaccaatatctttcccttgggtcgcgaccgcatgtatagacgatactggattttcccttctattcctggactctttattgaagaggattattctggtcttactgaagacatgctgttgcctagaccttcatcatttcagaataatgtacagtctcaagatcctcaggtatccactaaaactggagagcctttgatgtctgaatctacctccaacattgaccaaggtccacgtgaccattctgtgcagctgccaaaaccagtgcataagccaaatcggtggtgcttttacagttcttgtgaacagctagaccagcttattgaagctcttaattctagaggacatagagaaagtgccttaaaagaaactttgttacaagagaaaagcagaatatgtgcacagctagcccgtttttctgaagagaaatttcatttttcagacaaacctcagcctgatagcaaaccaacatatagtcggggaagatcttccaatgcatatgatccatctcagatgtgtgcagaaaagcaacttgaactaaggctgagagattttcttttagatattgaagatagaatctaccaaggaacattaggagccatcaaggttacagatcgacatatctggagatcagcattagaaagtggacggtatgagctgttaagtgaggaaaacaaggaaaatgggataattaaaactgtgaatgaagacgtagaagagatggaaattgatgaacaaacaaaggtcatagtaaaagacagacttttggggataaaaacagaaactccaagtactgtatcaacaaatgcaagtacaccacaatcagtgagcagtgtggttcattatctggcaatggcactctttcaaatagagcagggcattgagcggcgttttctgaaagctccacttgatgccagtgacagtgggcgttcttataaaacagttctggaccgttggagagagtctctcctttcttctgctagtctatcccaagtttttcttcacctatccaccttggatcgtagcgtgatatggtctaaatctatactgaatgcgcgttgcaagatatgtcgaaagaaaggcgatgctgaaaacatggttctttgtgatggctgtgataggggtcatcatacctactgtgttcgaccaaagctcaagactgtgcctgaaggagactggttttgtccagaatgtcgaccaaagcaacgttctagaagactctcctctagacagagaccatccttggaaagtgatgaagatgtggaagacagtatgggaggtgaggatgatgaagttgatggcgatgaagaagaaggtcaaagtgaggaggaagagtatgaggtagaacaagatgaagatgactctcaagaagaggaagaagtcagcctacccaaacgaggaagaccacaagttagattgccagttaaaacaagagggaaacttagctcttctttctcaagtcgtggccaacaacaagaacctggaagatacccttcaaggagtcagcagagcacacccaaaacaactgtttcttctaaaactggtagaagcctaagaaagataaactctgctcctcctacagaaacaaaatctttaagaattgccagtcgttctactcgccacagtcatggcccactgcaagcagatgtatttgtggaattgcttagtcctcgtagaaaacgcagaggcaggaaaagtgctaataatacaccagaaaatagtcccaacttccctaacttcagagtcattgccacaaagtcaagtgaacagtcaagatctgtaaatattgcttcaaaactttctctccaagagagtgaatccaaaagaagatgcagaaaaagacaatctccagagccatcgcctgtgacactgggtcgaaggagttctggccgacagggaggagttcatgaattgtctgcttttgaacaacttgttgtagaattggtacgacatgatgacagctggccttttttgaaacttgtttctaaaatccaggtcccagactactatgacatcatcaaaaagcccattgccttaaatataattcgtgaaaaagtgaataagtgtgaatataaattagcatctgagtttattgatgacattgagttaatgttttcgaactgctttgaatacaaccctcgtaacacaagtgaagcaaaagctggaactaggcttcaagcattttttcatattcaggctcaaaagcttggactccacgtcacacccagtaatgtggaccaagttagcacaccaccggctgcgaaaaagtcacgaatctgactttgtccttctaaaggatatatttgaagaaaaacaaattgttcatgaaaatggaacattaaatcatgctgtataaagcaataacaattgattgaccacatgaaagtgtggcctgcactatattctcaattttaatattaagcactcaggagaatgtaggaaagatatcctttgctacagttttgttcagtatctaataagtttgatagatgtattggatacagtactggtttacagaggtttttgtacatttttgagatcattcatgtgtccagagatcttggaaaatattttttcacccacgatttattttgttattgatgatttttttttaaagtggtggtattaagggagagttatctacatggatgagtcttccgctatagcacagtttagaaaaggtgtttatgtcttaattaattgtttgagtacattctttcaacactacacatgaatgaatccaatcttataaccttgaagtgctgtaccagtgctggctgcaggtattaagtccaagtttattaactagatatttatttagtattgagagtaatttgtgaatttgttttgtatttataaaatttatacctgaaaaatgttccttaatgttttaaaccttttactgtgtttttattcctctaacttccttaatgatcaatcaaaaaaagtaacaccctccctttttcctgacagttctttcagctttacagaactgtattataagtttctatgtataactttttaactgtacaaataaaataacattttttca

SEQ ID NO: 307255 - DNA, 4938 bp, Homo sapiens
aagtttgagtttccagggcttacaaactggggctattttgtttgattcacacagccttttaaaacattgcttcccaaacttgaatgtacatatgaatcacttggggatcttgtcaaaatgatgaagattctaaattagtaggtctggtgggggaatgagattctgcattttttaacaaggtgatgataaccttgctgctggtcttcagatcacactttgggtattagggctttcaaaggcacagatatgtttgtcccagtactgtagtttgtcataaacttagccaatttgcttttcctgttttaataatctgctggctccctgtaggaattttaagagtctctactaatctcatttaactttaaattatttcaaggattctgttgttacatcaaaaaaattgccaagtgttattttgtctatatatatagttctaagtttgatttttcttcacagcttttgaaaaggctaaattaaaaagagaaaaagcagatgccctagaagcgaagaaaaaagaaaaagaagataaagagaaaaagagggaagaattgaaaaaaattgttgaagaagagagactaaagaaaaaagaagaaaaagagaggcttaaagtagaaagagaaaaggaaagagagaagttacgtgaagaaaagcgaaagtatgtggaatacttaaaacagtggagtaaacctagagaagatatggaatgtgatgaccttaaggaacttccagaaccaacaccagtgaaaactagactacctcctgaaatctttggtgatgctctgatggttttggagttccttaatgcatttggggaactttttgatcttcaagatgagtttcctgatggagtaaccctagaagtattagaggaagctcttgtaggaaatgacagtgaaggcccactgtgtgaattgctttttttcttcctgactgcaatcttccaggcaatagctgaagaagaagaggaagtagccaaagagcaactaactgatgctgacaccaaagatttaacagaggctttggatgaagatgcagaccccacaaaatctgcactgtctgcagttgcatctttggcagctgcatggccacagttacaccagggctgcagtttgaaaagtttggatcttgatagctgcactctttcagaaatcctcagactgcacatcttagcttcaggtgctgatgtaacatcagcaaatgcaaagtatagatatcaaaaacgaggaggatttgatgctacagatgatgcttgtatggagcttcgtttgagcaatcccagtctagtgaagaaactgtcaagcacctcagtgtatgatttgacaccaggagaaaaaatgaagatactccatgctctctgtggaaagctactgaccctagtttcaactagggattttattgaagattatgttgatatattacgacaggcaaagcaggagttccgggaattaaaagcagaacaacatcgaaaagagagggaagaagcagctgccagaattcgtaaaaggaaggaagaaaaacttaaggagcaagaacaaaaaatgaaagagaaacaagaaaaactgaaagaagatgagcaaagaaattcaacggcagatatatctattggggaggaagaaagggaagattttgatactagcattgagagcaaagacacagagcaaaaggaattagatcaagatatggtcactgaagatgaagatgacccaggatcacataaaagaggcagaagggggaaaagaggacaaaatggatttaaagaatttacaaggcaagaacagatcaactgtgtaacaagagagcctcttactgctgatgaggaagaagcattaaaacaggaacaccaacgaaaagagaaagagctcttagaaaaaatccaaagtgccatagcctgtaccaatatctttcccttgggtcgcgaccgcatgtatagacgatactggattttcccttctattcctggactctttattgaagaggattattctggtcttactgaagacatgctgttgcctagaccttcatcatttcagaataatgtacagtctcaagatcctcaggtatccactaaaactggagagcctttgatgtctgaatctacctccaacattgaccaaggtccacgtgaccattctgtgcagctgccaaaaccagtgcataagccaaatcggtggtgcttttacagttcttgtgaacagctagaccagcttattgaagctcttaattctagaggacatagagaaagtgccttaaaagaaactttgttacaagagaaaagcagaatatgtgcacagctagcccgtttttctgaagagaaatttcatttttcagacaaacctcagcctgatagcaaaccaacatatagtcggggaagatcttccaatgcatatgatccatctcagatgtgtgcagaaaagcaacttgaactaaggctgagagattttcttttagatattgaagatagaatctaccaaggaacattaggagccatcaaggttacagatcgacatatctggagatcagcattagaaagtggacggtatgagctgttaagtgaggaaaacaaggaaaatgggataattaaaactgtgaatgaagacgtagaagagatggaaattgatgaacaaacaaaggtcatagtaaaagacagacttttggggataaaaacagaaactccaagtactgtatcaacaaatgcaagtacaccacaatcagtgagcagtgtggttcattatctggcaatggcactctttcaaatagagcagggcattgagcggcgttttctgaaagctccacttgatgccagtgacagtgggcgttcttataaaacagttctggaccgttggagagagtctctcctttcttctgctagtctatcccaagtttttcttcacctatccaccttggatcgtagcgtgatatggtctaaatctatactgaatgcgcgttgcaagatatgtcgaaagaaaggcgatgctgaaaacatggttctttgtgatggctgtgataggggtcatcatacctactgtgttcgaccaaagctcaagactgtgcctgaaggagactggttttgtccagaatgtcgaccaaagcaacgttctagaagactctcctctagacagagaccatccttggaaagtgatgaagatgtggaagacagtatgggaggtgaggatgatgaagttgatggcgatgaagaagaaggtcaaagtgaggaggaagagtatgaggtagaacaagatgaagatgactctcaagaagaggaagaagtcagcctacccaaacgaggaagaccacaagttagattgccagttaaaacaagagggaaacttagctcttctttctcaagtcgtggccaacaacaagaacctggaagatacccttcaaggagtcagcagagcacacccaaaacaactgtttcttctaaaactggtagaagcctaagaaagataaactctgctcctcctacagaaacaaaatctttaagaattgccagtcgttctactcgccacagtcatggcccactgcaagcagatgtatttgtggaattgcttagtcctcgtagaaaacgcagaggcaggaaaagtgctaataatacaccagaaaatagtcccaacttccctaacttcagagtcattgccacaaagtcaagtgaacagtcaagatctgtaaatattgcttcaaaactttctctccaagagagtgaatccaaaagaagatgcagaaaaagacaatctccagagccatcgcctgtgacactgggtcgaaggagttctggccgacagggaggagttcatgaattgtctgcttttgaacaacttgttgtagaattggtacgacatgatgacagctggccttttttgaaacttgtttctaaaatccaggtcccagactactatgacatcatcaaaaagcccattgccttaaatataattcgtgaaaaagtgaataagtgtgaatataaattagcatctgagtttattgatgacattgagttaatgttttcgaactgctttgaatacaaccctcgtaacacaagtgaagcaaaagctggaactaggcttcaagcattttttcatattcaggctcaaaagcttggactccacgtcacacccagtaatgtggaccaagttagcacaccaccggctgcgaaaaagtcacgaatctgactttgtccttctaaaggatatatttgaagaaaaacaaattgttcatgaaaatggaacattaaatcatgctgtataaagcaataacaattgattgaccacatgaaagtgtggcctgcactatattctcaattttaatattaagcactcaggagaatgtaggaaagatatcctttgctacagttttgttcagtatctaataagtttgatagatgtattggatacagtactggtttacagaggtttttgtacatttttgagatcattcatgtgtccagagatcttggaaaatattttttcacccacgatttattttgttattgatgatttttttttaaagtggtggtattaagggagagttatctacatggatgagtcttccgctatagcacagtttagaaaaggtgtttatgtcttaattaattgtttgagtacattctttcaacactacacatgaatgaatccaatcttataaccttgaagtgctgtaccagtgctggctgcaggtattaagtccaagtttattaactagatatttatttagtattgagagtaatttgtgaatttgttttgtatttataaaatttatacctgaaaaatgttccttaatgttttaaaccttttactgtgtttttattcctctaacttccttaatgatcaatcaaaaaaagtaacaccctccctttttcctgacagttctttcagctttacagaactgtattataagtttctatgtataactttttaactgtacaaataaaataacattttttca

SEQ ID NO: 307256 - DNA, 3874 bp, Homo sapiens
atattctaaatgactatttcatttttaacaactataggctgcagtttgaaaagtttggatcttgatagctgcactctttcagaaatcctcagactgcacatcttagcttcaggtgctgatgtaacatcagcaaatgcaaagtatagatatcaaaaacgaggaggatttgatgctacagatgatgcttgtatggagcttcgtttgagcaatcccagtctagtgaagaaactgtcaagcacctcagtgtatgatttgacaccaggagaaaaaatgaagatactccatgctctctgtggaaagctactgaccctagtttcaactagggattttattgaagattatgttgatatattacgacaggcaaagcaggagttccgggaattaaaagcagaacaacatcgaaaagagagggaagaagcagctgccagaattcgtaaaaggaaggaagaaaaacttaaggagcaagaacaaaaaatgaaagagaaacaagaaaaactgaaagaagatgagcaaagaaattcaacggcagatatatctattggggaggaagaaagggaagattttgatactagcattgagagcaaagacacagagcaaaaggaattagatcaagatatggtcactgaagatgaagatgacccaggatcacataaaagaggcagaagggggaaaagaggacaaaatggatttaaagaatttacaaggcaagaacagatcaactgtgtaacaagagagcctcttactgctgatgaggaagaagcattaaaacaggaacaccaacgaaaagagaaagagctcttagaaaaaatccaaagtgccatagcctgtaccaatatctttcccttgggtcgcgaccgcatgtatagacgatactggattttcccttctattcctggactctttattgaagaggattattctggtcttactgaagacatgctgttgcctagaccttcatcatttcagaataatgtacagtctcaagatcctcaggtatccactaaaactggagagcctttgatgtctgaatctacctccaacattgaccaaggtccacgtgaccattctgtgcagctgccaaaaccagtgcataagccaaatcggtggtgcttttacagttcttgtgaacagctagaccagcttattgaagctcttaattctagaggacatagagaaagtgccttaaaagaaactttgttacaagagaaaagcagaatatgtgcacagctagcccgtttttctgaagagaaatttcatttttcagacaaacctcagcctgatagcaaaccaacatatagtcggggaagatcttccaatgcatatgatccatctcagatgtgtgcagaaaagcaacttgaactaaggctgagagattttcttttagatattgaagatagaatctaccaaggaacattaggagccatcaaggttacagatcgacatatctggagatcagcattagaaagtggacggtatgagctgttaagtgaggaaaacaaggaaaatgggataattaaaactgtgaatgaagacgtagaagagatggaaattgatgaacaaacaaaggtcatagtaaaagacagacttttggggataaaaacagaaactccaagtactgtatcaacaaatgcaagtacaccacaatcagtgagcagtgtggttcattatctggcaatggcactctttcaaatagagcagggcattgagcggcgttttctgaaagctccacttgatgccagtgacagtgggcgttcttataaaacagttctggaccgttggagagagtctctcctttcttctgctagtctatcccaagtttttcttcacctatccaccttggatcgtagcgtgatatggtctaaatctatactgaatgcgcgttgcaagatatgtcgaaagaaaggcgatgctgaaaacatggttctttgtgatggctgtgataggggtcatcatacctactgtgttcgaccaaagctcaagactgtgcctgaaggagactggttttgtccagaatgtcgaccaaagcaacgttctagaagactctcctctagacagagaccatccttggaaagtgatgaagatgtggaagacagtatgggaggtgaggatgatgaagttgatggcgatgaagaagaaggtcaaagtgaggaggaagagtatgaggtagaacaagatgaagatgactctcaagaagaggaagaagtcagcctacccaaacgaggaagaccacaagttagattgccagttaaaacaagagggaaacttagctcttctttctcaagtcgtggccaacaacaagaacctggaagatacccttcaaggagtcagcagagcacacccaaaacaactgtttcttctaaaactggtagaagcctaagaaagataaactctgctcctcctacagaaacaaaatctttaagaattgccagtcgttctactcgccacagtcatggcccactgcaagcagatgtatttgtggaattgcttagtcctcgtagaaaacgcagaggcaggaaaagtgctaataatacaccagaaaatagtcccaacttccctaacttcagagtcattgccacaaagtcaagtgaacagtcaagatctgtaaatattgcttcaaaactttctctccaagagagtgaatccaaaagaagatgcagaaaaagacaatctccagagccatcgcctgtgacactgggtcgaaggagttctggccgacagggaggagttcatgaattgtctgcttttgaacaacttgttgtagaattggtacgacatgatgacagctggccttttttgaaacttgtttctaaaatccaggtcccagactactatgacatcatcaaaaagcccattgccttaaatataattcgtgaaaaagtgaataagtgtgaatataaattagcatctgagtttattgatgacattgagttaatgttttcgaactgctttgaatacaaccctcgtaacacaagtgaagcaaaagctggaactaggcttcaagcattttttcatattcaggctcaaaagcttggactccacgtcacacccagtaatgtggaccaagttagcacaccaccggctgcgaaaaagtcacgaatctgactttgtccttctaaaggatatatttgaagaaaaacaaattgttcatgaaaatggaacattaaatcatgctgtataaagcaataacaattgattgaccacatgaaagtgtggcctgcactatattctcaattttaatattaagcactcaggagaatgtaggaaagatatcctttgctacagttttgttcagtatctaataagtttgatagatgtattggatacagtactggtttacagaggtttttgtacatttttgagatcattcatgtgtccagagatcttggaaaatattttttcacccacgatttattttgttattgatgatttttttttaaagtggtggtattaagggagagttatctacatggatgagtcttccgctatagcacagtttagaaaaggtgtttatgtcttaattaattgtttgagtacattctttcaacactacacatgaatgaatccaatcttataaccttgaagtgctgtaccagtgctggctgcaggtattaagtccaagtttattaactagatatttatttagtattgagagtaatttgtgaatttgttttgtatttataaaatttatacctgaaaaatgttccttaatgttttaaaccttttactgtgtttttattcctctaacttccttaatgatcaatcaaaaaaagtaacaccctccctttttcctgacagttctttcagctttacagaactgtattataagtttctatgtataactttttaactgtacaaataaaataacattttttca

SEQ ID NO: 307257 - DNA, 5908 bp, Homo sapiens
taacgcctttcacaaatgtttattttgctaggtgtatgaacagttaaagccagcctgaaagataaaaaatactaactcttgatttcgatttcttacattttctgctccaaagtacaaaggaacttaaatttgaagttataaaacggatcccacattgtttctgtaattatcatttcgcagtattggtaataggaataacatctttgtcgaataaccattcctaaaacttacttttagactcattcttacatattaatttgcaaataagcaaatgttaaggacagtatcaaaaaagactttaaaacacatctagtgaacgttctgagttacttctagtttcgaaaattctattgaattccaaggtcacatgtattatgtacattaaacttgtttccctaaataaaagttactgatatgggaaagttgctttaggggaattttcgctagtaaatccataatccttaaaattctaagtgaattaaacattgatactttgcaaatatttacagcagtgtaaatattactttttaaaggtgcgttagtttcaagaatgctggggtcctacaagcatgatgacactttgtaacacatactttttttttggtcttttcctctgctttctaaatctcttaattgccataagtattaaatagaactgatgtcaaggtatcttctgttcaagatggatgtttactaaacatgcaaagtatttttagagatatagattctaatttggaagaagaaaaatagcaacaaattttcttattcatttcttttctcatctttaaaatacaagttaaatcgtaattggaatcccttttcccatcgtgtagtcaagagtctgtgccagacttgaaggctttactttgttagccatgtgtttatgaacccccagcgctttccctagatcttttggctgataatctcaaacatggaggatgcttctgaatcttcacgaggggttgctccattaattaataatgtagttctcccaggctctccgctgtctcttcctgtatcagtgacaggctgtaaaagtcatcgagtagccaataaaaaggtagaagcgaggagtgaaaagctcctcccaacagctcttcctccttcagagccgaaagtagatcagaaacttcccaggagctccgagaggcggggaagtggcggtgggacgcaattccccgcgcggagtcgggcagtggcagcgggagaagcggcagccaggggcgcggcggggccggagagaggcggtcccctgggaggacggggtctcccctcgttgcctttgtagtggagaaggtggacaagtggcagtcggcgtgatcgcagggaagcggggccggcgcgggcggccgagggtccaggcgagcccgcgggcggacgggagatgccgctgctacaccgaaagccgtttgtgagacagaagccgcccgcggacctgcggcccgacgaggaagttttctactgtaaagtcaccaacgagatcttccgccactacgatgacttttttgaacgaaccattctgtgcaacagccttgtgtggagttgtgctgtgacgggtagacctggactgacgtatcaggaagcacttgagtcagaaaaaaaagcaagacagaatcttcagagttttccagaaccactaattattccagttttatacttgaccagccttacccatcgttcgcgcttacatgaaatttgtgatgatatctttgcatatgtcaaggatcgatattttgtcgaagaaactgtggaagtcattaggaacaatggtgcaaggttgcagtgtaggattttggaagtcctccctccatcacatcaaaatggttttgctaatggacatgttaacagtgtggatggagaaactattatcatcagtgatagtgatgattcagaaacacaaagctgttcttttcaaaatgggaagaaaaaagatgcaattgatcccttactattcaagtataaagtgcaacccactaaaaaagaattacatgagtctgctattgttaaagcaacacaaatcagccggagaaaacacctattttctcgtgataaactaaagctttttctgaagcaacactgtgaaccacaagatggagtcattaaaataaaggcatcatctctttcaacgtataaaatagcagaacaagatttttcttatttcttccctgatgatccacccacatttatcttcagtcctgctaacagacgaagagggagacctcccaaacgaatacatattagtcaagaggacaatgttgctaataaacagactcttgcaagttataggagcaaagctactaaagaaagagataaacttttgaaacaagaagaaatgaagtcactggcttttgaaaaggctaaattaaaaagagaaaaagcagatgccctagaagcgaagaaaaaagaaaaagaagataaagagaaaaagagggaagaattgaaaaaaattgttgaagaagagagactaaagaaaaaagaagaaaaagagaggcttaaagtagaaagagaaaaggaaagagagaagttacgtgaagaaaagcgaaagtatgtggaatacttaaaacagtggagtaaacctagagaagatatggaatgtgatgaccttaaggaacttccagaaccaacaccagtgaaaactagactacctcctgaaatctttggtgatgctctgatggttttggagttccttaatgcatttggggaactttttgatcttcaagatgagtttcctgatggagtaaccctagaagtattagaggaagctcttgtaggaaatgacagtgaaggcccactgtgtgaattgctttttttcttcctgactgcaatcttccaggcaatagctgaagaagaagaggaagtagccaaagagcaactaactgatgctgacaccaaagatttaacagaggctttggatgaagatgcagaccccacaaaatctgcactgtctgcagttgcatctttggcagctgcatggccacagttacaccagggctgcagtttgaaaagtttggatcttgatagctgcactctttcagaaatcctcagactgcacatcttagcttcaggtgctgatgtaacatcagcaaatgcaaagtatagatatcaaaaacgaggaggatttgatgctacagatgatgcttgtatggagcttcgtttgagcaatcccagtctagtgaagaaactgtcaagcacctcagtgtatgatttgacaccaggagaaaaaatgaagatactccatgctctctgtggaaagctactgaccctagtttcaactagggattttattgaagattatgttgatatattacgacaggcaaagcaggagttccgggaattaaaagcagaacaacatcgaaaagagagggaagaagcagctgccagaattcgtaaaaggaaggaagaaaaacttaaggagcaagaacaaaaaatgaaagagaaacaagaaaaactgaaagaagatgagcaaagaaattcaacggcagatatatctattggggaggaagaaagggaagattttgatactagcattgagagcaaagacacagagcaaaaggaattagatcaagatatggtcactgaagatgaagatgacccaggatcacataaaagaggcagaagggggaaaagaggacaaaatggatttaaagaatttacaaggcaagaacagatcaactgtgtaacaagagagcctcttactgctgatgaggaagaagcattaaaacaggaacaccaacgaaaagagaaagagctcttagaaaaaatccaaagtgccatagcctgtaccaatatctttcccttgggtcgcgaccgcatgtatagacgatactggattttcccttctattcctggactctttattgaagaggattattctggtcttactgaagacatgctgttgcctagaccttcatcatttcagaataatgtacagtctcaagatcctcaggtatccactaaaactggagagcctttgatgtctgaatctacctccaacattgaccaaggtccacgtgaccattctgtgcagctgccaaaaccagtgcataagccaaatcggtggtgcttttacagttcttgtgaacagctagaccagcttattgaagctcttaattctagaggacatagagaaagtgccttaaaagaaactttgttacaagagaaaagcagaatatgtgcacagctagcccgtttttctgaagagaaatttcatttttcagacaaacctcagcctgatagcaaaccaacatatagtcggggaagatcttccaatgcatatgatccatctcagatgtgtgcagaaaagcaacttgaactaaggctgagagattttcttttagatattgaagatagaatctaccaaggaacattaggagccatcaaggttacagatcgacatatctggagatcagcattagaaagtggacggtatgagctgttaagtgaggaaaacaaggaaaatgggataattaaaactgtgaatgaagacgtagaagagatggaaattgatgaacaaacaaaggtcatagtaaaagacagacttttggggataaaaacagaaactccaagtactgtatcaacaaatgcaagtacaccacaatcagtgagcagtgtggttcattatctggcaatggcactctttcaaatagagcagggcattgagcggcgttttctgaaagctccacttgatgccagtgacagtgggcgttcttataaaacagttctggaccgttggagagagtctctcctttcttctgctagtctatcccaagtttttcttcacctatccaccttggatcgtagcgtgatatggtctaaatctatactgaatgcgcgttgcaagatatgtcgaaagaaaggcgatgctgaaaacatggttctttgtgatggctgtgataggggtcatcatacctactgtgttcgaccaaagctcaagactgtgcctgaaggagactggttttgtccagaatgtcgaccaaagcaacgttctagaagactctcctctagacagagaccatccttggaaagtgatgaagatgtggaagacagtatgggaggtgaggatgatgaagttgatggcgatgaagaagaaggtcaaagtgaggaggaagagtatgaggtagaacaagatgaagatgactctcaagaagaggaagaagtcagcctacccaaacgaggaagaccacaagttagattgccagttaaaacaagagggaaacttagctcttctttctcaagtcgtggccaacaacaagaacctggaagatacccttcaaggagtcagcagagcacacccaaaacaactgtttcttctaaaactggtagaagcctaagaaagataaactctgctcctcctacagaaacaaaatctttaagaattgccagtcgttctactcgccacagtcatggcccactgcaagcagatgtatttgtggaattgcttagtcctcgtagaaaacgcagaggcaggaaaagtgctaataatacaccagaaaatagtcccaacttccctaacttcagagtcattgccacaaagtcaagtgaacagtcaagatctgtaaatattgcttcaaaactttctctccaagagagtgaatccaaaagaagatgcagaaaaagacaatctccagagccatcgcctgtgacactgggtcgaaggagttctggccgacagggaggagttcatgaattgtctgcttttgaacaacttgttgtagaattggtacgacatgatgacagctggccttttttgaaacttgtttctaaaatccaggtaattactagacttgataaaatgtattcctgtatattatctgatttagtccacgtgataactttgaagtagtcaaaacacctgttactcactgtctagttttttttgttgttgttgttttttcctgagacagtctca

SEQ ID NO: 307258 - DNA, 5583 bp, Homo sapiens
taacgcctttcacaaatgtttattttgctaggtgtatgaacagttaaagccagcctgaaagataaaaaatactaactcttgatttcgatttcttacattttctgctccaaagtacaaaggaacttaaatttgaagttataaaacggatcccacattgtttctgtaattatcatttcgcagtattggtaataggaataacatctttgtcgaataaccattcctaaaacttacttttagactcattcttacatattaatttgcaaataagcaaatgttaaggacagtatcaaaaaagactttaaaacacatctagtgaacgttctgagttacttctagtttcgaaaattctattgaattccaaggtcacatgtattatgtacattaaacttgtttccctaaataaaagttactgatatgggaaagttgctttaggggaattttcgctagtaaatccataatccttaaaattctaagtgaattaaacattgatactttgcaaatatttacagcagtgtaaatattactttttaaaggtgcgttagtttcaagaatgctggggtcctacaagcatgatgacactttgtaacacatactttttttttggtcttttcctctgctttctaaatctcttaattgccataagtattaaatagaactgatgtcaaggtatcttctgttcaagatggatgtttactaaacatgcaaagtatttttagagatatagattctaatttggaagaagaaaaatagcaacaaattttcttattcatttcttttctcatctttaaaatacaagttaaatcgtaattggaatcccttttcccatcgtgtagtcaagagtctgtgccagacttgaaggctttactttgttagccatgtgtttatgaacccccagcgctttccctagatcttttggctgataatctcaaacatggaggatgcttctgaatcttcacgaggggttgctccattaattaataatgtagttctcccaggctctccgctgtctcttcctgtatcagtgacaggctgtaaaagtcatcgagtagccaataaaaaggtagaagcgaggagtgaaaagctcctcccaacagctcttcctccttcagagccgaaagtagatcagaaacttcccaggagctccgagaggcggggaagtggcggtgggacgcaattccccgcgcggagtcgggcagtggcagcgggagaagcggcagccaggggcgcggcggggccggagagaggcggtcccctgggaggacggggtctcccctcgttgcctttgtagtggagaaggtggacaagtggcagtcggcgtgatcgcagggaagcggggccggcgcgggcggccgagggtccaggcgagcccgcgggcggacgggagatgccgctgctacaccgaaagccgtttgtgagacagaagccgcccgcggacctgcggcccgacgaggaagttttctactgtaaagtcaccaacgagatcttccgccactacgatgacttttttgaacgaaccattctgtgcaacagccttgtgtggagttgtgctgtgacgggtagacctggactgacgtatcaggaagcacttgagtcagaaaaaaaagcaagacagaatcttcagagttttccagaaccactaattattccagttttatacttgaccagccttacccatcgttcgcgcttacatgaaatttgtgatgatatctttgcatatgtcaaggatcgatattttgtcgaagaaactgtggaagtcattaggaacaatggtgcaaggttgcagtgtaggattttggaagtcctccctccatcacatcaaaatggttttgctaatggacatgttaacagtgtggatggagaaactattatcatcagtgatagtgatgattcagaaacacaaagctgttcttttcaaaatgggaagaaaaaagatgcaattgatcccttactattcaagtataaagtgcaacccactaaaaaagaattacatgagtctgctattgttaaagcaacacaaatcagccggagaaaacacctattttctcgtgataaactaaagctttttctgaagcaacactgtgaaccacaagatggagtcattaaaataaaggcatcatctctttcaacgtataaaatagcagaacaagatttttcttatttcttccctgatgatccacccacatttatcttcagtcctgctaacagacgaagagggagacctcccaaacgaatacatattagtcaagaggacaatgttgctaataaacagactcttgcaagttataggagcaaagctactaaagaaagagataaacttttgaaacaagaagaaatgaagtcactggcttttgaaaaggctaaattaaaaagagaaaaagcagatgccctagaagcgaagaaaaaagaaaaagaagataaagagaaaaagagggaagaattgaaaaaaattgttgaagaagagagactaaagaaaaaagaagaaaaagagaggcttaaagtagaaagagaaaaggaaagagagaagttacgtgaagaaaagcgaaagtatgtggaatacttaaaacagtggagtaaacctagagaagatatggaatgtgatgaccttaaggaacttccagaaccaacaccagtgaaaactagactacctcctgaaatctttggtgatgctctgatggttttggagttccttaatgcatttggggaactttttgatcttcaagatgagtttcctgatggagtaaccctagaagtattagaggaagctcttgtaggaaatgacagtgaaggcccactgtgtgaattgctttttttcttcctgactgcaatcttccaggcaatagctgaagaagaagaggaagtagccaaagagcaactaactgatgctgacaccaaagatttaacagaggctttggatgaagatgcagaccccacaaaatctgcactgtctgcagttgcatctttggcagctgcatggccacagttacaccagggctgcagtttgaaaagtttggatcttgatagctgcactctttcagaaatcctcagactgcacatcttagcttcaggtgctgatgtaacatcagcaaatgcaaagtatagatatcaaaaacgaggaggatttgatgctacagatgatgcttgtatggagcttcgtttgagcaatcccagtctagtgaagaaactgtcaagcacctcagtgtatgatttgacaccaggagaaaaaatgaagatactccatgctctctgtggaaagctactgaccctagtttcaactagggattttattgaagattatgttgatatattacgacaggcaaagcaggagttccgggaattaaaagcagaacaacatcgaaaagagagggaagaagcagctgccagaattcgtaaaaggaaggaagaaaaacttaaggagcaagaacaaaaaatgaaagagaaacaagaaaaactgaaagaagatgagcaaagaaattcaacggcagatatatctattggggaggaagaaagggaagattttgatactagcattgagagcaaagacacagagcaaaaggaattagatcaagatatggtcactgaagatgaagatgacccaggatcacataaaagaggcagaagggggaaaagaggacaaaatggatttaaagaatttacaaggcaagaacagatcaactgtgtaacaagagagcctcttactgctgatgaggaagaagcattaaaacaggaacaccaacgaaaagagaaagagctcttagaaaaaatccaaagtgccatagcctgtaccaatatctttcccttgggtcgcgaccgcatgtatagacgatactggattttcccttctattcctggactctttattgaagaggattattctggtcttactgaagacatgctgttgcctagaccttcatcatttcagaataatgtacagtctcaagatcctcaggtatccactaaaactggagagcctttgatgtctgaatctacctccaacattgaccaaggtccacgtgaccattctgtgcagctgccaaaaccagtgcataagccaaatcggtggtgcttttacagttcttgtgaacagctagaccagcttattgaagctcttaattctagaggacatagagaaagtgccttaaaagaaactttgttacaagagaaaagcagaatatgtgcacagctagcccgtttttctgaagagaaatttcatttttcagacaaacctcagcctgatagcaaaccaacatatagtcggggaagatcttccaatgcatatgatccatctcagatgtgtgcagaaaagcaacttgaactaaggctgagagattttcttttagatattgaagatagaatctaccaaggaacattaggagccatcaaggttacagatcgacatatctggagatcagcattagaaagtggacggtatgagctgttaagtgaggaaaacaaggaaaatgggataattaaaactgtgaatgaagacgtagaagagatggaaattgatgaacaaacaaaggtcatagtaaaagacagacttttggggataaaaacagaaactccaagtactgtatcaacaaatgcaagtacaccacaatcagtgagcagtgtggttcattatctggcaatggcactctttcaaatagagcagggcattgagcggcgttttctgaaagctccacttgatgccagtgacagtgggcgttcttataaaacagttctggaccgttggagagagtctctcctttcttctgctagtctatcccaagtttttcttcacctatccaccttggatcgtagcgtgatatggtctaaatctatactgaatgcgcgttgcaagatatgtcgaaagaaaggcgatgctgaaaacatggttctttgtgatggctgtgataggggtcatcatacctactgtgttcgaccaaagctcaagactgtgcctgaaggagactggttttgtccagaatgtcgaccaaagcaacgttctagaagactctcctctagacagagaccatccttggaaagtgatgaagatgtggaagacagtatgggaggtgaggatgatgaagttgatggcgatgaagaagaaggtcaaagtgaggaggaagagtatgaggtagaacaagatgaagatgactctcaagaagaggaagaagtcagcctacccaaacgaggaagaccacaagttagattgccagttaaaacaagagggaaacttagctcttctttctcaagtcgtggccaacaacaagaacctggaagatacccttcaaggagtcagcagagcacacccaaaacaactgtttcttctaaaactggtagaagcctaagaaagataaactctgctcctcctacagaaacaaaatctttaagaattgccagtcgttctactcgccacagtcatggcccactgcaagcagatgtatttgtggaattgcttagtcctcgtagaaaacgcagaggcaggaaaagtgctaataatacaccagaaaatagtcccaacttccctaacttcaatgccatccccatcaagctaccaatagactttcttcacagaactggaaaaactactaaagtcatatt

SEQ ID NO: 307259 - DNA, 2587 bp, Homo sapiens
atctgcttccatcagccagattcaccacattccccttccaccatatggagaagtggcatttgaattgggttaaaggacagcaggtttggagttgggcagctgggcaatggaaataccgatcctgatgggacgaagactctggttacagatcgacatatctggagatcagcattagaaagtggacggtatgagctgttaagtgaggaaaacaaggaaaatgggataattaaaactgtgaatgaagacgtagaagagatggaaattgatgaacaaacaaaggtcatagtaaaagacagacttttggggataaaaacagaaactccaagtactgtatcaacaaatgcaagtacaccacaatcagtgagcagtgtggttcattatctggcaatggcactctttcaaatagagcagggcattgagcggcgttttctgaaagctccacttgatgccagtgacagtgggcgttcttataaaacagttctggaccgttggagagagtctctcctttcttctgctagtctatcccaagtttttcttcacctatccaccttggatcgtagcgtgatatggtctaaatctatactgaatgcgcgttgcaagatatgtcgaaagaaaggcgatgctgaaaacatggttctttgtgatggctgtgataggggtcatcatacctactgtgttcgaccaaagctcaagactgtgcctgaaggagactggttttgtccagaatgtcgaccaaagcaacgttctagaagactctcctctagacagagaccatccttggaaagtgatgaagatgtggaagacagtatgggaggtgaggatgatgaagttgatggcgatgaagaagaaggtcaaagtgaggaggaagagtatgaggtagaacaagatgaagatgactctcaagaagaggaagaagtcagcctacccaaacgaggaagaccacaagttagattgccagttaaaacaagagggaaacttagctcttctttctcaagtcgtggccaacaacaagaacctggaagatacccttcaaggagtcagcagagcacacccaaaacaactgtttcttctaaaactggtagaagcctaagaaagataaactctgctcctcctacagaaacaaaatctttaagaattgccagtcgttctactcgccacagtcatggcccactgcaagcagatgtatttgtggaattgcttagtcctcgtagaaaacgcagaggcaggaaaagtgctaataatacaccagaaaatagtcccaacttccctaacttcagagtcattgccacaaagtcaagtgaacagtcaagatctgtaaatattgcttcaaaactttctctccaagagagtgaatccaaaagaagatgcagaaaaagacaatctccagagccatcgcctgtgacactgggtcgaaggagttctggccgacagggaggagttcatgaattgtctgcttttgaacaacttgttgtagaattggtacgacatgatgacagctggccttttttgaaacttgtttctaaaatccaggtcccagactactatgacatcatcaaaaagcccattgccttaaatataattcgtgaaaaagtgaataagtgtgaatataaattagcatctgagtttattgatgacattgagttaatgttttcgaactgctttgaatacaaccctcgtaacacaagtgaagcaaaagctggaactaggcttcaagcattttttcatattcaggctcaaaagcttggactccacgtcacacccagtaatgtggaccaagttagcacaccaccggctgcgaaaaagtcacgaatctgactttgtccttctaaaggatatatttgaagaaaaacaaattgttcatgaaaatggaacattaaatcatgctgtataaagcaataacaattgattgaccacatgaaagtgtggcctgcactatattctcaattttaatattaagcactcaggagaatgtaggaaagatatcctttgctacagttttgttcagtatctaataagtttgatagatgtattggatacagtactggtttacagaggtttttgtacatttttgagatcattcatgtgtccagagatcttggaaaatattttttcacccacgatttattttgttattgatgatttttttttaaagtggtggtattaagggagagttatctacatggatgagtcttccgctatagcacagtttagaaaaggtgtttatgtcttaattaattgtttgagtacattctttcaacactacacatgaatgaatccaatcttataaccttgaagtgctgtaccagtgctggctgcaggtattaagtccaagtttattaactagatatttatttagtattgagagtaatttgtgaatttgttttgtatttataaaatttatacctgaaaaatgttccttaatgttttaaaccttttactgtgtttttattcctctaacttccttaatgatcaatcaaaaaaagtaacaccctccctttttcctgacagttctttcagctttacagaactgtattataagtttctatgtataactttttaactgtacaaataaaataacattttttca

SEQ ID NO: 307260 - DNA, 5204 bp, Homo sapiens
taacgcctttcacaaatgtttattttgctaggtgtatgaacagttaaagccagcctgaaagataaaaaatactaactcttgatttcgatttcttacattttctgctccaaagtacaaaggaacttaaatttgaagttataaaacggatcccacattgtttctgtaattatcatttcgcagtattggtaataggaataacatctttgtcgaataaccattcctaaaacttacttttagactcattcttacatattaatttgcaaataagcaaatgttaaggacagtatcaaaaaagactttaaaacacatctagtgaacgttctgagttacttctagtttcgaaaattctattgaattccaaggtcacatgtattatgtacattaaacttgtttccctaaataaaagttactgatatgggaaagttgctttaggggaattttcgctagtaaatccataatccttaaaattctaagtgaattaaacattgatactttgcaaatatttacagcagtgtaaatattactttttaaaggtgcgttagtttcaagaatgctggggtcctacaagcatgatgacactttgtaacacatactttttttttggtcttttcctctgctttctaaatctcttaattgccataagtattaaatagaactgatgtcaaggtatcttctgttcaagatggatgtttactaaacatgcaaagtatttttagagatatagattctaatttggaagaagaaaaatagcaacaaattttcttattcatttcttttctcatctttaaaatacaagttaaatcgtaattggaatcccttttcccatcgtgtagtcaagagtctgtgccagacttgaaggctttactttgttagccatgtgtttatgaacccccagcgctttccctagatcttttggctgataatctcaaacatggaggatgcttctgaatcttcacgaggggttgctccattaattaataatgtagttctcccaggctctccgctgtctcttcctgtatcagtgacaggctgtaaaagtcatcgagtagccaataaaaaggtagaagcgaggagtgaaaagctcctcccaacagctcttcctccttcagagccgaaagtagatcagaaacttcccaggagctccgagaggcggggaagtggcggtgggacgcaattccccgcgcggagtcgggcagtggcagcgggagaagcggcagccaggggcgcggcggggccggagagaggcggtcccctgggaggacggggtctcccctcgttgcctttgtagtggagaaggtggacaagtggcagtcggcgtgatcgcagggaagcggggccggcgcgggcggccgagggtccaggcgagcccgcgggcggacgggagatgccgctgctacaccgaaagccgtttgtgagacagaagccgcccgcggacctgcggcccgacgaggaagttttctactgtaaagtcaccaacgagatcttccgccactacgatgacttttttgaacgaaccattctgtgcaacagccttgtgtggagttgtgctgtgacgggtagacctggactgacgtatcaggaagcacttgagtcagaaaaaaaagcaagacagaatcttcagagttttccagaaccactaattattccagttttatacttgaccagccttacccatcgttcgcgcttacatgaaatttgtgatgatatctttgcatatgtcaaggatcgatattttgtcgaagaaactgtggaagtcattaggaacaatggtgcaaggttgcagtgtaggattttggaagtcctccctccatcacatcaaaatggttttgctaatggacatgttaacagtgtggatggagaaactattatcatcagtgatagtgatgattcagaaacacaaagctgttcttttcaaaatgggaagaaaaaagatgcaattgatcccttactattcaagtataaagtgcaacccactaaaaaagaattacatgagtctgctattgttaaagcaacacaaatcagccggagaaaacacctattttctcgtgataaactaaagctttttctgaagcaacactgtgaaccacaagatggagtcattaaaataaaggcatcatctctttcaacgtataaaatagcagaacaagatttttcttatttcttccctgatgatccacccacatttatcttcagtcctgctaacagacgaagagggagacctcccaaacgaatacatattagtcaagaggacaatgttgctaataaacagactcttgcaagttataggagcaaagctactaaagaaagagataaacttttgaaacaagaagaaatgaagtcactggcttttgaaaaggctaaattaaaaagagaaaaagcagatgccctagaagcgaagaaaaaagaaaaagaagataaagagaaaaagagggaagaattgaaaaaaattgttgaagaagagagactaaagaaaaaagaagaaaaagagaggcttaaagtagaaagagaaaaggaaagagagaagttacgtgaagaaaagcgaaagtatgtggaatacttaaaacagtggagtaaacctagagaagatatggaatgtgatgaccttaaggaacttccagaaccaacaccagtgaaaactagactacctcctgaaatctttggtgatgctctgatggttttggagttccttaatgcatttggggaactttttgatcttcaagatgagtttcctgatggagtaaccctagaagtattagaggaagctcttgtaggaaatgacagtgaaggcccactgtgtgaattgctttttttcttcctgactgcaatcttccaggcaatagctgaagaagaagaggaagtagccaaagagcaactaactgatgctgacaccaaagatttaacagaggctttggatgaagatgcagaccccacaaaatctgcactgtctgcagttgcatctttggcagctgcatggccacagttacaccagggctgcagtttgaaaagtttggatcttgatagctgcactctttcagaaatcctcagactgcacatcttagcttcaggtgctgatgtaacatcagcaaatgcaaagtatagatatcaaaaacgaggaggatttgatgctacagatgatgcttgtatggagcttcgtttgagcaatcccagtctagtgaagaaactgtcaagcacctcagtgtatgatttgacaccaggagaaaaaatgaagatactccatgctctctgtggaaagctactgaccctagtttcaactagggattttattgaagattatgttgatatattacgacaggcaaagcaggagttccgggaattaaaagcagaacaacatcgaaaagagagggaagaagcagctgccagaattcgtaaaaggaaggaagaaaaacttaaggagcaagaacaaaaaatgaaagagaaacaagaaaaactgaaagaagatgagcaaagaaattcaacggcagatatatctattggggaggaagaaagggaagattttgatactagcattgagagcaaagacacagagcaaaaggaattagatcaagatatggtcactgaagatgaagatgacccaggatcacataaaagaggcagaagggggaaaagaggacaaaatggatttaaagaatttacaaggcaagaacagatcaactgtgtaacaagagagcctcttactgctgatgaggaagaagcattaaaacaggaacaccaacgaaaagagaaagagctcttagaaaaaatccaaagtgccatagcctgtaccaatatctttcccttgggtcgcgaccgcatgtatagacgatactggattttcccttctattcctggactctttattgaagaggattattctggtcttactgaagacatgctgttgcctagaccttcatcatttcagaataatgtacagtctcaagatcctcaggtatccactaaaactggagagcctttgatgtctgaatctacctccaacattgaccaaggtccacgtgaccattctgtgcagctgccaaaaccagtgcataagccaaatcggtggtgcttttacagttcttgtgaacagctagaccagcttattgaagctcttaattctagaggacatagagaaagtgccttaaaagaaactttgttacaagagaaaagcagaatatgtgcacagctagcccgtttttctgaagagaaatttcatttttcagacaaacctcagcctgatagcaaaccaacatatagtcggggaagatcttccaatgcatatgatccatctcagatgtgtgcagaaaagcaacttgaactaaggctgagagattttcttttagatattgaagatagaatctaccaaggaacattaggagccatcaaggttacagatcgacatatctggagatcagcattagaaagtggacggtatgagctgttaagtgaggaaaacaaggaaaatgggataattaaaactgtgaatgaagacgtagaagagatggaaattgatgaacaaacaaaggtcatagtaaaagacagacttttggggataaaaacagaaactccaagtactgtatcaacaaatgcaagtacaccacaatcagtgagcagtgtggttcattatctggcaatggcactctttcaaatagagcagggcattgagcggcgttttctgaaagctccacttgatgccagtgacagtgggcgttcttataaaacagttctggaccgttggagagagtctctcctttcttctgctagtctatcccaagtttttcttcacctatccaccttggatcgtagcgtgatatggtctaaatctatactgaatgcgcgttgcaagatatgtcgaaagaaaggcgatgctgaaaacatggttctttgtgatggctgtgataggggtcatcatacctactgtgttcgaccaaagctcaagactgtgcctgaaggagactggttttggatgtttcccaggtggagaatacccgccactatctgcaacaccagcgtttgctcttctgcagagatcccaatcacattcatggcgtgcagagtttcctgaaactcccgcctgtcgtcaatgtcatcaaccttgtatgagcccgagaggctcaggtagtaataatagtccatgctggtgatgccaaggctgtgtttctgctctgcagaggcgccctcgataagctggtcaaatatgtgaaaatccg

SEQ ID NO: 307261 - DNA, 5021 bp, Homo sapiens
taacgcctttcacaaatgtttattttgctaggtgtatgaacagttaaagccagcctgaaagataaaaaatactaactcttgatttcgatttcttacattttctgctccaaagtacaaaggaacttaaatttgaagttataaaacggatcccacattgtttctgtaattatcatttcgcagtattggtaataggaataacatctttgtcgaataaccattcctaaaacttacttttagactcattcttacatattaatttgcaaataagcaaatgttaaggacagtatcaaaaaagactttaaaacacatctagtgaacgttctgagttacttctagtttcgaaaattctattgaattccaaggtcacatgtattatgtacattaaacttgtttccctaaataaaagttactgatatgggaaagttgctttaggggaattttcgctagtaaatccataatccttaaaattctaagtgaattaaacattgatactttgcaaatatttacagcagtgtaaatattactttttaaaggtgcgttagtttcaagaatgctggggtcctacaagcatgatgacactttgtaacacatactttttttttggtcttttcctctgctttctaaatctcttaattgccataagtattaaatagaactgatgtcaaggtatcttctgttcaagatggatgtttactaaacatgcaaagtatttttagagatatagattctaatttggaagaagaaaaatagcaacaaattttcttattcatttcttttctcatctttaaaatacaagttaaatcgtaattggaatcccttttcccatcgtgtagtcaagagtctgtgccagacttgaaggctttactttgttagccatgtgtttatgaacccccagcgctttccctagatcttttggctgataatctcaaacatggaggatgcttctgaatcttcacgaggggttgctccattaattaataatgtagttctcccaggctctccgctgtctcttcctgtatcagtgacaggctgtaaaagtcatcgagtagccaataaaaaggtagaagcgaggagtgaaaagctcctcccaacagctcttcctccttcagagccgaaagtagatcagaaacttcccaggagctccgagaggcggggaagtggcggtgggacgcaattccccgcgcggagtcgggcagtggcagcgggagaagcggcagccaggggcgcggcggggccggagagaggcggtcccctgggaggacggggtctcccctcgttgcctttgtagtggagaaggtggacaagtggcagtcggcgtgatcgcagggaagcggggccggcgcgggcggccgagggtccaggcgagcccgcgggcggacgggagatgccgctgctacaccgaaagccgtttgtgagacagaagccgcccgcggacctgcggcccgacgaggaagttttctactgtaaagtcaccaacgagatcttccgccactacgatgacttttttgaacgaaccattctgtgcaacagccttgtgtggagttgtgctgtgacgggtagacctggactgacgtatcaggaagcacttgagtcagaaaaaaaagcaagacagaatcttcagagttttccagaaccactaattattccagttttatacttgaccagccttacccatcgttcgcgcttacatgaaatttgtgatgatatctttgcatatgtcaaggatcgatattttgtcgaagaaactgtggaagtcattaggaacaatggtgcaaggttgcagtgtaggattttggaagtcctccctccatcacatcaaaatggttttgctaatggacatgttaacagtgtggatggagaaactattatcatcagtgatagtgatgattcagaaacacaaagctgttcttttcaaaatgggaagaaaaaagatgcaattgatcccttactattcaagtataaagtgcaacccactaaaaaagaattacatgagtctgctattgttaaagcaacacaaatcagccggagaaaacacctattttctcgtgataaactaaagctttttctgaagcaacactgtgaaccacaagatggagtcattaaaataaaggcatcatctctttcaacgtataaaatagcagaacaagatttttcttatttcttccctgatgatccacccacatttatcttcagtcctgctaacagacgaagagggagacctcccaaacgaatacatattagtcaagaggacaatgttgctaataaacagactcttgcaagttataggagcaaagctactaaagaaagagataaacttttgaaacaagaagaaatgaagtcactggcttttgaaaaggctaaattaaaaagagaaaaagcagatgccctagaagcgaagaaaaaagaaaaagaagataaagagaaaaagagggaagaattgaaaaaaattgttgaagaagagagactaaagaaaaaagaagaaaaagagaggcttaaagtagaaagagaaaaggaaagagagaagttacgtgaagaaaagcgaaagtatgtggaatacttaaaacagtggagtaaacctagagaagatatggaatgtgatgaccttaaggaacttccagaaccaacaccagtgaaaactagactacctcctgaaatctttggtgatgctctgatggttttggagttccttaatgcatttggggaactttttgatcttcaagatgagtttcctgatggagtaaccctagaagtattagaggaagctcttgtaggaaatgacagtgaaggcccactgtgtgaattgctttttttcttcctgactgcaatcttccaggcaatagctgaagaagaagaggaagtagccaaagagcaactaactgatgctgacaccaaagatttaacagaggctttggatgaagatgcagaccccacaaaatctgcactgtctgcagttgcatctttggcagctgcatggccacagttacaccagggctgcagtttgaaaagtttggatcttgatagctgcactctttcagaaatcctcagactgcacatcttagcttcaggtgctgatgtaacatcagcaaatgcaaagtatagatatcaaaaacgaggaggatttgatgctacagatgatgcttgtatggagcttcgtttgagcaatcccagtctagtgaagaaactgtcaagcacctcagtgtatgatttgacaccaggagaaaaaatgaagatactccatgctctctgtggaaagctactgaccctagtttcaactagggattttattgaagattatgttgatatattacgacaggcaaagcaggagttccgggaattaaaagcagaacaacatcgaaaagagagggaagaagcagctgccagaattcgtaaaaggaaggaagaaaaacttaaggagcaagaacaaaaaatgaaagagaaacaagaaaaactgaaagaagatgagcaaagaaattcaacggcagatatatctattggggaggaagaaagggaagattttgatactagcattgagagcaaagacacagagcaaaaggaattagatcaagatatggtcactgaagatgaagatgacccaggatcacataaaagaggcagaagggggaaaagaggacaaaatggatttaaagaatttacaaggcaagaacagatcaactgtgtaacaagagagcctcttactgctgatgaggaagaagcattaaaacaggaacaccaacgaaaagagaaagagctcttagaaaaaatccaaagtgccatagcctgtaccaatatctttcccttgggtcgcgaccgcatgtatagacgatactggattttcccttctattcctggactctttattgaagaggattattctggtcttactgaagacatgctgttgcctagaccttcatcatttcagaataatgtacagtctcaagatcctcaggtatccactaaaactggagagcctttgatgtctgaatctacctccaacattgaccaaggtccacgtgaccattctgtgcagctgccaaaaccagtgcataagccaaatcggtggtgcttttacagttcttgtgaacagctagaccagcttattgaagctcttaattctagaggacatagagaaagtgccttaaaagaaactttgttacaagagaaaagcagaatatgtgcacagctagcccgtttttctgaagagaaatttcatttttcagacaaacctcagcctgatagcaaaccaacatatagtcggggaagatcttccaatgcatatgatccatctcagatgtgtgcagaaaagcaacttgaactaaggctgagagattttcttttagatattgaagatagaatctaccaaggaacattaggagccatcaaggttacagatcgacatatctggagatcagcattagaaagtggacggtatgagctgttaagtgaggaaaacaaggaaaatgggataattaaaactgtgaatgaagacgtagaagagatggaaattgatgaacaaacaaaggtcatagtaaaagacagacttttggggataaaaacagaaactccaagtactgtatcaacaaatgcaagtacaccacaatcagtgagcagtgtggttcattatctggcaatggcactctttcaaatagagcagggcattgagcggcgttttctgaaagctccacttggtaagtatctgtttttatttcaaaatattagttgtgttataagtaattttgagttggcctttaactaatagaactttattggctgacataatgaaattgataatcttaaaaacttgagatgttttcatttttaaatgagttcttttaaggtgagatttatttttagaataatacagtcttttgtgaagagtttcatcaaaagaaagattaccagctaggcacagtggctcatgcctgtaatcccaacactttgggaggctgaggtggaatcgcttgagcccaagagtttgagaccagcctgggcaacatatagcaagaaccccatctctacaaaat

SEQ ID NO: 307262 - DNA, 3819 bp, Homo sapiens
taacgcctttcacaaatgtttattttgctaggtgtatgaacagttaaagccagcctgaaagataaaaaatactaactcttgatttcgatttcttacattttctgctccaaagtacaaaggaacttaaatttgaagttataaaacggatcccacattgtttctgtaattatcatttcgcagtattggtaataggaataacatctttgtcgaataaccattcctaaaacttacttttagactcattcttacatattaatttgcaaataagcaaatgttaaggacagtatcaaaaaagactttaaaacacatctagtgaacgttctgagttacttctagtttcgaaaattctattgaattccaaggtcacatgtattatgtacattaaacttgtttccctaaataaaagttactgatatgggaaagttgctttaggggaattttcgctagtaaatccataatccttaaaattctaagtgaattaaacattgatactttgcaaatatttacagcagtgtaaatattactttttaaaggtgcgttagtttcaagaatgctggggtcctacaagcatgatgacactttgtaacacatactttttttttggtcttttcctctgctttctaaatctcttaattgccataagtattaaatagaactgatgtcaaggtatcttctgttcaagatggatgtttactaaacatgcaaagtatttttagagatatagattctaatttggaagaagaaaaatagcaacaaattttcttattcatttcttttctcatctttaaaatacaagttaaatcgtaattggaatcccttttcccatcgtgtagtcaagagtctgtgccagacttgaaggctttactttgttagccatgtgtttatgaacccccagcgctttccctagatcttttggctgataatctcaaacatggaggatgcttctgaatcttcacgaggggttgctccattaattaataatgtagttctcccaggctctccgctgtctcttcctgtatcagtgacaggctgtaaaagtcatcgagtagccaataaaaaggtagaagcgaggagtgaaaagctcctcccaacagctcttcctccttcagagccgaaagtagatcagaaacttcccaggagctccgagaggcggggaagtggcggtgggacgcaattccccgcgcggagtcgggcagtggcagcgggagaagcggcagccaggggcgcggcggggccggagagaggcggtcccctgggaggacggggtctcccctcgttgcctttgtagtggagaaggtggacaagtggcagtcggcgtgatcgcagggaagcggggccggcgcgggcggccgagggtccaggcgagcccgcgggcggacgggagatgccgctgctacaccgaaagccgtttgtgagacagaagccgcccgcggacctgcggcccgacgaggaagttttctactgtaaagtcaccaacgagatcttccgccactacgatgacttttttgaacgaaccattctgtgcaacagccttgtgtggagttgtgctgtgacgggtagacctggactgacgtatcaggaagcacttgagtcagaaaaaaaagcaagacagaatcttcagagttttccagaaccactaattattccagttttatacttgaccagccttacccatcgttcgcgcttacatgaaatttgtgatgatatctttgcatatgtcaaggatcgatattttgtcgaagaaactgtggaagtcattaggaacaatggtgcaaggttgcagtgtaggattttggaagtcctccctccatcacatcaaaatggttttgctaatggacatgttaacagtgtggatggagaaactattatcatcagtgatagtgatgattcagaaacacaaagctgttcttttcaaaatgggaagaaaaaagatgcaattgatcccttactattcaagtataaagtgcaacccactaaaaaagaattacatgagtctgctattgttaaagcaacacaaatcagccggagaaaacacctattttctcgtgataaactaaagctttttctgaagcaacactgtgaaccacaagatggagtcattaaaataaaggcatcatctctttcaacgtataaaatagcagaacaagatttttcttatttcttccctgatgatccacccacatttatcttcagtcctgctaacagacgaagagggagacctcccaaacgaatacatattagtcaagaggacaatgttgctaataaacagactcttgcaagttataggagcaaagctactaaagaaagagataaacttttgaaacaagaagaaatgaagtcactggcttttgaaaaggctaaattaaaaagagaaaaagcagatgccctagaagcgaagaaaaaagaaaaagaagataaagagaaaaagagggaagaattgaaaaaaattgttgaagaagagagactaaagaaaaaagaagaaaaagagaggcttaaagtagaaagagaaaaggaaagagagaagttacgtgaagaaaagcgaaagtatgtggaatacttaaaacagtggagtaaacctagagaagatatggaatgtgatgaccttaaggaacttccagaaccaacaccagtgaaaactagactacctcctgaaatctttggtgatgctctgatggttttggagttccttaatgcatttggggaactttttgatcttcaagatgagtttcctgatggagtaaccctagaagtattagaggaagctcttgtaggaaatgacagtgaaggcccactgtgtgaattgctttttttcttcctgactgcaatcttccaggcaatagctgaagaagaagaggaagtagccaaagagcaactaactgatgctgacaccaaagatttaacagaggctttggatgaagatgcagaccccacaaaatctgcactgtctgcagttgcatctttggcagctgcatggccacagttacaccagggctgcagtttgaaaagtttggatcttgatagctgcactctttcagaaatcctcagactgcacatcttagcttcaggtgctgatgtaacatcagcaaatgcaaagtatagatatcaaaaacgaggaggatttgatgctacagatgatgcttgtatggagcttcgtttgagcaatcccagtctagtgaagaaactgtcaagcacctcagtgtatgatttgacaccaggagaaaaaatgaagatactccatgctctctgtggaaagctactgaccctagtttcaactagggattttattgaagattatgttgatatattacgacaggcaaagcaggagttccgggaattaaaagcagaacaacatcgaaaagagagggaagaagcagctgccagaattcgtaaaaggaaggaagaaaaacttaaggagcaagaacaaaaaatgaaagagaaacaagaaaaactgaaagaagatgagcaaagaaattcaacggcagatatatctattggggaggaagaaagggaagattttgatactagcattgagagcaaagacacagagcaaaaggaattagatcaagatatggtcactgaagatgaagatgacccaggatcacataaaagaggcagaagggagggagaagggaggctggtggaagggagaactaggggttctgtttccctgtctcagccttcctgcaatgcatggtgtttccttaacaacaaaagtccatttcacctatcaatggcagaatctcctgtgcgtgagcctgtggggaggaggagggctagggactggaatctgcactttggaacagagctggtggaagggag

SEQ ID NO: 307263 - DNA, 3963 bp, Homo sapiens
taacgcctttcacaaatgtttattttgctaggtgtatgaacagttaaagccagcctgaaagataaaaaatactaactcttgatttcgatttcttacattttctgctccaaagtacaaaggaacttaaatttgaagttataaaacggatcccacattgtttctgtaattatcatttcgcagtattggtaataggaataacatctttgtcgaataaccattcctaaaacttacttttagactcattcttacatattaatttgcaaataagcaaatgttaaggacagtatcaaaaaagactttaaaacacatctagtgaacgttctgagttacttctagtttcgaaaattctattgaattccaaggtcacatgtattatgtacattaaacttgtttccctaaataaaagttactgatatgggaaagttgctttaggggaattttcgctagtaaatccataatccttaaaattctaagtgaattaaacattgatactttgcaaatatttacagcagtgtaaatattactttttaaaggtgcgttagtttcaagaatgctggggtcctacaagcatgatgacactttgtaacacatactttttttttggtcttttcctctgctttctaaatctcttaattgccataagtattaaatagaactgatgtcaaggtatcttctgttcaagatggatgtttactaaacatgcaaagtatttttagagatatagattctaatttggaagaagaaaaatagcaacaaattttcttattcatttcttttctcatctttaaaatacaagttaaatcgtaattggaatcccttttcccatcgtgtagtcaagagtctgtgccagacttgaaggctttactttgttagccatgtgtttatgaacccccagcgctttccctagatcttttggctgataatctcaaacatggaggatgcttctgaatcttcacgaggggttgctccattaattaataatgtagttctcccaggctctccgctgtctcttcctgtatcagtgacaggctgtaaaagtcatcgagtagccaataaaaaggtagaagcgaggagtgaaaagctcctcccaacagctcttcctccttcagagccgaaagtagatcagaaacttcccaggagctccgagaggcggggaagtggcggtgggacgcaattccccgcgcggagtcgggcagtggcagcgggagaagcggcagccaggggcgcggcggggccggagagaggcggtcccctgggaggacggggtctcccctcgttgcctttgtagtggagaaggtggacaagtggcagtcggcgtgatcgcagggaagcggggccggcgcgggcggccgagggtccaggcgagcccgcgggcggacgggagatgccgctgctacaccgaaagccgtttgtgagacagaagccgcccgcggacctgcggcccgacgaggaagttttctactgtaaagtcaccaacgagatcttccgccactacgatgacttttttgaacgaaccattctgtgcaacagccttgtgtggagttgtgctgtgacgggtagacctggactgacgtatcaggaagcacttgagtcagaaaaaaaagcaagacagaatcttcagagttttccagaaccactaattattccagttttatacttgaccagccttacccatcgttcgcgcttacatgaaatttgtgatgatatctttgcatatgtcaaggatcgatattttgtcgaagaaactgtggaagtcattaggaacaatggtgcaaggttgcagtgtaggattttggaagtcctccctccatcacatcaaaatggttttgctaatggacatgttaacagtgtggatggagaaactattatcatcagtgatagtgatgattcagaaacacaaagctgttcttttcaaaatgggaagaaaaaagatgcaattgatcccttactattcaagtataaagtgcaacccactaaaaaagaattacatgagtctgctattgttaaagcaacacaaatcagccggagaaaacacctattttctcgtgataaactaaagctttttctgaagcaacactgtgaaccacaagatggagtcattaaaataaaggcatcatctctttcaacgtataaaatagcagaacaagatttttcttatttcttccctgatgatccacccacatttatcttcagtcctgctaacagacgaagagggagacctcccaaacgaatacatattagtcaagaggacaatgttgctaataaacagactcttgcaagttataggagcaaagctactaaagaaagagataaacttttgaaacaagaagaaatgaagtcactggcttttgaaaaggctaaattaaaaagagaaaaagcagatgccctagaagcgaagaaaaaagaaaaagaagataaagagaaaaagagggaagaattgaaaaaaattgttgaagaagagagactaaagaaaaaagaagaaaaagagaggcttaaagtagaaagagaaaaggaaagagagaagttacgtgaagaaaagcgaaagtatgtggaatacttaaaacagtggagtaaacctagagaagatatggaatgtgatgaccttaaggaacttccagaaccaacaccagtgaaaactagactacctcctgaaatctttggtgatgctctgatggttttggagttccttaatgcatttggggaactttttgatcttcaagatgagtttcctgatggagtaaccctagaagtattagaggaagctcttgtaggaaatgacagtgaaggcccactgtgtgaattgctttttttcttcctgactgcaatcttccaggcaatagctgaagaagaagaggaagtagccaaagagcaactaactgatgctgacaccaaagatttaacagaggctttggatgaagatgcagaccccacaaaatctgcactgtctgcagttgcatctttggcagctgcatggccacagttacaccagggctgcagtttgaaaagtttggatcttgatagctgcactctttcagaaatcctcagactgcacatcttagcttcaggtgctgatgtaacatcagcaaatgcaaagtatagatatcaaaaacgaggaggatttgatgctacagatgatgcttgtatggagcttcgtttgagcaatcccagtctagtgaagaaactgtcaagcacctcagtgtatgatttgacaccaggagaaaaaatgaagatactccatgctctctgtggaaagctactgaccctagtttcaactagggattttattgaagattatgttgatatattacgacaggcaaagcaggagttccgggaattaaaagcagaacaacatcgaaaagagagggaagaagcagctgccagaattcgtaaaaggaaggaagaaaaacttaaggagcaaagctactaaagaaagagataaacttttgaaacaagaagaaatgaagtcactggcttttgaaaaggctaaattaaaaagagaaaaagcagatgccctagaagcgaagaaaaaagaaaaagaagataaagagaaaaagagggaagaattgaaaaaaattgttgaagaagagagactaaagaaaaaagaagaaaaagagaggcttaaagtagaaagagaaaaggtattcatttgagtatattagctatactctctacatatagtaatactactctacatatctacacccatggttgatttttaaatgcttttactactttcattcacatttatgaatgtgcatagaaagttgattggtttatctcccttttgctttggaaaatttaacatgcctttacgcatcacttaaaacctcttttagaatgcagttctaaatgatttcattgtttagatttccaattcagggaagatgatatatgtaaaagtttatatgtaaaccttaagaggtaaaatacgctggaatggaattggggtccgagctcgattcg

SEQ ID NO: 307264 - DNA, 2409 bp, Homo sapiens
taacgcctttcacaaatgtttattttgctaggtgtatgaacagttaaagccagcctgaaagataaaaaatactaactcttgatttcgatttcttacattttctgctccaaagtacaaaggaacttaaatttgaagttataaaacggatcccacattgtttctgtaattatcatttcgcagtattggtaataggaataacatctttgtcgaataaccattcctaaaacttacttttagactcattcttacatattaatttgcaaataagcaaatgttaaggacagtatcaaaaaagactttaaaacacatctagtgaacgttctgagttacttctagtttcgaaaattctattgaattccaaggtcacatgtattatgtacattaaacttgtttccctaaataaaagttactgatatgggaaagttgctttaggggaattttcgctagtaaatccataatccttaaaattctaagtgaattaaacattgatactttgcaaatatttacagcagtgtaaatattactttttaaaggtgcgttagtttcaagaatgctggggtcctacaagcatgatgacactttgtaacacatactttttttttggtcttttcctctgctttctaaatctcttaattgccataagtattaaatagaactgatgtcaaggtatcttctgttcaagatggatgtttactaaacatgcaaagtatttttagagatatagattctaatttggaagaagaaaaatagcaacaaattttcttattcatttcttttctcatctttaaaatacaagttaaatcgtaattggaatcccttttcccatcgtgtagtcaagagtctgtgccagacttgaaggctttactttgttagccatgtgtttatgaacccccagcgctttccctagatcttttggctgataatctcaaacatggaggatgcttctgaatcttcacgaggggttgctccattaattaataatgtagttctcccaggctctccgctgtctcttcctgtatcagtgacaggctgtaaaagtcatcgagtagccaataaaaaggtagaagcgaggagtgaaaagctcctcccaacagctcttcctccttcagagccgaaagtagatcagaaacttcccaggagctccgagaggcggggaagtggcggtgggacgcaattccccgcgcggagtcgggcagtggcagcgggagaagcggcagccaggggcgcggcggggccggagagaggcggtcccctgggaggacggggtctcccctcgttgcctttgtagtggagaaggtggacaagtggcagtcggcgtgatcgcagggaagcggggccggcgcgggcggccgagggtccaggcgagcccgcgggcggacgggagatgccgctgctacaccgaaagccgtttgtgagacagaagccgcccgcggacctgcggcccgacgaggaagttttctactgtaaagtcaccaacgagatcttccgccactacgatgacttttttgaacgaaccattctgtgcaacagccttgtgtggagttgtgctgtgacgggtagacctggactgacgtatcaggaagcacttgagtcagaaaaaaaagcaagacagaatcttcagagttttccagaaccactaattattccagttttatacttgaccagccttacccatcgttcgcgcttacatgaaatttgtgatgatatctttgcatatgtcaaggatcgatattttgtcgaagaaactgtggaagtcattaggaacaatggtgcaaggttgcagtgtaggattttggaagtcctccctccatcacatcaaaatggttttgctaatggacatgttaacagtgtggatggagaaactattatcatcagtgatagtgatgattcagaaacacaaagctgttcttttcaaaatgggaagaaaaaagatgcaattgatcccttactattcaagtataaagtgcaacccactaaaaaagaattacatgagtctgctattgttaaagcaacacaaatcagccggagaaaacacctattttctcgtgataaactaaagctttttctgaagcaacactgtgaaccacaagatggagtcattaaaataaaggcatcatctctttcaacgtataaaatagcagaacaagatttttcttatttcttccctgatgatccacccacatttatcttcagtcctgctaacagacgaagagggagacctcccaaacgaatacatattagtcaagaggacaatgttgctaataaacagactcttgcaagttataggagcaaagctactaaagaaagagataaacttttgaaacaagaagaaatgaagtcactggcttttgaaaaggctaaattaaaaagagaaaaagcagatgccctagaagcgaagaaaaaagaaaa

SEQ ID NO: 307265 - DNA, 2736 bp, Homo sapiens
taacgcctttcacaaatgtttattttgctaggtgtatgaacagttaaagccagcctgaaagataaaaaatactaactcttgatttcgatttcttacattttctgctccaaagtacaaaggaacttaaatttgaagttataaaacggatcccacattgtttctgtaattatcatttcgcagtattggtaataggaataacatctttgtcgaataaccattcctaaaacttacttttagactcattcttacatattaatttgcaaataagcaaatgttaaggacagtatcaaaaaagactttaaaacacatctagtgaacgttctgagttacttctagtttcgaaaattctattgaattccaaggtcacatgtattatgtacattaaacttgtttccctaaataaaagttactgatatgggaaagttgctttaggggaattttcgctagtaaatccataatccttaaaattctaagtgaattaaacattgatactttgcaaatatttacagcagtgtaaatattactttttaaaggtgcgttagtttcaagaatgctggggtcctacaagcatgatgacactttgtaacacatactttttttttggtcttttcctctgctttctaaatctcttaattgccataagtattaaatagaactgatgtcaaggtatcttctgttcaagatggatgtttactaaacatgcaaagtatttttagagatatagattctaatttggaagaagaaaaatagcaacaaattttcttattcatttcttttctcatctttaaaatacaagttaaatcgtaattggaatcccttttcccatcgtgtagtcaagagtctgtgccagacttgaaggctttactttgttagccatgtgtttatgaacccccagcgctttccctagatcttttggctgataatctcaaacatggaggatgcttctgaatcttcacgaggggttgctccattaattaataatgtagttctcccaggctctccgctgtctcttcctgtatcagtgacaggctgtaaaagtcatcgagtagccaataaaaaggtagaagcgaggagtgaaaagctcctcccaacagctcttcctccttcagagccgaaagtagatcagaaacttcccaggagctccgagaggcggggaagtggcggtgggacgcaattccccgcgcggagtcgggcagtggcagcgggagaagcggcagccaggggcgcggcggggccggagagaggcggtcccctgggaggacggggtctcccctcgttgcctttgtagtggagaaggtggacaagtggcagtcggcgtgatcgcagggaagcggggccggcgcgggcggccgagggtccaggcgagcccgcgggcggacgggagatgccgctgctacaccgaaagccgtttgtgagacagaagccgcccgcggacctgcggcccgacgaggaagttttctactgtaaagtcaccaacgagatcttccgccactacgatgacttttttgaacgaaccattctgtgcaacagccttgtgtggagttgtgctgtgacgggtagacctggactgacgtatcaggaagcacttgagtcagaaaaaaaagcaagacagaatcttcagagttttccagaaccactaattattccagttttatacttgaccagccttacccatcgttcgcgcttacatgaaatttgtgatgatatctttgcatatgtcaaggatcgatattttgtcgaagaaactgtggaagtcattaggaacaatggtgcaaggttgcagtgtaggattttggaagtcctccctccatcacatcaaaatggttttgctaatggacatgttaacagtgtggatggagaaactattatcatcagtgatagtgatgattcagaaacacaaagctgttcttttcaaaatgggaagaaaaaagatgcaattgatcccttactattcaagtataaagtgcaacccactaaaaaagaattacatgagtctgctattgttaaagcaacacaaatcagccggagaaaacacctattttctcgtgataaactaaagctttttctgaagcaacactgtgaaccacaagatggagtcattaaaataaaggcatcatctctttcaacgtataaaatagcagaacaagatttttcttatttcttccctgatgatccacccacatttatcttcagtcctgctaacagacgaagagggagacctcccaaacgaatacatattagtcaagaggacaatgttgctaataaacagactcttgcaagttataggagcaaagctactaaagaaagagataaacttttgaaacaagaagaaatgaagtcactggcttttgaaaaggctaaattaaaaagagaaaaagcagatgccctagaagcgaagaaaaaagaaaatatcataaaaagaacggaagattttttgtgtcggaccgagctgcgttactaacagacaaaaaaagcgcgagggcgcgccttcaaaaaatcttccccccgcgggacctaccatgctacctcccacatgtggtgtatgacagcgaaccttagataattatacaaacaatagccacggtggcagaccatacactaaaaggcatcaagaaacaaactctagctagaacttataacgacgtaataggacacaaccatgacactcctaggcatacgtacagaaatcagaacaacggataaggggatatgcgcacgacctatacaacgcaagaa

SEQ ID NO: 307266 - DNA, 2085 bp, Homo sapiens
taacgcctttcacaaatgtttattttgctaggtgtatgaacagttaaagccagcctgaaagataaaaaatactaactcttgatttcgatttcttacattttctgctccaaagtacaaaggaacttaaatttgaagttataaaacggatcccacattgtttctgtaattatcatttcgcagtattggtaataggaataacatctttgtcgaataaccattcctaaaacttacttttagactcattcttacatattaatttgcaaataagcaaatgttaaggacagtatcaaaaaagactttaaaacacatctagtgaacgttctgagttacttctagtttcgaaaattctattgaattccaaggtcacatgtattatgtacattaaacttgtttccctaaataaaagttactgatatgggaaagttgctttaggggaattttcgctagtaaatccataatccttaaaattctaagtgaattaaacattgatactttgcaaatatttacagcagtgtaaatattactttttaaaggtgcgttagtttcaagaatgctggggtcctacaagcatgatgacactttgtaacacatactttttttttggtcttttcctctgctttctaaatctcttaattgccataagtattaaatagaactgatgtcaaggtatcttctgttcaagatggatgtttactaaacatgcaaagtatttttagagatatagattctaatttggaagaagaaaaatagcaacaaattttcttattcatttcttttctcatctttaaaatacaagttaaatcgtaattggaatcccttttcccatcgtgtagtcaagagtctgtgccagacttgaaggctttactttgttagccatgtgtttatgaacccccagcgctttccctagatcttttggctgataatctcaaacatggaggatgcttctgaatcttcacgaggggttgctccattaattaataatgtagttctcccaggctctccgctgtctcttcctgtatcagtgacaggctgtaaaagtcatcgagtagccaataaaaaggtagaagcgaggagtgaaaagctcctcccaacagctcttcctccttcagagccgaaagtagatcagaaacttcccaggagctccgagagggcagtggcagcgggagaagcggcagccaggggcgcggcggggccggagagaggcggtcccctgggaggacggggtctcccctcgttgcctttgtagtggagaaggtggacaagtggcagtcggcgtgatcgcaggtgagggtcgctcgggagccggccggcgccggcggggaagtggaggcgagccgggaacaaagcggagcagctccggggtccgcccgcggcgagcgctctggcggcgttgggctggccggccggccagctgcgcgccgagcacgttgtgagcctggcggcggcggcgggcgaggagccggcgctgggggagggggccgccgccgctcccgcactgccccccgcggcggggcgtcctgccccattgtgaggcggcggcaggacgagaggaggtagggcgcgctcggggggcaggggcggcggcggctccgctcgctcgacacccgggcagcggcaggaacgaactcggctccggtagcggccgcggcgcgtcagtcacacaaaaggcagccgagcttctcccagcgcgcggaccggcccacgctgccgccgagggctccccaccttaccggctttcctttccctccaattttgatagggaagcggggccggcgcgggcggccgagggtccaggcgagcccgcgggcggacgggagatgccgctgctacaccgaaagccgtttgtgagacagaagccgcccgcggacctgcggcccgacgaggaagttttctactgtaaagtcaccaacgagatcttccgccactacgagtaagagccgggccgtgtgcggggccgcggggggtgtggggactccccccgcagcgctcttttgtctctctccttttcctcgccctgggcttctggcggggcgacttgaaagtgacgggtggcccccgggcccgcggttctctgcctcctggcct

SEQ ID NO: 307267 - DNA, 278 bp, Homo sapiens
cacttgatcctgggaagcaggatcagcctgggcagaagagtgaaactctgtctcaaaaaaaaaaaaaaaaagcttatgaatgattactacattatagttttataataatgtttgaagtactttccatgatttgattaaagacaagatgctaaaagtgaaatgtatatgtgcatcagatagactaccatatttcattttaacttttagaattcgtaaaaggaaggaagaaaaacttaaggagcaagaacaaaaaatgaaagagaaacaagaaaaactga

SEQ ID NO: 307268 - DNA, 441 bp, Homo sapiens
agagtcagtttcattctccttgaaatgttttcatagtaccttgaacttctcttgttttagtacttattacatattttttaaatgatttgtgtaattatctgttttctctgcaagaccaaaactgtgtcatgttgttcactacttcctaagcctataatgcctggtacttcataagcaagcaataaatatttcataaatggaattatatattcattagtaaatgtcatctttgtttttatcctaaagggaggaagaaagggaagattttgatactagcattgagagcaaagacacagagcaaaaggaattagatcaagatatggtcactgaagatgaagatgacccaggatcacataaaagaggcagaaggggtaatactgaaatttctttagggcattcttgtgtatttgtttttaaccaataaagcactttattaattca

SEQ ID NO: 307269 - DNA, 481 bp, Homo sapiens
aaatattcaagctttgatttgcactagaataaagtatttatttccttaaagatttaacagaggctttggatgaagatgcagaccccacaaaatctgcactgtctgcagttgcatctttggcagctgcatggccacagttacaccagggtatgtgtgggttttgttttttttttgtttggctttttatttttaattttataaaggcacatttacattgctgagtatttattgtttatattctaaatgactatttcatttttaacaactataggctgcagtttgaaaagtttggatcttgatagctgcactctttcagaaatcctcagactgcacatcttagcttcaggtgctgatgtaacatcagcaaatgcaaagtatagatatcaaaaacgaggaggatttgatgctacagatgatgcttgtatggagcttcgtttgagcaatcccagtctagtgaagaaactgtcaagcacctcagtgt

SEQ ID NO: 307270 - DNA, 850 bp, Homo sapiens
gcccggcctcgtgcccccgacgcgacccgcgccgcgtccgcggcggggagttgttgctgccgcgatgctggtggcggcggccgcggagcggaacaaggatcccatcttgcacgtgctgcggcagtacctggatccggcccagcgtggcgtccgcgtcctcgaggtggcctcgggctccggccagcacgcagcgcacttcgcgcgggccttccccctggccgagtggcagccgtcggacgtggaccagcgctgcctggacagcatcgcggccaccacgcaagcccagggcctgaccaacgtgaaggccccgctacacctggacgtgacgtggggctgggagcactggggcgggatcctgccacagtcgctggacctgttgctctgcatcaacatggcccatgtcagccccctgcgctgcacggaggggctcttcagagcagcaggacacctgctcaaacccagggccctgctcatcacctacgggccctatgccatcaatgggaagatctccccccagagcaacgtggactttgacctgatgctcagatgcaggaacccagaatgggggcttcgggacacagccctcctggaggacctgggaaaggccagtggcctgctcctggagaggatggtggacatgccagccaacaacaaatgcctgatcttccggaaaaactaagcccctccttcacccccgcacacctgcatccctgccggaggctctgtgaggcacgaaccctgcctccctaggccggaccttgtggacgacagccccacccagtctgtgctctcagccgctggccgaagggcccagcctgctcagaataaagcatgtcctgctgccggaaaa

SEQ ID NO: 307271 - DNA, 782 bp, Homo sapiens
gcccggcctcgtgcccccgacgcgacccgcgccgcgtccgcggcggggagttgttgctgccgcgatgctggtggcggcggccgcggagcggaacaaggatcccatcttgcacgtgctgcggcagtacctggatccggcccagcgtggcgtccgcgtcctcgaggtggcctcgggctccggccagcacgcagcgcacttcgcgcgggccttccccctggccgagtggcagccgtcggacgtggaccagcgctgcctggacagcatcgcggccaccacgcaagcccagggcctgaccaacgtgaaggccccgctacacctggacgtgacgtggggctgggagcactggggcgggatcctgccacagtcgctggacctgttgctctgcatcaacatggcccatgtcagccccctgcgctgcacggaggggctcttcagagcagcaggacacctgctcaaacccagggccctgctcatcacctacggggaacccagaatgggggcttcgggacacagccctcctggaggacctgggaaaggccagtggcctgctcctggagaggatggtggacatgccagccaacaacaaatgcctgatcttccggaaaaactaagcccctccttcacccccgcacacctgcatccctgccggaggctctgtgaggcacgaaccctgcctccctaggccggaccttgtggacgacagccccacccagtctgtgctctcagccgctggccgaagggcccagcctgctcagaataaagcatgtcctgctgccggaaaa

SEQ ID NO: 307272 - DNA, 559 bp, Homo sapiens
gcccggcctcgtgcccccgacgcgacccgcgccgcgtccgcggcggggagttgttgctgccgcgatgctggtggcggcggccgcggagcggaacaaggatcccatcttgcacgtgctgcggcagtacctggatccggcccagcgtggcgtccgcgtcctcgaggtggcctcgggctccggccagcacgcagcgcacttcgcgcgggccttccccctggccgagtggcagccgtcggacgtggaccagcgctgcctggacaggaacccagaatgggggcttcgggacacagccctcctggaggacctgggaaaggccagtggcctgctcctggagaggatggtggacatgccagccaacaacaaatgcctgatcttccggaaaaactaagcccctccttcacccccgcacacctgcatccctgccggaggctctgtgaggcacgaaccctgcctccctaggccggaccttgtggacgacagccccacccagtctgtgctctcagccgctggccgaagggcccagcctgctcagaataaagcatgtcctgctgccggaaaa

SEQ ID NO: 307273 - DNA, 994 bp, Homo sapiens
gcccggcctcgtgcccccgacgcgacccgcgccgcgtccgcggcggggagttgttgctgccgcgatgctggtggcggcggccgcggagcggaacaaggatcccatcttgcacgtgctgcggcagtacctggatccggcccagcgtggcgtccgcgtcctcgaggtggcctcgggctccggccagcacgcagcgcacttcgcgcgggccttccccctggccgagtggcagccgtcggacgtggaccagcgctgcctggacaggaacccagaatgggggcttcgggacacagccctcctggaggacctgggaaaggccagtggcctgctcctggagaggatggtggacatgccagccaacaacaaatgcctgatcttccggaaaaactaagcccctccttcacccccgcacacctgcatccctgccggaggctctgtgaggcacgaaccctgcctccctaggccggaccttgtggacgacagccccacccagtctgtgctctcagccgctggccgaagggcccagcctgctcagaataaagcatgtcctgctgccggaaaaaaaaaacaacaaaaaaaaaaaaccaacaaacaacaaaaccaaccaccaaacaatagaacattaggcacacacaatagcgaagctacaaaaaaaaccatatataataacagagaaaataacaaaagcgtatatgcagcgcagaaacaattgaataagacagacataataataccaagactctcacaaactagggtggatgttatacatagcgggagaggaacagaccgtgtaagacaaaccagaaatcatgtagtcgtgacacacgaagtagacgagtgaacgaaatctctatatggattcgacgcaaccaagaccgaccgagctgacctgtgactgaacgaacagtagcagtcgaagacttcataagcaagatgctgattcatcgcgagtgaagcatgacaatactcgcagagatagctgcaaggacacatgcta

SEQ ID NO: 307274 - DNA, 751 bp, Homo sapiens
gcccggcctcgtgcccccgacgcgacccgcgccgcgtccgcggcggggagttgttgctgccgcgatgctggtggcggcggccgcggagcggaacaaggatcccatcttgcacgtgctgcggcagtacctggatccggcccagcgtggcgtccgcgtcctcgaggtggcctcgggctccggccagcacgcagcgcacttcgcgcgggccttccccctggccgagtggcagccgtcggacgtggaccagcgctgcctggacaggggctcttcagagcagcaggacacctgctcaaacccagggccctgctcatcacctacggggaacccagaatgggggcttcgggacacagccctcctggaggacctgggaaaggccagtggcctgctcctggagaggatggtggacatgccagccaacaacaaatgcctgatcttccggaaaaactaagcccctccttcacccccgcacacctgcatccctgccggaggctctgtgaggcacgaaccctgcctccctaggccggaccttgtggacgacagccccacccagtctggtggcctctcaggcccgcttgggacggaaagggcccaaggccctggctcaggaaataaggctttgtccttggctggcccaaaaacacgacacagacagacacaacacagcacacaaaacaaaagaaacacatatgtgcgaggcgccgcacagcggcaagcgctctctgaaacagaacatattatcatcaaacagcgt

SEQ ID NO: 307275 - DNA, 1308 bp, Homo sapiens
gcccggcctcgtgcccccgacgcgacccgcgccgcgtccgcggcggggagttgttgctgccgcgatgctggtggcggcggccgcggagcggaacaaggatcccatcttgcacgtgctgcggcagtacctggatccggcccagcgtggcgtccgcgtcctcgaggtggcctcgggctccggccagcacgcagcgcacttcgcgcgggccttccccctggccgagtggcagccgtcggacgtggaccagcgctgcctggacagcatcgcggccaccacgcaagcccagggcctgaccaacgtgaaggccccgctacacctggacgtgacgtggggctgggagcactggggcgggatcctgccacagtcgctggacctgttgctctgcatcaacatggcccatgtcagccccctgcgctgcacggaggggctcttcagagcagcaggacacctgctcaaacccagggccctgctcatcacctacgggccctatgccatcaatgggaagatctccccccagagcaacgtggactttgacctgatgctcagatgcaggaacccagaatgggggcttcgggacacagccctcctggaggacctgggaaaggccagtggcctgctcctggagaggatggtggacatgccagccaacaacaaatgcctgatcttccggaaaaactaagcccctccttcacccccgcacacctgcatccctgccggaggctctgtgaggcacgaaccctgcctccctaggccggaccttgtggacgacagccccacccagtctgtgctctcagccgctggccgaagggcccagcctgctcagaataaagcatgtcctgctgccggaaaaaaaaaaaaaaaaaaaaaaaaaaaaaaaaaaagggggggggggcttaaaaatttcccccggggggggccaaattttgcgggttccccagagtttctgtgtgtgaacaaaggggggcccctataagggggggctgtctatatatataggatagcgactgtgggcgagggggtttacacaaaggtctgggacaggggaaaactgtggctaaccgtgggaacttttggggggagggacccttatatttccggggggggggaggcaacattattgtggggcaaaatctctccctctacaagaatttttacaacggccccaaggggggaacatttgtaaactttctaaaagggcgatacaccgtgggtgtcaaaaactaaaggggaatatatagcgctggcgtgcttaaaaaaggttgggaaacacgggagagttctgttgtcggaacaacttttttcccgggg

SEQ ID NO: 307276 - DNA, 924 bp, Homo sapiens
gcccggcctcgtgcccccgacgcgacccgcgccgcgtccgcggcggggagttgttgctgccgcgatgctggtggcggcggccgcggagcggaacaaggatcccatcttgcacgtgctgcggcagtacctggatccggcccagcgtggcgtccgcgtcctcgaggtggcctcgggctccggccagcacgcagcgcacttcgcgcgggccttccccctggccgagtggcagccgtcggacgtggaccagcgctgcctggacagcatcgcggccaccacgcaagcccagggcctgaccaacgtgaaggccccgctacacctggacgtgacgtggggctgggagcactggggcgggatcctgccacagtcgctggacctgttgctctgcatcaacatggcccatgtcagccccctgcgctgcacggaggggctcttcagagcagcaggacacctgctcaaacccagggccctgctcatcacctacgggccctatgccatcaatgggaagatctccccccagagcaacgtggactttgacctgatgctcagatgcaggaacccagaatgggggcttcgggacacagccctcctggaggacctgggaaaggccagtggcctgctcctggagaggatggtaggtgggggagcgggggcccaggcaacctctctaggggttgagggccgtcctccagcaaagtgtttctccaggtggacatgccagccaacaacaaatgcctgatcttccggaaaaactaagcccctccttcacccccgcacacctgcatccctgccggaggctctgtgaggcacgaaccctgcctccctaggccggaccttgtggacgacagccccacccagtctgtgctctcagccgctggccgaagggcccagcctgctcagaataaagcatgtcctgctgccggaaaa

SEQ ID NO: 307277 - DNA, 1136 bp, Homo sapiens
  misc_feature (972)..(972): n is a, c, g, or t
gcccggcctcgtgcccccgacgcgacccgcgccgcgtccgcggcggggagttgttgctgccgcgatgctggtggcggcggccgcggagcggaacaaggatcccatcttgcacgtgctgcggcagtacctggatccggcccagcgtggcgtccgcgtcctcgaggtggcctcgggctccggccagcacgcagcgcacttcgcgcgggccttccccctggccgagtggcagccgtcggacgtggaccagcgctgcctggacagcatcgcggccaccacgcaagcccagggcctgaccaacgtgaaggccccgctacacctggacgtgacgtggggctgggagcactggggcgggatcctgccacagtcgctggacctgttgctctgcatcaacatggcccatgtcagccccctgcgctgcacggaggggctcttcagagcagcaggacacctgctcaaacccagggccctgctcatcacctacggggaacccagaatgggggcttcgggacacagccctcctggaggacctgggaaaggccagtggcctgctcctggagaggatggtggacatgccagccaacaacaaatgcctgatcttccggaaaaactaagcccctccttcacccccgcacacctgcatccctgccggaggctctgtgaggcacgaaccctgcctccctaggccggaccttgtggacgacagccccacccagtctgtgctctcagccgctggccgaagggcccagcctgctcagaataaagcatgtcctgctgccggaaaaaaaaaaaaaaaaaaaaaaaaaaatccggggcttcttttcgggggggggaaaaaggggttttgaagggccttggccaagggtttccggacccgtttttttgtccccgggggaaatcggcgggcccccaacagggaggcggataaattccgacgaggccaggttaaaccggatagaaatcggcggaaacagnccgggcaaaacccgcgccaatagcgaggtgtgtcggacaccacggagccaaggaaccatgcgcaaaaccggcgtgaccaaaaaaacacgaaccgggggatgcgcgaaacaaacctctacacaggagcccagagagaccaaaggtcacgacgaggccactaaatg

SEQ ID NO: 307278 - DNA, 1172 bp, Homo sapiens
gcccggcctcgtgcccccgacgcgacccgcgccgcgtccgcggcggggagttgttgctgccgcgatgctggtggcggcggccgcggagcggaacaaggatcccatcttgcacgtgctgcggcagtacctggatccggcccagcgtggcgtccgcgtcctcgaggtggcctcgggctccggccagcacgcagcgcacttcgcgcgggccttccccctggccgagtggcagccgtcggacgtggaccagcgctgcctggacagcatcgcggccaccacgcaagcccagggcctgaccaacgtgaaggccccgctacacctggacgtgacgtggggctgggagcactggggcgggatcctgccacagtcgctggacctgttgctctgcatcaacatggcccatgtcagccccctgcgctgcacggaggggctcttcagagcagcaggacacctgctcaaacccagggccctgctcatcacctacggggtgagtgggcctgtccacggcgggcctcccgctcccagtcctagctgctgtctcctgccctgctgagagtcctccctcctgggctccctgccccccgcccagccaccagcacggcctcccctccacttccagtctgtacccctccctgggtcatctgccagcctccctacccccttgcccaccaggctggccttggctgactccctcttggggacagggagggggtgccctttcattctccaaaccccagcctgcaagtctgtcccaggctctctgggaaataccccgaccttggtccagtgggctgtgtccccatgcccacccctatgccatcaatgggaagatctccccccagagcaacgtggactttgacctgatgctcagatgcaggaacccagaatgggggcttcgggacacagccctcctggaggacctgggaaaggccagtggcctgctcctggagaggatggtggacatgccagccaacaacaaatgcctgatcttccggaaaaactaagcccctccttcacccccgcacacctgcatccctgccggaggctctgtgaggcacgaaccctgcctccctaggccggaccttgtggacgacagccccacccagtctgtgctctcagccgctggccgaagggcccagcctgctcagaataaagcatgtcctgctgccggaaaa

SEQ ID NO: 307279 - DNA, 955 bp, Homo sapiens
gcccggcctcgtgcccccgacgcgacccgcgccgcgtccgcggcggggagttgttgctgccgcgatgctggtggcggcggccgcggagcggaacaaggatcccatcttgcacgtgctgcggcagtacctggatccggcccagcgtggcgtccgcgtcctcgaggtggcctcgggctccggccagcacgcagcgcacttcgcgcgggccttccccctggccgagtggcagccgtcggacgtggaccagcgctgcctggacagcatcgcggccaccacgcaagcccagggcctgaccaacgtgaaggccccgctacacctggacgtgacgtggggctgggagcactggggcgggatcctgccacagtcgctggacctgttgctctgcatcaacatggcccatgtcagccccctgcgctgcacggaggggctcttcagagcagcaggacacctgctcaaacccagggccctgctcatcacctacgggggagggggtgccctttcattctccaaaccccagcctgcaagtctgtcccaggctctctgggaaataccccgaccttggtccagtgggctgtgtccccatgcccacccctatgccatcaatgggaagatctccccccagagcaacgtggactttgacctgatgctcagatgcaggaacccagaatgggggcttcgggacacagccctcctggaggacctgggaaaggccagtggcctgctcctggagaggatggtggacatgccagccaacaacaaatgcctgatcttccggaaaaactaagcccctccttcacccccgcacacctgcatccctgccggaggctctgtgaggcacgaaccctgcctccctaggccggaccttgtggacgacagccccacccagtctgtgctctcagccgctggccgaagggcccagcctgctcagaataaagcatgtcctgctgccggaaaa

SEQ ID NO: 307280 - DNA, 1169 bp, Homo sapiens
gcccggcctcgtgcccccgacgcgacccgcgccgcgtccgcggcggggagttgttgctgccgcgatgctggtggcggcggccgcggagcggaacaaggatcccatcttgcacgtgctgcggcagtacctggatccggcccagcgtggcgtccgcgtcctcgaggtggcctcgggctccggccagcacgcagcgcacttcgcgcgggccttccccctggccgagtggcagccgtcggacgtggaccagcgctgcctggacaggtgcggcccccggggcggccacttctatcggtgcggcggtccggggcctcaagagcccacggcccgcagccccggaggaaaaggatgcggctcgggctctgagggtgcggggtgggagcctgggggtgcccccggggcaggccctagctgtgcggcccccgcggctgcggaagtgggtggacctcggggtcccccttcccagccgctttggtctccgctcctcaacgtgccccccagcctcccctaagaaattctgtgggggcgtcggaaaggcgggtgcacaggactcggcccccacccaagcgttcgcctcctgcagcatcgcggccaccacgcaagcccagggcctgaccaacgtgaaggccccgctacacctggacgtgacgtggggctgggagcactggggcgggatcctgccacagtcgctggacctgttgctctgcatcaacatggcccatgtcagccccctgcgctgcacggaggggctcttcagagcagcaggacacctgctcaaacccagggccctgctcatcacctacgggccctatgccatcaatgggaagatctccccccagagcaacgtggactttgacctgatgctcagatgcaggaacccagaatgggggcttcgggacacagccctcctggaggacctgggaaaggccagtggcctgctcctggagaggatggtggacatgccagccaacaacaaatgcctgatcttccggaaaaactaagcccctccttcacccccgcacacctgcatccctgccggaggctctgtgaggcacgaaccctgcctccctaggccggaccttgtggacgacagccccacccagtctgtgctctcagccgctggccgaagggcccagcctgctcagaataaagcatgtcctgctgccggaaaa

SEQ ID NO: 307281 - DNA, 941 bp, Homo sapiens
gcccggcctcgtgcccccgacgcgacccgcgccgcgtccgcggcggggagttgttgctgccgcgatgctggtggcggcggccgcggagcggaacaaggatcccatcttgcacgtgctgcggcagtacctggatccggcccagcgtggcgtccgcgtcctcgaggtggcctcgggctccggccagcacgcagcgcacttcgcgcgggccttccccctggccgagtggcagccgtcggacgtggaccagcgctgcctggacagcatcgcggccaccacgcaagcccagggcctgaccaacgtgaaggccccgctacacctggacgtgacgtggggctgggagcactggggcgggatcctgccacagtcgctggacctgttgctctgcatcaacatggcccatgtcagccccctgcgctgcacggaggggctcttcagagcagcaggacacctgctcaaacccagggccctgctcatcacctacgggccctatgccatcaatgggaagatctccccccagagcaacgtggactttgacctgatgctcagatgcaggtcagagctagaggcggggggtctggctcaggtggcaggtggcttgggtggcaccccccaggccatgactccatctccccaccctctgcaggaacccagaatgggggcttcgggacacagccctcctggaggacctgggaaaggccagtggcctgctcctggagaggatggtggacatgccagccaacaacaaatgcctgatcttccggaaaaactaagcccctccttcacccccgcacacctgcatccctgccggaggctctgtgaggcacgaaccctgcctccctaggccggaccttgtggacgacagccccacccagtctgtgctctcagccgctggccgaagggcccagcctgctcagaataaagcatgtcctgctgccggaaaa

SEQ ID NO: 307282 - DNA, 944 bp, Homo sapiens
gcccggcctcgtgcccccgacgcgacccgcgccgcgtccgcggcggggagttgttgctgccgcgatgctggtggcggcggccgcggagcggaacaaggatcccatcttgcacgtgctgcggcagtacctggatccggcccagcgtggcgtccgcgtcctcgaggtggcctcgggctccggccagcacgcagcgcacttcgcgcgggccttccccctggccgagtggcagccgtcggacgtggaccagcgctgcctggacagcatcgcggccaccacgcaagcccagggcctgaccaacgtgaaggccccgctacacctggacgtgacgtggggctgggagcactggggcgggatcctgccacagtcgctggacctgttgctctgcatcaacatggcccatgtcagccccctgcgctgcacggaggtctgtggggagcccagcatgggtgtctgccgtggcaccactcaccctgcatgggggcagctgggatgccagatttgcccccatcacagtcggggggctcttcagagcagcaggacacctgctcaaacccagggccctgctcatcacctacgggccctatgccatcaatgggaagatctccccccagagcaacgtggactttgacctgatgctcagatgcaggaacccagaatgggggcttcgggacacagccctcctggaggacctgggaaaggccagtggcctgctcctggagaggatggtggacatgccagccaacaacaaatgcctgatcttccggaaaaactaagcccctccttcacccccgcacacctgcatccctgccggaggctctgtgaggcacgaaccctgcctccctaggccggaccttgtggacgacagccccacccagtctgtgctctcagccgctggccgaagggcccagcctgctcagaataaagcatgtcctgctgccggaaaa

SEQ ID NO: 307283 - DNA, 1762 bp, Homo sapiens
gcccggcctcgtgcccccgacgcgacccgcgccgcgtccgcggcggggagttgttgctgccgcgatgctggtggcggcggccgcggagcggaacaaggatcccatcttgcacgtgctgcggcagtacctggatccggcccagcgtggcgtccgcgtcctcgaggtggcctcgggctccggccagcacgcagcgcacttcgcgcgggccttccccctggccgagtggcagccgtcggacgtggaccagcgctgcctggacaggtgcggcccccggggcggccacttctatcggtgcggcggtccggggcctcaagagcccacggcccgcagccccggaggaaaaggatgcggctcgggctctgagggtgcggggtgggagcctgggggtgcccccggggcaggccctagctgtgcggcccccgcggctgcggaagtgggtggacctcggggtcccccttcccagccgctttggtctccgctcctcaacgtgccccccagcctcccctaagaaattctgtgggggcgtcggaaaggcgggtgcacaggactcggcccccacccaagcgttcgcctcctgcagcatcgcggccaccacgcaagcccagggcctgaccaacgtgaaggccccgctacacctggacgtgacgtggggctgggagcactggggcgggatcctgccacagtcgctggacctgttgctctgcatcaacatggcccatgtcagccccctgcgctgcacggaggtctgtggggagcccagcatgggtgtctgccgtggcaccactcaccctgcatgggggcagctgggatgccagatttgcccccatcacagtcggggtgagggtctccagcctcccccatcacagtcggggtgagggtctccagcctcccccatcacagtcggggtgagggtctccagcctcccccatcacagtcggggtgagggtctccagcctcagggcctggcttctgttgggggcagcacctcactgccgtcctgttcctactcaccaggggctcttcagagcagcaggacacctgctcaaacccagggccctgctcatcacctacggggtgagtgggcctgtccacggcgggcctcccgctcccagtcctagctgctgtctcctgccctgctgagagtcctccctcctgggctccctgccccccgcccagccaccagcacggcctcccctccacttccagtctgtacccctccctgggtcatctgccagcctccctacccccttgcccaccaggctggccttggctgactccctcttggggacagggagggggtgccctttcattctccaaaccccagcctgcaagtctgtcccaggctctctgggaaataccccgaccttggtccagtgggctgtgtccccatgcccacccctatgccatcaatgggaagatctccccccagagcaacgtggactttgacctgatgctcagatgcaggaacccagaatgggggcttcgggacacagccctcctggaggacctgggaaaggccagtggcctgctcctggagaggatggtggacatgccagccaacaacaaatgcctgatcttccggaaaaactaagcccctccttcacccccgcacacctgcatccctgccggaggctctgtgaggcacgaaccctgcctccctaggccggaccttgtggacgacagccccacccagtctgtgctctcagccgctggccgaagggcccagcctgctcagaataaagcatgtcctgctgccggaaaa

SEQ ID NO: 307284 - DNA, 1274 bp, Homo sapiens
gcccggcctcgtgcccccgacgcgacccgcgccgcgtccgcggcggggagttgttgctgccgcgatgctggtggcggcggccgcggagcggaacaaggatcccatcttgcacgtgctgcggcagtacctggatccggcccagcgtggcgtccgcgtcctcgaggtggcctcgggctccggccagcacgcagcgcacttcgcgcgggccttccccctggccgagtggcagccgtcggacgtggaccagcgctgcctggacaggtgcggcccccggggcggccacttctatcggtgcggcggtccggggcctcaagagcccacggcccgcagccccggaggaaaaggatgcggctcgggctctgagggtgcggggtgggagcctgggggtgcccccggggcaggccctagctgtgcggcccccgcggctgcggaagtgggtggacctcggggtcccccttcccagccgctttggtctccgctcctcaacgtgccccccagcctcccctaagaaattctgtgggggcgtcggaaaggcgggtgcacaggactcggcccccacccaagcgttcgcctcctgcagcatcgcggccaccacgcaagcccagggcctgaccaacgtgaaggccccgctacacctggacgtgacgtggggctgggagcactggggcgggatcctgccacagtcgctggacctgttgctctgcatcaacatggcccatgtcagccccctgcgctgcacggaggggctcttcagagcagcaggacacctgctcaaacccagggccctgctcatcacctacgggggagggggtgccctttcattctccaaaccccagcctgcaagtctgtcccaggctctctgggaaataccccgaccttggtccagtgggctgtgtccccatgcccacccctatgccatcaatgggaagatctccccccagagcaacgtggactttgacctgatgctcagatgcaggaacccagaatgggggcttcgggacacagccctcctggaggacctgggaaaggccagtggcctgctcctggagaggatggtggacatgccagccaacaacaaatgcctgatcttccggaaaaactaagcccctccttcacccccgcacacctgcatccctgccggaggctctgtgaggcacgaaccctgcctccctaggccggaccttgtggacgacagccccacccagtctgtgctctcagccgctggccgaagggcccagcctgctcagaataaagcatgtcctgctgccggaaaa

SEQ ID NO: 307285 - DNA, 826 bp, Homo sapiens
gcccggcctcgtgcccccgacgcgacccgcgccgcgtccgcggcggggagttgttgctgccgcgatgctggtggcggcggccgcggagcggaacaaggatcccatcttgcacgtgctgcggcagtacctggatccggcccagcgtggcgtccgcgtcctcgaggtggcctcgggctccggccagcacgcagcgcacttcgcgcgggccttccccctggccgagtggcagccgtcggacgtggaccagcgctgcctggacagcatcgcggccaccacgcaagcccagggcctgaccaacgtgaaggccccgctacacctggacgtgacgtggggctgggagcactggggcgggatcctgccacagtcgctggacctgttgctctgcatcaacatggcccatgtcagccccctgcgctgcacggaggggctcttcagagcagcaggacacctgctcaaacccagggccctgctcatcacctacgggtccccccagagcaacgtggactttgacctgatgctcagatgcaggaacccagaatgggggcttcgggacacagccctcctggaggacctgggaaaggccagtggcctgctcctggagaggatggtggacatgccagccaacaacaaatgcctgatcttccggaaaaactaagcccctccttcacccccgcacacctgcatccctgccggaggctctgtgaggcacgaaccctgcctccctaggccggaccttgtggacgacagccccacccagtctgtgctctcagccgctggccgaagggcccagcctgctcagaataaagcatgtcctgctgccggaaaa

SEQ ID NO: 307286 - DNA, 964 bp, Homo sapiens
gcccggcctcgtgcccccgacgcgacccgcgccgcgtccgcggcggggagttgttgctgccgcgatgctggtggcggcggccgcggagcggaacaaggatcccatcttgcacgtgctgcggcagtacctggatccggcccagcgtggcgtccgcgtcctcgaggtggcctcgggacacagccctcctggaggacctgggaaaggccagtggcctgctcctggagaggatggtggacatgccagccaacaacaaatgcctgatcttccggaaaaactaagcccctccttctccggccagcacgcagcgcacttcgcgcgggccttccccctggccgagtggcagccgtcggacgtggaccagcgctgcctggacagcatcgcggccaccacgcaagcccagggcctgaccaacgtgaaggccccgctacacctggacgtgacgtggggctgggagcactggggcgggatcctgccacagtcgctggacctgttgctctgcatcaacatggcccatgtcagccccctgcgctgcacggaggggctcttcagagcagcaggacacctgctcaaacccagggccctgctcatcacctacgggccctatgccatcaatgggaagatctccccccagagcaacgtggactttgacctgatgctcagatgcaggaacccagaatgggggcttcgggacacagccctcctggaggacctgggaaaggccagtggcctgctcctggagaggatggtggacatgccagccaacaacaaatgcctgatcttccggaaaaactaagcccctccttcacccccgcacacctgcatccctgccggaggctctgtgaggcacgaaccctgcctccctaggccggaccttgtggacgacagccccacccagtctgtgctctcagccgctggccgaagggcccagcctgctcagaataaagcatgtcctgctgccggaaaa

SEQ ID NO: 307287 - DNA, 687 bp, Homo sapiens
gcccggcctcgtgcccccgacgcgacccgcgccgcgtccgcggcggggagttgttgctgccgcgatgctggtggcggcggccgcggagcggaacaaggatcccatcttgcacgtgctgcggcagtacctggatccggcccagcgtggcgtccgcgtcctcgaggtggcctcgggctccggccagcacgcagcgcacttcgcgcgggccttccccctggccgagtggcagccgtcggacgtggaccagcgctgcctggacaggggctcttcagagcagcaggacacctgctcaaacccagggccctgctcatcacctacgggccctatgccatcaatgggaagatctccccccagagcaacgtggactttgacctgatgctcagatgcaggaacccagaatgggggcttcgggacacagccctcctggaggacctgggaaaggccagtggcctgctcctggagaggatggtggacatgccagccaacaacaaatgcctgatcttccggaaaaactaagcccctccttcacccccgcacacctgcatccctgccggaggctctgtgaggcacgaaccctgcctccctaggccggaccttgtggacgacagccccacccagtctgtgctctcagccgctggccgaagggcccagcctgctcagaataaagcatgtcctgctgccggaaaa

SEQ ID NO: 307288 - DNA, 792 bp, Homo sapiens
gcccggcctcgtgcccccgacgcgacccgcgccgcgtccgcggcggggagttgttgctgccgcgatgctggtggcggcggccgcggagcggaacaaggatcccatcttgcacgtgctgcggcagtacctggatccggcccagcgtggcgtccgcgtcctcgaggtggcctcgggctccggccagcacgcagcgcacttcgcgcgggccttccccctggccgagtggcagccgtcggacgtggaccagcgctgcctggacaggggctcttcagagcagcaggacacctgctcaaacccagggccctgctcatcacctacgggggagggggtgccctttcattctccaaaccccagcctgcaagtctgtcccaggctctctgggaaataccccgaccttggtccagtgggctgtgtccccatgcccacccctatgccatcaatgggaagatctccccccagagcaacgtggactttgacctgatgctcagatgcaggaacccagaatgggggcttcgggacacagccctcctggaggacctgggaaaggccagtggcctgctcctggagaggatggtggacatgccagccaacaacaaatgcctgatcttccggaaaaactaagcccctccttcacccccgcacacctgcatccctgccggaggctctgtgaggcacgaaccctgcctccctaggccggaccttgtggacgacagccccacccagtctgtgctctcagccgctggccgaagggcccagcctgctcagaataaagcatgtcctgctgccggaaaa

SEQ ID NO: 307289 - DNA, 1009 bp, Homo sapiens
gcccggcctcgtgcccccgacgcgacccgcgccgcgtccgcggcggggagttgttgctgccgcgatgctggtggcggcggccgcggagcggaacaaggatcccatcttgcacgtgctgcggcagtacctggatccggcccagcgtggcgtccgcgtcctcgaggtggcctcgggctccggccagcacgcagcgcacttcgcgcgggccttccccctggccgagtggcagccgtcggacgtggaccagcgctgcctggacaggggctcttcagagcagcaggacacctgctcaaacccagggccctgctcatcacctacggggtgagtgggcctgtccacggcgggcctcccgctcccagtcctagctgctgtctcctgccctgctgagagtcctccctcctgggctccctgccccccgcccagccaccagcacggcctcccctccacttccagtctgtacccctccctgggtcatctgccagcctccctacccccttgcccaccaggctggccttggctgactccctcttggggacagggagggggtgccctttcattctccaaaccccagcctgcaagtctgtcccaggctctctgggaaataccccgaccttggtccagtgggctgtgtccccatgcccacccctatgccatcaatgggaagatctccccccagagcaacgtggactttgacctgatgctcagatgcaggaacccagaatgggggcttcgggacacagccctcctggaggacctgggaaaggccagtggcctgctcctggagaggatggtggacatgccagccaacaacaaatgcctgatcttccggaaaaactaagcccctccttcacccccgcacacctgcatccctgccggaggctctgtgaggcacgaaccctgcctccctaggccggaccttgtggacgacagccccacccagtctgtgctctcagccgctggccgaagggcccagcctgctcagaataaagcatgtcctgctgccggaaaa

SEQ ID NO: 307290 - DNA, 890 bp, Homo sapiens
gcccggcctcgtgcccccgacgcgacccgcgccgcgtccgcggcggggagttgttgctgccgcgatgctggtggcggcggccgcggagcggaacaaggatcccatcttgcacgtgctgcggcagtacctggatccggcccagcgtggcgtccgcgtcctcgaggtggcctcgggctccggccagcacgcagcgcacttcgcgcgggccttccccctggccgagtggcagccgtcggacgtggaccagcgctgcctggacagcatcgcggccaccacgcaagcccagggcctgaccaacgtgaaggccccgctacacctggacgtgacgtggggctgggagcactggggcgggatcctgccacagtcgctggacctgttgctctgcatcaacatggcccatgtcagccccctgcgctgcacggaggtctgtggggagcccagcatgggtgtctgccgtggcaccactcaccctgcatgggggcagctgggatgccagatttgcccccatcacagtcggggaacccagaatgggggcttcgggacacagccctcctggaggacctgggaaaggccagtggcctgctcctggagaggatggtaggtgggggagcgggggcccaggcaacctctctaggggttgagggccgtcctccagcaaagtgtttctccaggtggacatgccagccaacaacaaatgcctgatcttccggaaaaactaagcccctccttcacccccgcacacctgcatccctgccggaggctctgtgaggcacgaaccctgcctccctaggccggaccttgtggacgacagccccacccagtctgtgctctcagccgctggccgaagggcccagcctgctcagaataaagcatgtcctgctgccggaaaa

SEQ ID NO: 307291 - DNA, 722 bp, Homo sapiens
gcccggcctcgtgcccccgacgcgacccgcgccgcgtccgcggcggggagttgttgctgccgcgatgctggtggcggcggccgcggagcggaacaaggatcccatcttgcacgtgctgcggcagtacctggatccggcccagcgtggcgtccgcgtcctcgaggtggcctcgggctccggccagcacgcagcgcacttcgcgcgggccttccccctggccgagtggcagccgtcggacgtggaccagcgctgcctggacagcatcgcggccaccacgcaagcccagggcctgaccaacgtgaaggccccgctacacctggacgtgacgtggggctgggagcactggggcgggatcctgccacagtcgctggacctgttgctctgcatcaacatggcccatgtcagccccctgcgctgcacggaggaacccagaatgggggcttcgggacacagccctcctggaggacctgggaaaggccagtggcctgctcctggagaggatggtggacatgccagccaacaacaaatgcctgatcttccggaaaaactaagcccctccttcacccccgcacacctgcatccctgccggaggctctgtgaggcacgaaccctgcctccctaggccggaccttgtggacgacagccccacccagtctgtgctctcagccgctggccgaagggcccagcctgctcagaataaagcatgtcctgctgccggaaaa

SEQ ID NO: 307292 - DNA, 1372 bp, Homo sapiens
gcccggcctcgtgcccccgacgcgacccgcgccgcgtccgcggcggggagttgttgctgccgcgatgctggtggcggcggccgcggagcggaacaaggatcccatcttgcacgtgctgcggcagtacctggatccggcccagcgtggcgtccgcgtcctcgaggtggcctcgggctccggccagcacgcagcgcacttcgcgcgggccttccccctggccgagtggcagccgtcggacgtggaccagcgctgcctggacaggtgcggcccccggggcggccacttctatcggtgcggcggtccggggcctcaagagcccacggcccgcagccccggaggaaaaggatgcggctcgggctctgagggtgcggggtgggagcctgggggtgcccccggggcaggccctagctgtgcggcccccgcggctgcggaagtgggtggacctcggggtcccccttcccagccgctttggtctccgctcctcaacgtgccccccagcctcccctaagaaattctgtgggggcgtcggaaaggcgggtgcacaggactcggcccccacccaagcgttcgcctcctgcagcatcgcggccaccacgcaagcccagggcctgaccaacgtgaaggccccgctacacctggacgtgacgtggggctgggagcactggggcgggatcctgccacagtcgctggacctgttgctctgcatcaacatggcccatgtcagccccctgcgctgcacggaggtctgtggggagcccagcatgggtgtctgccgtggcaccactcaccctgcatgggggcagctgggatgccagatttgcccccatcacagtcggggtgagggtctccagcctcccccatcacagtcggggtgagggtctccagcctcccccatcacagtcggggtgagggtctccagcctcccccatcacagtcggggtgagggtctccagcctcagggcctggcttctgttgggggcagcacctcactgccgtcctgttcctactcaccaggggctcttcagagcagcaggacacctgctcaaacccagggccctgctcatcacctacggggaacccagaatgggggcttcgggacacagccctcctggaggacctgggaaaggccagtggcctgctcctggagaggatggtggacatgccagccaacaacaaatgcctgatcttccggaaaaactaagcccctccttcacccccgcacacctgcatccctgccggaggctctgtgaggcacgaaccctgcctccctaggccggaccttgtggacgacagccccacccagtctgtgctctcagccgctggccgaagggcccagcctgctcagaataaagcatgtcctgctgccggaaaa

SEQ ID NO: 307293 - DNA, 566 bp, Homo sapiens
atcagccacaggccaggccaggtcaggagaaattctcctaggcactgccaggccaggaaggcccagctgcatctgggccctgccagaatgtggcacaagaaagtggatgggcataggggtagttctacctagtttattgtttctcaagaagggcctcctatgggaaagcacctaacaaggaggttgtggacatgggatgtccctatgccatcaatgggaagatctccccccagagcaacgtggactttgacctgatgctcagatgcaggaacccagaatgggggcttcgggacacagccctcctggaggacctgggaaaggccagtggcctgctcctggagaggatggtggacatgccagccaacaacaaatgcctgatcttccggaaaaactaagcccctccttcacccccgcacacctgcatccctgccggaggctctgtgaggcacgaaccctgcctccctaggccggaccttgtggacgacagccccacccagtctgtgctctcagccgctggccgaagggcccagcctgctcagaataaagcatgtcctgctgccggaaaa

SEQ ID NO: 307294 - DNA, 1203 bp, Homo sapiens
gcccggcctcgtgcccccgacgcgacccgcgccgcgtccgcggcggggagttgttgctgccgcgatgctggtggcggcggccgcggagcggaacaaggatcccatcttgcacgtgctgcggcagtacctggatccggcccagcgtggcgtccgcgtcctcgaggtggcctcgggctccggccagcacgcagcgcacttcgcgcgggccttccccctggccgagtggcagccgtcggacgtggaccagcgctgcctggacaggtgcggcccccggggcggccacttctatcggtgcggcggtccggggcctcaagagcccacggcccgcagccccggaggaaaaggatgcggctcgggctctgagggtgcggggtgggagcctgggggtgcccccggggcaggccctagctgtgcggcccccgcggctgcggaagtgggtggacctcggggtcccccttcccagccgctttggtctccgctcctcaacgtgccccccagcctcccctaagaaattctgtgggggcgtcggaaaggcgggtgcacaggactcggcccccacccaagcgttcgcctcctgcagcatcgcggccaccacgcaagcccagggcctgaccaacgtgaaggccccgctacacctggacgtgacgtggggctgggagcactggggcgggatcctgccacagtcgctggacctgttgctctgcatcaacatggcccatgtcagccccctgcgctgcacggaggaacccagaatgggggcttcgggacacagccctcctggaggacctgggaaaggccagtggcctgctcctggagaggatggtggacatgccagccaacaacaaatgcctgatcttccggcgtggcggggccttgtacgcgtacaaggccccgcacggagtacagtgtggccgtgcagacggcagtgaagcagagcgatggggagtacctggtgtccggctggagcgagacggtggagttctgcactggggattatgccaaggagcacctggctcagcttcaggagaaagctgagcagatcgcaggccgcatgctccgcttctccgtcttctaccgcaaccatcacaaggagtacttccagcatgccaggacccactgcgggaacatgctgcagccttacctgaaggacaacagcggcagccacggctcccccaccagcggtatgctccacggccttgtacg

SEQ ID NO: 307295 - DNA, 643 bp, Homo sapiens
gcccggcctcgtgcccccgacgcgacccgcgccgcgtccgcggcggggagttgttgctgccgcgatgctggtggcggcggccgcggagcggaacaaggatcccatcttgcacgtgctgcggcagtacctggatccggcccagcgtggcgtccgcgtcctcgaggtggcctcgggctccggccagcacgcagcgcacttcgcgcgggccttccccctggccgagtggcagccgtcggacgtggaccagcgctgcctggacagcatcgcggccaccacgcaagcccagggcctgaccaacgtgaaggccccgctacacctggacgtgacgtggggctgggagcactggggcgggatcctgccacagtcgctggacctgttgctctgcatcaacatggcccatgtcagccccctgcgctgcacggaggtggacatgccagccaacaacaaatgcctgatcttccggaaaaactaagcccctccttcacccccgcacacctgcatccctgccggaggctctgtgaggcacgaaccctgcctccctaggccggaccttgtggacgacagccccacccagtctgtgctctcagccgctggccgaagggcccagcctgctcagaataaagcatgtcctgctgccggaaaa

SEQ ID NO: 307296 - DNA, 619 bp, Homo sapiens
gcccggcctcgtgcccccgacgcgacccgcgccgcgtccgcggcggggagttgttgctgccgcgatgctggtggcggcggccgcggagcggaacaaggatcccatcttgcacgtgctgcggcagtacctggatccggcccagcgtggcgtccgcgtcctcgaggtggcctcgggctccggccagcacgcagcgcacttcgcgcgggccttccccctggccgagtggcagccgtcggacgtggaccagcgctgcctggacaggggctcttcagagcagcaggacacctgctcaaacccagggccctgctcatcacctacggggaacccagaatgggggcttcgggacacagccctcctggaggacctgggaaaggccagtggcctgctcctggagaggatggtggacatgccagccaacaacaaatgcctgatcttccggaaaaactaagcccctccttcacccccgcacacctgcatccctgccggaggctctgtgaggcacgaaccctgcctccctaggccggaccttgtggacgacagccccacccagtctgtgctctcagccgctggccgaagggcccagcctgctcagaataaagcatgtcctgctgccggaaaa

SEQ ID NO: 307297 - DNA, 665 bp, Homo sapiens
gttcaacaccgtcaagggctcccccactggggttgtaagtctgggctccggggacccccggttcacccactggttgggtcaacccccccgaaaaaagaaggtttggccccctaacaaccccctgttgcttacgtgacaaacgctttctaaggattccggggtctaaaaacaaataagggcattgctccaggggcctctttatcatcgatggcaagggtgtccttcgccagatcactgttaatgatttgcctgtgggacgctccgtggatgaggctctgcggctggtccaggccttccagtacacagacgagcatggggaagtttgtcccgctggctggaagcctggcagtgacacgattaagcccaacgtggatgacagcaaggaatatttctccaaacacaattaggctggctaacggatagtgagcttgtgcccctgcctaggtgcctgtgctgggtgtccacctgtgcccccacctgggtgccctatgctgacccaggaaaggccagacctgcccctccaaactccacagtatgggaccctggagggctaggccaaggccttctcatgcctccacctagaagctgaatagtgacgccctcccccaagcccacccagccgcacacaggcctagaggtaaccaataaagtattagggaaaggtg

SEQ ID NO: 307298 - DNA, 161 bp, Homo sapiens
gcggccgcctactactactagcctactactactactgctcgaattcaagcttctaacgatgtacggggatccacctagaagctgaatagtgacgccctcccccaagcccacccagccgcacacaggcctagaggtaaccaataaagtattagggaaaggtg

SEQ ID NO: 307299 - DNA, 1145 bp, Homo sapiens
gagagagagagagagagagagagagagagagagagagagagagagagagagagagagagagagagagagagccgctccgctcgtccgctccctcccccgcgccgtgcacgtcttggttcgggccgggcataaaaggcttcgcggcccaggctcacttggcgctgagaacgcgggtccacgcgtgtgatcgtccgtgcgtctagcctttgcccacgcagctttcagtcatggcctccggtaacgcgcgcatcggaaagccagcccctgacttcaaggccacagcggtggttgatggcgccttcaaagaggtgaagctgtcggactacaaagggaagtacgtggtcctctttttctaccctctggacttcacttttgtgtgccccaccgagatcatcgcgttcagcaaccgtgcagaggacttccgcaagctgggctgtgaagtgctgggcgtctcggtggactctcagttcacccacctggcttggatcaacaccccccggaaagagggaggcttgggccccctgaacatccccctgcttgctgacgtgaccagacgcttgtctgaggattacggcgtgctgaaaacagatgagggcattgcctacaggggcctctttatcatcgatggcaagggtgtccttcgccagatcactgttaatgatttgcctgtgggacgctccgtggatgaggctctgcggctggtccaggccttccagtacacagacgagcatggggaagtttgtcccgctggctggaagcctggcagtgacacgattaagcccaacgtggatgacagcaaggaatatttctccaaacacaattaggctggctaacggatagtgagcttgtgcccctgcctaggtgcctgtgctgggtgtccacctgtgcccccacctgggtgccctatgctgacccaggaaaggccagacctgcccctccaaactccacagtatgggaccctggagggctaggccaaggccttctcatgcctccacctagaagctgaatagtgacgccctcccccaagcccacccagccgcacacaggcctagaggtaaccaataaagtattagggaaaggtgaaacacaacacaaacaaacaaaacaccgaggcctacactcaggcacggagaaaaggccaacag

SEQ ID NO: 307300 - DNA, 1415 bp, Homo sapiens
gagagagagagagagagagagagagagagagagagagagagagagagagagagagagagagagagagagagccgctccgctcgtccgctccctcccccgcgccgtgcacgtcttggttcgggccgggcataaaaggcttcgcggcccaggctcacttggcgctgagaacgcgggtccacgcgtgtgatcgtccgtgcgtctagcctttgcccacgcagctttcagtcatggcctccggtaacgcgcgcatcggaaagccagcccctgacttcaaggccacagcggtggttgatggcgccttcaaagaggtgaagctgtcggactacaaagggaagtacgtggtcctctttttctaccctctggacttcacttttgtgtgccccaccgagatcatcgcgttcagcaaccgtgcagaggacttccgcaagctgggctgtgaagtgctgggcgtctcggtggactctcagttcacccacctggcttggatcaacaccccccggaaagagggaggcttgggccccctgaacatccccctgcttgctgacgtgaccagacgcttgtctgaggattacggcgtgctgaaaacagatgagggcattgcctacaggggcctctttatcatcgatggcaagggtgtccttcgccagatcactgttaatgatttgcctgtgggacgctccgtggatgaggctctgcggctggtccaggccttccagtacacagacgagcatggggaagtttgtcccgctggctggaagcctggcagtgacacgattaagcccaacgtggatgacagcaaggaatatttctccaaacacaattaggctggctaacggatagtgagcttgtgcccctgcctaggtgcctgtgctgggtgtccacctgtgcccccacctgggtgccctatgctgacccaggaaaggccagacctgcccctccaaactccacagtatgggaccctggagggctaggccaaggccttctcatgcctccacctagaagctgaatagtgacgccctcccccaagcccacccagccgcacacaggcctagaggtaaccaataaagtattagggaaaggtgaaaaaaaaaaacaacacaacacaagccgacgaaggaagccagtcgccatcggggactacacaaaatggggcgggtgtggagcacagaagcgaaaaaaggcacgagaacgcgagagaaccacaaacaccagcatacgaacggcgcagaaaaacaccatccccgtggtcacgagaacaaacatcttacaatgaacacccggcagagtgggacccgcgagagaaagacagaaagccccaatggacgcacgggagcatacagcgaaacctgatagcgcaacgtgacacgacaccacacaaaagacacgaaggagacgaaaacaacaggaagcacaca

SEQ ID NO: 307301 - DNA, 1516 bp, Homo sapiens
gagagagagagagagagagagagagagagagagagagagagagagagagagagagagagagagagagagagccgctccgctcgtccgctccctcccccgcgccgtgcacgtcttggttcgggccgggcataaaaggcttcgcggcccaggctcacttggcgctgagaacgcgggtccacgcgtgtgatcgtccgtgcgtctagcctttgcccacgcagctttcagtcatggcctccggtaacgcgcgcatcggaaagccagcccctgacttcaaggccacagcggtggttgatggcgccttcaaagaggtgaagctgtcggactacaaagggaagtacgtggtcctctttttctaccctctggacttcacttttgtgtgccccaccgagatcatcgcgttcagcaaccgtgcagaggacttccgcaagctgggctgtgaagtgctgggcgtctcggtggactctcagttcacccacctggcttggatcaacaccccccggaaagagggaggcttgggccccctgaacatccccctgcttgctgacgtgaccagacgcttgtctgaggattacggcgtgctgaaaacagatgagggcattgcctacaggggcctctttatcatcgatggcaagggtgtccttcgccagatcactgttaatgatttgcctgtgggacgctccgtggatgaggctctgcggctggtccaggccttccagtacacagacgagcatggggaagtttgtcccgctggctggaagcctggcagtgacacgattaagcccaacgtggatgacagcaaggaatatttctccaaacacaattaggctggctaacggatagtgagcttgtgcccctgcctaggtgcctgtgctgggtgtccacctgtgcccccacctgggtgccctatgctgacccaggaaaggccagacctgcccctccaaactccacagtatgggaccctggagggctaggccaaggccttctcatgcctccacctagaagctgaatagtgacgccctcccccaagcccacccagccgcacacaggcctagaggtaaccaataaagtattagggaaaggtggaacagggtgaccgcccacacacacaacgacaaaacgacaacgtacacaacacaaagaacaagaccaaagaaacgaatgacacgagatcacacaatgatagtgcagcgacaacagcagacggcgagtgatatatacacgaccgcagcgcaccagattaagaaacggcacttagtagagaagaaacgaaggaagcacaatactacgagagcacgccaaccacaacgacgagctcaacgaagaggcgatgcagcacacacaaggcaggcaacacgaaacacacacagacacacgcaacaaacgagtgcaacgagcggcgaggagtcacaagcaacaaaaaaaacaaagagcagacgaaggcactcaggtgcactccacgcgcggcgcgaccccagcagaaaagacagaagacaacaaaagaacagacgacaaaaca

SEQ ID NO: 307302 - DNA, 1521 bp, Homo sapiens
gagagagagagagagagagagagagagagagagagagagagagagagagagagagagagagagagagagagccgctccgctcgtccgctccctcccccgcgccgtgcacgtcttggttcgggccgggcataaaaggcttcgcggcccaggctcacttggcgctgagaacgcgggtccacgcgtgtgatcgtccgtgcgtctagcctttgcccacgcagctttcagtcatggcctccggtaacgcgcgcatcggaaagccagcccctgacttcaaggccacagcggtggttgatggcgccttcaaagaggtgaagctgtcggactacaaagggaagtacgtggtcctctttttctaccctctggacttcacttttgtgtgccccaccgagatcatcgcgttcagcaaccgtgcagaggacttccgcaagctgggctgtgaagtgctgggcgtctcggtggactctcagttcacccacctggcttggatcaacaccccccggaaagagggaggcttgggccccctgaacatccccctgcttgctgacgtgaccagacgcttgtctgaggattacggcgtgctgaaaacagatgagggcattgcctacaggggcctctttatcatcgatggcaagggtgtccttcgccagatcactgttaatgatttgcctgtgggacgctccgtggatgaggctctgcggctggtccaggccttccagtacacagacgagcatggggaagtttgtcccgctggctggaagcctggcagtgacacgattaagcccaacgtggatgacagcaaggaatatttctccaaacacaattaggctggctaacggatagtgagcttgtgcccctgcctaggtgcctgtgctgggtgtccacctgtgcccccacctgggtgccctatgctgacccaggaaaggccagacctgcccctccaaactccacagtatgggaccctggagggctaggccaaggccttctcatgcctccacctagaagctgaatagtgacgccctcccccaagcccacccagccgcacacaggcctagaggtaaccaataaagtattagggaaaggtgaaaaaaaaaacaaaaaaaaaaaaaaaaaaagggggggcggggcaccaaaagaacccccgggggggccacacgacgggaacccgttgggccccactgggggcccccagtataggcgggacgccgaatacattaacgcgcatacgcgcaccgcgccccaccgtacacaaaaacacgccgcgcgtcggggcacaccacggcacagccgcgtgggcacatgctgcgggccaaacgcccgccactacactgcgcggcggggtggcacccaaccgcggcacaccaccacaccctacccgggcaaaatccgcgccccacgacgggtcccaacacagcacgcgcagagacgcaccagcccctgcacccctccccgccaactccccgcgaccacaacctgcgcaccgggacaatcacaacgcacacctatcccccgggcgcgggcgaa

SEQ ID NO: 307303 - DNA, 1112 bp, Homo sapiens
  misc_feature (1029)..(1029): n is a, c, g, or t
gagagagagagagagagagagagagagagagagagagagagagagagagagagagagagagagagagagagccgctccgctcgtccgctccctcccccgcgccgtgcacgtcttggttcgggccgggcataaaaggcttcgcggcccaggctcacttggcgctgagaacgcgggtccacgcgtgtgatcgtccgtgcgtctagcctttgcccacgcagctttcagtcatggcctccggtaacgcgcgcatcggaaagccagcccctgacttcaaggccacagcggtggttgatggcgccttcaaagaggtgaagctgtcggactacaaagggaagtacgtggtcctctttttctaccctctggacttcacttttgtgtgccccaccgagatcatcgcgttcagcaaccgtgcagaggacttccgcaagctgggctgtgaagtgctgggcgtctcggtggactctcagttcacccacctggcttggatcaacaccccccggaaagagggaggcttgggccccctgaacatccccctgcttgctgacgtgaccagacgcttgtctgaggattacggcgtgctgaaaacagatgagggcattgcctacaggggcctctttatcatcgatggcaagggtgtccttcgccagatcactgttaatgatttgcctgtgggacgctccgtggatgaggctctgcggctggtccaggccttccagtacacagacgagcatggggaagtttgtcccgctggctggaagcctggcagtgacacgattaagcccaacgtggatgacagcaaggaatatttctccaaacacaattaggctggctaacggatagtgagcttgtgcccctgcctaggtgcctgtgctgggtgtccacctgtgcccccacctgggtgccctatgctgacccaggaaaggccagacctgcccctccaaactccacagtatgggaccctggagggctaggccaaggccttctcatgcctcactaaagtgaaatggaggcctccaagccccagcgganaggaaggacccaagctggcggacgaaaacaaaaacacacagcacaacaaaacgctgcgcgcgaaaagggtcctagacgcagaa

SEQ ID NO: 307304 - DNA, 1552 bp, Homo sapiens
  misc_feature (374)..(374): n is a, c, g, or t
gagagagagagagagagagagagagagagagagagagagagagagagagagagagagagagagagagagagccgctccgctcgtccgctccctcccccgcgccgtgcacgtcttggttcgggccgggcataaaaggcttcgcggcccaggctcacttggcgctgagaacgcgggtccacgcgtgtgatcgtccgtgcgtctagcctttgcccacgcagggtatgaacacccggagtgcacctggcgggaggacccccttcaggctgctttggcccgatcctgactttagtgctggccgcctttgctttccatccgctatagtggcctcctttgtccttgcgggggaaaccgaggccacagccttgcagcgcagncctgatcgcccgacttcccgccccctgctcgtgcgggcctcactgtctccttctgggctgggggcttgcgacaccgccctccggccgactcgctcgtggggtgctggtggcagtggctgggtcactcgtgctctggtcaggagagcgggtctccggcagcctccgggcctcgtagaccgggtacccgggagggtgagggttagtgctgtcgcctccgccgtgctgactcagtcatagggcccagcacgcagcgcgaccttgggttgggaggacaaagtgtcttcccgggcgcactgaccgggcgggggtctcagctttcagtcatggcctccggtaacgcgcgcatcggaaagccagcccctgacttcaaggccacagcggtggttgatggcgccttcaaagaggtgaagctgtcggactacaaagggaagtacgtggtcctctttttctaccctctggacttcacttttgtgtgccccaccgagatcatcgcgttcagcaaccgtgcagaggacttccgcaagctgggctgtgaagtgctgggcgtctcggtggactctcagttcacccacctggcttggatcaacaccccccggaaagagggaggcttgggccccctgaacatccccctgcttgctgacgtgaccagacgcttgtctgaggattacggcgtgctgaaaacagatgagggcattgcctacaggggcctctttatcatcgatggcaagggtgtccttcgccagatcactgttaatgatttgcctgtgggacgctccgtggatgaggctctgcggctggtccaggccttccagtacacagacgagcatggggaagtttgtcccgctggctggaagcctggcagtgacacgattaagcccaacgtggatgacagcaaggaatatttctccaaacacaattaggctggctaacggatagtgagcttgtgcccctgcctaggtgcctgtgctgggtgtccacctgtgcccccacctgggtgccctatgctgacccaggaaaggccagacctgcccctccaaactccacagtatgggaccctggagggctaggccaaggccttctcatgcctccacctagaagctgaatagtgacgccctcccccaagcccacccagccgcacacaggcctagaggtaaccaataaagtattagggaaaggtg

SEQ ID NO: 307305 - DNA, 966 bp, Homo sapiens
gagagagagagagagagagagagagagagagagagagagagagagagagagagagagagagagagagagagccgctccgctcgtccgctccctcccccgcgccgtgcacgtcttggttcgggccgggcataaaaggcttcgcggcccaggctcacttggcgctgagaacgcgggtccacgcgtgtgatcgtccgtgcgtctagcctttgcccacgcagctttcagtcatggcctccggtaacgcgcgcatcggaaagccagcccctgacttcaaggccacagcggtggttgatggcgccttcaaagaggtgaagctgtcggactacaaagggaagtacgtggtcctctttttctaccctctggacttcacttttgtgtgccccaccgagatcatcgcgttcagcaaccgtgcagaggacttccgcaagctgggctgtgaagtgctgggcgtctcggtggactctcagttcacccacctggcttggatcaacaccccccggaaagagggaggcttgggccccctgaacatccccctgcttgctgacgtgaccagacgcttgtctgaggattacggcgtgctgaaaacagatgagggcattgcctacaggggcctctttatcatcgatggcaagggtgtccttcgccagatcactgttaatgatttgcctgtgggacgctccgtggatgaggctctgcggctggtccaggccttccagtacacagacgagcatggggaagtttgtcccgctggctggaagcctggcagtgacacgattaagcccaacgtggatgacagcaaggaatatttctccaaacacaattaggctggctaacggatagtgagcttgtgcccctgcctaggtgcctgtgctgggtgtccacctgtgccccctggtgcctatgtgccaggaaggggaatgcctccaatccagatggccgggggggtctgcccatgtggggcgcccc

SEQ ID NO: 307306 - DNA, 1020 bp, Homo sapiens
gagagagagagagagagagagagagagagagagagagagagagagagagagagagagagagagagagagagccgctccgctcgtccgctccctcccccgcgccgtgcacgtcttggttcgggccgggcataaaaggcttcgcggcccaggctcacttggcgctgagaacgcgggtccacgcgtgtgatcgtccgtgcgtctagcctttgcccacgcagagcggtggttgatggcgccttcaaagaggtgaagctgtcggactacaaagggaagtacgtggtcctctttttctaccctctggacttcacttttgtgtgccccaccgagatcatcgcgttcagcaaccgtgcagaggacttccgcaagctgggctgtgaagtgctgggcgtctcggtggactctcagttcacccacctggcttggatcaacaccccccggaaagagggaggcttgggccccctgaacatccccctgcttgctgacgtgaccagacgcttgtctgaggattacggcgtgctgaaaacagatgagggcattgcctacaggggcctctttatcatcgatggcaagggtgtccttcgccagatcactgttaatgatttgcctgtgggacgctccgtggatgaggctctgcggctggtccaggccttccagtacacagacgagcatggggaagtttgtcccgctggctggaagcctggcagtgacacgattaagcccaacgtggatgacagcaaggaatatttctccaaacacaattaggctggctaacggatagtgagcttgtgcccctgcctaggtgcctgtgctgggtgtccacctgtgcccccacctgggtgccctatgctgacccaggaaaggccagacctgcccctccaaactccacagtatgggaccctggagggctaggccaaggccttctcatgcctccacctagaagctgaatagtgacgccctcccccaagcccacccagccgcacacaggcctagaggtaaccaataaagtattagggaaaggtg

SEQ ID NO: 307307 - DNA, 1641 bp, Homo sapiens
  misc_feature (374)..(374): n is a, c, g, or t
gagagagagagagagagagagagagagagagagagagagagagagagagagagagagagagagagagagagccgctccgctcgtccgctccctcccccgcgccgtgcacgtcttggttcgggccgggcataaaaggcttcgcggcccaggctcacttggcgctgagaacgcgggtccacgcgtgtgatcgtccgtgcgtctagcctttgcccacgcagggtatgaacacccggagtgcacctggcgggaggacccccttcaggctgctttggcccgatcctgactttagtgctggccgcctttgctttccatccgctatagtggcctcctttgtccttgcgggggaaaccgaggccacagccttgcagcgcagncctgatcgcccgacttcccgccccctgctcgtgcgggcctcactgtctccttctgggctgggggcttgcgacaccgccctccggccgactcgctcgtggggtgctggtggcagtggctgggtcactcgtgctctggtcaggagagcgggtctccggcagcctccgggcctcgtagaccgggtacccgggagggtgagggttagtgctgtcgcctccgccgtgctgactcagtcatagggcccagcacgcagcgcgaccttgggttgggaggacaaagtgtcttcccgggcgcactgaccgggcgggggtctcagctttcagtcatggcctccggtaacgcgcgcatcggaaagccagcccctgacttcaaggccacagcggtggttgatggcgccttcaaagaggtgaagctgtcggactacaaaggtgagcgccgcccggagggggcccaggtagaagcggggccgtgcatgagagaagctgggccctaactcctctgtgtccctcctccccagggaagtacgtggtcctctttttctaccctctggacttcacttttgtgtgccccaccgagatcatcgcgttcagcaaccgtgcagaggacttccgcaagctgggctgtgaagtgctgggcgtctcggtggactctcagttcacccacctggcttggatcaacaccccccggaaagagggaggcttgggccccctgaacatccccctgcttgctgacgtgaccagacgcttgtctgaggattacggcgtgctgaaaacagatgagggcattgcctacaggggcctctttatcatcgatggcaagggtgtccttcgccagatcactgttaatgatttgcctgtgggacgctccgtggatgaggctctgcggctggtccaggccttccagtacacagacgagcatggggaagtttgtcccgctggctggaagcctggcagtgacacgattaagcccaacgtggatgacagcaaggaatatttctccaaacacaattaggctggctaacggatagtgagcttgtgcccctgcctaggtgcctgtgctgggtgtccacctgtgcccccacctgggtgccctatgctgacccaggaaaggccagacctgcccctccaaactccacagtatgggaccctggagggctaggccaaggccttctcatgcctccacctagaagctgaatagtgacgccctcccccaagcccacccagccgcacacaggcctagaggtaaccaataaagtattagggaaaggtg

SEQ ID NO: 307308 - DNA, 812 bp, Homo sapiens
agccgcacacaggcctagaggtaaccaataaagtattagggaaaggtgaaggcatgagaaggccttggcctagccctccaggtcccatactgtggagttggaggggcaggtctggccttatcatcgcgttcagcaaccgtgcagaggacttccgcaagctgggctgtgaagtgctgggcgtctcggtggactctcagttcacccacctggcttggatcaacaccccccggaaagagggaggcttgggccccctgaacatccccctgcttgctgacgtgaccagacgcttgtctgaggattacggcgtgctgaaaacagatgagggcattgcctacaggggcctctttatcatcgatggcaagggtgtccttcgccagatcactgttaatgatttgcctgtgggacgctccgtggatgaggctctgcggctggtccaggccttccagtacacagacgagcatggggaagtttgtcccgctggctggaagcctggcagtgacacgattaagcccaacgtggatgacagcaaggaatatttctccaaacacaattaggctggctaacggatagtgagcttgtgcccctgcctaggtgcctgtgctgggtgtccacctgtgcccccacctgggtgccctatgctgacccaggaaaggccagacctgcccctccaaactccacagtatgggaccctggagggctaggccaaggccttctcatgcctccacctagaagctgaatagtgacgccctcccccaagcccacccagccgcacacaggcctagaggtaaccaataaagtattagggaaaggtg

SEQ ID NO: 307309 - DNA, 986 bp, Homo sapiens
  misc_feature (855)..(856): n is a, c, g, or t
  misc_feature (862)..(862): n is a, c, g, or t
  misc_feature (872)..(872): n is a, c, g, or t
  misc_feature (875)..(876): n is a, c, g, or t
  misc_feature (878)..(878): n is a, c, g, or t
  misc_feature (884)..(884): n is a, c, g, or t
  misc_feature (886)..(886): n is a, c, g, or t
  misc_feature (896)..(896): n is a, c, g, or t
  misc_feature (905)..(905): n is a, c, g, or t
  misc_feature (907)..(907): n is a, c, g, or t
  misc_feature (910)..(910): n is a, c, g, or t
  misc_feature (923)..(923): n is a, c, g, or t
  misc_feature (940)..(940): n is a, c, g, or t
gagagagagagagagagagagagagagagagagagagagagagagagagagagagagagagagagagagagccgctccgctcgtccgctccctcccccgcgccgtgcacgtcttggttcgggccgggcataaaaggcttcgcggcccaggctcacttggcgctgagaacgcgggtccacgcgtgtgatcgtccgtgcgtctagcctttgcccacgcagctttcagtcatggcctccggtaacgcgcgcatcggaaagccagcccctgacttcaaggccacagcggtggttgatggcgccttcaaagaggtgaagctgtcggactacaaagggaagtacgtggtcctctttttctaccctctggacttcacttttgtgtgccccaccgagatcatcgcgttcagcaaccgtgcagaggacttccgcaagctgggctgtgaagtgctgggcgtctcggtggactctcagttcacccacctggcttggatcaacaccccccggaaagagggaggcttgggccccctgaacatccccctgcttgctgacgtgaccagacgcttgtctgaggattacggcgtgctgaaaacagatgagggcattgcctacaggggcctctttatcatcgatggcaagggtgtccttcgccagatcactgttaatgatttgcctgtgggacgctccgtggatgaggctctgcggctggtccaggccttccagtacacagacgagcatggggaagtttgtcccgctggctggaagcctggcagtgacacgattaagcccaacgtggatgacagcaaggaatatttctccaaacacaattaggctggctaacggatagtgagcttgtgaaaannaatagntgaatgtganggnngnaaaaangngaaaaaaaangggtgaaanangangtaaaaggaaggnaaagaaatgaaaataanagataaaaagtatgggaaaatggagggataggaaagggaattataa

SEQ ID NO: 307310 - DNA, 967 bp, Homo sapiens
gagagagagagagagagagagagagagagagagagagagagagagagagagagagagagagagagagagagccgctccgctcgtccgctccctcccccgcgccgtgcacgtcttggttcgggccgggcataaaaggcttcgcggcccaggctcacttggcgctgagaacgcgggtccacgcgtgtgatcgtccgtgcgtctagcctttgcccacgcagctttcagtcatggcctccggtaacgcgcgcatcggaaagccagcccctgacttcaaggccacagcggtggttgatggcgccttcaaagaggtgaagctgtcggactacaaagggaagtacgtggtcctctttttctaccctctggacttcagatcaacaccccccggaaagagggaggcttgggccccctgaacatccccctgcttgctgacgtgaccagacgcttgtctgaggattacggcgtgctgaaaacagatgagggcattgcctacaggggcctctttatcatcgatggcaagggtgtccttcgccagatcactgttaatgatttgcctgtgggacgctccgtggatgaggctctgcggctggtccaggccttccagtacacagacgagcatggggaagtttgtcccgctggctggaagcctggcagtgacacgattaagcccaacgtggatgacagcaaggaatatttctccaaacacaattaggctggctaacggatagtgagcttgtgcccctgcctaggtgcctgtgctgggtgtccacctgtgcccccacctgggtgccctatgctgacccaggaaaggccagacctgcccctccaaactccacagtatgggaccctggagggctaggccaaggccttctcatgcctccacctagaagctgaatagtgacgccctcccccaagcccacccagccgcacacaggcctagaggtaaccaataaagtattagggaaaggtg

SEQ ID NO: 307311 - DNA, 928 bp, Homo sapiens
gagagagagagagagagagagagagagagagagagagagagagagagagagagagagagagagagagagagccgctccgctcgtccgctccctcccccgcgccgtgcacgtcttggttcgggccgggcataaaaggcttcgcggcccaggctcacttggcgctgagaacgcgggtccacgcgtgtgatcgtccgtgcgtctagcctttgcccacgcagctttcagtcatggcctccggtaacgcgcgcatcggaaagccagcccctgacttcaaggccacagcggtggttgatggcgccttcaaagaggtgaagctgtcggactacaaaggatcaacaccccccggaaagagggaggcttgggccccctgaacatccccctgcttgctgacgtgaccagacgcttgtctgaggattacggcgtgctgaaaacagatgagggcattgcctacaggggcctctttatcatcgatggcaagggtgtccttcgccagatcactgttaatgatttgcctgtgggacgctccgtggatgaggctctgcggctggtccaggccttccagtacacagacgagcatggggaagtttgtcccgctggctggaagcctggcagtgacacgattaagcccaacgtggatgacagcaaggaatatttctccaaacacaattaggctggctaacggatagtgagcttgtgcccctgcctaggtgcctgtgctgggtgtccacctgtgcccccacctgggtgccctatgctgacccaggaaaggccagacctgcccctccaaactccacagtatgggaccctggagggctaggccaaggccttctcatgcctccacctagaagctgaatagtgacgccctcccccaagcccacccagccgcacacaggcctagaggtaaccaataaagtattagggaaaggtg

SEQ ID NO: 307312 - DNA, 673 bp, Homo sapiens
tggcccgataatgacagcatttacaaccccgaagcgctagatatcacagagggaactctgcattctcgcttcgtggagcgtgtccgcaatgttgccagtgtctgtctgcagattggctatccccctgcttgctgacgtgaccagacgcttgtctgaggattacggcgtgctgaaaacagatgagggcattgcctacaggggcctctttatcatcgatggcaagggtgtccttcgccagatcactgttaatgatttgcctgtgggacgctccgtggatgaggctctgcggctggtccaggccttccagtacacagacgagcatggggaagtttgtcccgctggctggaagcctggcagtgacacgattaagcccaacgtggatgacagcaaggaatatttctccaaacacaattaggctggctaacggatagtgagcttgtgcccctgcctaggtgcctgtgctgggtgtccacctgtgcccccacctgggtgccctatgctgacccaggaaaggccagacctgcccctccaaactccacagtatgggaccctggagggctaggccaaggccttctcatgcctccacctagaagctgaatagtgacgccctcccccaagcccacccagccgcacacaggcctagaggtaaccaataaagtattagggaaaggtg

SEQ ID NO: 307313 - DNA, 1149 bp, Homo sapiens
gagagagagagagagagagagagagagagagagagagagagagagagagagagagagagagagagagagagccgctccgctcgtccgctccctcccccgcgccgtgcacgtcttggttcgggccgggcataaaaggcttcgcggcccaggctcacttggcgctgagaacgcgggtccacgcgtgtgatcgtccgtgcgtctagcctttgcccacgcagctttcagtcatggcctccggtaacgcgcgcatcggaaagccagcccctgacttcaaggccacagcggtggttgatggcgccttcaaagaggtgaagctgtcggactacaaagggaagtacgtggtcctctttttctaccctctggacttcacttttgtgtgccccaccgagatcatcgcgttcagcaaccgtgcagaggacttccgcaagctgggctgtgaagtgctgggcgtctcggtggactctcagttcacccacctggcttggatcaacaccccccggaaagagggaggcttgggccccctgaacatccccctgcttgctgacgtgaccagacgcttgtctgaggattacggcgtgctgaaaacagatgagggcattgcctacaggggcctctttatcatcgatggcaagggtgtccttcgccagatcactgttaatgatttgcctgtgggacgctccgtggatgaggctctgcggctggtccaggccttccagtacacagacgagcatggggaaggcccttgctttgcttcaccttgaacctggggctgtagccttcatgtgcatccttgtgtcttcccacatttgtcccgctggctggaagcctggcagtgacacgattaagcccaacgtggatgacagcaaggaatatttctccaaacacaattaggctggctaacggatagtgagcttgtgcccctgcctaggtgcctgtgctgggtgtccacctgtgcccccacctgggtgccctatgctgacccaggaaaggccagacctgcccctccaaactccacagtatgggaccctggagggctaggccaaggccttctcatgcctccacctagaagctgaatagtgacgccctcccccaagcccacccagccgcacacaggcctagaggtaaccaataaagtattagggaaaggtg

SEQ ID NO: 307314 - DNA, 2426 bp, Homo sapiens
gagagagagagagagagagagagagagagagagagagagagagagagagagagagagagagagagagagagccgctccgctcgtccgctccctcccccgcgccgtgcacgtcttggttcgggccgggcataaaaggcttcgcggcccaggctcacttggcgctgagaacgcgggtccacgcgtgtgatcgtccgtgcgtctagcctttgcccacgcagctttcagtcatggcctccggtaacgcgcgcatcggaaagccagcccctgacttcaaggccacagcggtggttgatggcgccttcaaagaggtgaagctgtcggactacaaagggaagtacgtggtcctctttttctaccctctggacttcacttttgtgtgccccaccgagatcatcgcgttcagcaaccgtgcagaggacttccgcaagctgggctgtgaagtgctgggcgtctcggtggactctcagttcacccacctggcttggatcaacaccccccggaaagagggaggcttgggccccctgaacatccccctgcttgctgacgtgaccagacgcttgtctgaggattacggcgtgctgaaaacagatgagggcattgcctacaggggcctctttatcatcgatggcaagggtgtccttcgccagatcactgttaatgatttgcctgtgggacgctccgtggatgaggctctgcggctggtccaggccttccagtacacagacgagcatggggaagggtgagcagatacacacatgacacatgggtacatactgagcgcctccgtcactcatgcaaacattcactgcctgtcctcttacctgtccagatgggtgttagggccccaaagaagattcagctcagggctttgtctgcaggatgtttctaatgtggtaggagacaaataacgcctgacattcaaccaaggtggacaaaggggccgggctcagtggctcacggttgtattgccagcactttgggaagctgtggcaggtggatcacctgaggtcaggagttcgagaccagcctgaccaacatggtgaaaccccgtctctacgaagaacacaaaaaattagctggccgtggtggtgcacacttgtaatcccagctacttgagagactgaggcaggagttcgcttgaacccaggaggcagaggttgcagtgagctgagatcgcaccgttgtactccagcttgggcaacagagcaaaactcagtctcaaaaaaaaaaaaaattagcttggtttgtgaagcatgcctatagtcccagctactcaagaggctgaggctggaggatcacttgagcctgggaggtcaaggctgcagtaagctgtgatcgcaccactgcactccagcctgggtgacacagcaagaccctgtctcaaaaaaacaaacaaacaggccgagcgcggtggctcacgcctgtaatcccagcactttgggaggccgaggcgggcagatcatgaggtcaggagtttgagaccagcctggccaacatagtgaaaccgcgtctctgctaaaaatacaaaaaaattagctgggtgcggtggcaggtgcctgtaatcccagctacttgggaggctgaggcaggagactcccttgaacccgggaggaggttgcagtaagccgagatcacaccactgcactccagcctgggcgccagtgtgagactccatctcaaaaacaacaacaacaaaaaaacctgtaggggtggggcagagggacaaagatgggactaaaggagccaaaaagacaggaagatgctgtgtctcatgcctgtagatgctgtgtctcatgcctgtagttccacctactctggagagtgaggcagaagattgcttaggcccaggaatttgagtcgagcctaggcaacatagcaataccccatctcttttttttttttttttaagagatggggtattggttaaaaaaaaaaaaaaaaaaaaagaggccagatgcagtggctcacacctgtaatcccagcattttgggaggcctaggtgggtggatcacctgaggtcgggagttcgagacaagcttgaccgacatggagaaacccagtctctactaaaaatacaaaattagcccagcctggtggtgcatgcctgtaatcccagctacttgggaggctgaggcaagagaatcgtttgaagctgagaggcggaggttgcagtgagctgagatcgtgccattgcactccagcctgggcaacgagtgaagcgaaactccgtctcaaaaaataaaaaaaaaaaagaggccgggcacggtggctcatgcctgtaatcccaccactttgggaggctgaggcgggcggatcaagaggtcaggagatcgagaccatcctagctaacgcggtgaaaccctgtctctactaaaaatacaaaaaaattagtcgggcgtggtggcgggcgcctgtagtcccagcta

SEQ ID NO: 307315 - DNA, 836 bp, Homo sapiens
gagagagagagagagagagagagagagagagagagagagagagagagagagagagagagagagagagagagccgctccgctcgtccgctccctcccccgcgccgtgcacgtcttggttcgggccgggcataaaaggcttcgcggcccaggctcacttggcgctgagaacgcgggtccacgcgtgtgatcgtccgtgcgtctagcctttgcccacgcagctttcagtcatggcctccggtaacgcgcgcatcggaaagccagcccctgacttcaaggccacagcggtggttgatggcgccttcaaagaggtgaagctgtcggactacaaagggaagtacgtggtcctctttttctaccctctggacttcagatcaacaccccccggaaagagggaggcttgggccccctgaacatccccctgcttgctgacgtgaccagacgcttgtctgaggattacggcgtgctgaaaacagatgagggcattgcctacagtttgtcccgctggctggaagcctggcagtgacacgattaagcccaacgtggatgacagcaaggaatatttctccaaacacaattaggctggctaacggatagtgagcttgtgcccctgcctaggtgcctgtgctgggtgtccacctgtgcccccacctgggtgccctatgctgacccaggaaaggccagacctgcccctccaaactccacagtatgggaccctggagggctaggccaaggccttctcatgcctccacctagaagctgaatagtgacgccctcccccaagcccacccagccgcacacaggcctagaggtaaccaataaagtattagggaaaggtg

SEQ ID NO: 307316 - DNA, 1222 bp, Homo sapiens
  misc_feature (374)..(374): n is a, c, g, or t
gagagagagagagagagagagagagagagagagagagagagagagagagagagagagagagagagagagagccgctccgctcgtccgctccctcccccgcgccgtgcacgtcttggttcgggccgggcataaaaggcttcgcggcccaggctcacttggcgctgagaacgcgggtccacgcgtgtgatcgtccgtgcgtctagcctttgcccacgcagggtatgaacacccggagtgcacctggcgggaggacccccttcaggctgctttggcccgatcctgactttagtgctggccgcctttgctttccatccgctatagtggcctcctttgtccttgcgggggaaaccgaggccacagccttgcagcgcagncctgatcgcccgacttcccgccccctgctcgtgcgggcctcactgtctccttctgggctgggggcttgcgacaccgccctccggccgactcgctcgtggggtgctggtggcagtggctgggtcactcgtgctctggtcaggagagcgggtctccggcagcctccgggcctcgtagaccgggtacccgggagggtgagggttagtgctgtcgcctccgccgtgctgactcagtcatagggcccagcacgcagcgcgaccttgggttgggaggacaaagtgtcttcccgggcgcactgaccgggcgggggtctcagctttcagtcatggcctccggtaacgcgcgcatcggaaagccagcccctgacttcaaggccacagcggtggttgatggcgccttcaaagaggtgaagctgtcggactacaaaggtgagcgccgcccggagggggcccaggtagaagcggggccgtgcatgagagaagctgggccctaactcctctgtgtccctcctccccagggaagtacgtggtcctctttttctaccctctggacttcacttttgtgtgccccaccgagatcatcgcgttcagcaaccgtgcagaggacttccgcaagctgggctgtgaagtgctgggcgtctcggtggactctcagttcacccacctggcttgtgctgtccagctgtccacagcacagaggaggccaatcccctctgcaccttttgtgctttggaattccacagccccacacctgcccccagcctagagaagcctgtgggaacacaatgacttggccaccttcaggaaccaagaggagtaaactggactgggcaggagggcacagactggtc

SEQ ID NO: 307317 - DNA, 1082 bp, Homo sapiens
gagagagagagagagagagagagagagagagagagagagagagagagagagagagagagagagagagagagccgctccgctcgtccgctccctcccccgcgccgtgcacgtcttggttcgggccgggcataaaaggcttcgcggcccaggctcacttggcgctgagaacgcgggtccacgcgtgtgatcgtccgtgcgtctagcctttgcccacgcagctttcagtcatggcctccggtaacgcgcgcatcggaaagccagcccctgacttcaaggccacagcggtggttgatggcgccttcaaagaggtgaagctgtcggactacaaagggaagtacgtggtcctctttttctaccctctggacttcacttttgtgtgccccaccgagatcatcgcgttcagcaaccgtgcagaggacttccgcaagctgggctgtgaagtgctgggcgtctcggtggactctcagttcacccacctggcttggatcaacaccccccggaaagagggaggcttgggccccctgaacatccccctgcttgctgacgtgaccagacgcttgtctgaggattacggcgtgctgaaaacagatgagggcattgcctacaggggcctctttatcatcgatggcaagggtgtccttcgccagatcactgttaatgatttgcctgtgggacgctccgtggatgaggctctgcggctggtccaggccttccagtacacagacgagcatggggaagtttgtcccgctggctggaagcctggcagtgacacgattaagcccaacgtggatgacagcaaggaatatttctccaaacacaattaggctggctaacggatagtgagcttgtgcccctgcctaggtgcctgtgctgggtgtccacctgtgcccccacctgggtgccctatgctgacccaggaaaggccagacctgcccctccaaactccacagtatgggaccctggagggctaggccaaggccttctcatgcctccacctagaagctgaatagtgacgccctcccccaagcccacccagccgcacacaggcctagaggtaaccaataaagtattagggaaaggtg

SEQ ID NO: 307318 - DNA, 1130 bp, Homo sapiens
gagagagagagagagagagagagagagagagagagagagagagagagagagagagagagagagagagagagccgctccgctcgtccgctccctcccccgcgccgtgcacgtcttggttcgggccgggcataaaaggcttcgcggcccaggctcacttggcgctgagaacgcgggtccacgcgtgtgatcgtccgtgcgtctagcctttgcccacgcagctttcagtcatggcctccggtaacgcgcgcatcggaaagccagcccctgacttcaaggccacagcggtggttgatggcgccttcaaagaggtgaagctgtcggactacaaagggaagtacgtggtcctctttttctaccctctggacttcacttttgtgtgccccaccgagatcatcgcgttcagcaaccgtgcagaggacttccgcaagctgggctgtgaagtgctgggcgtctcggtggactctcagttcacccacctggcttggatcaacaccccccggaaagagggaggcttgggccccctgaacatccccctgcttgctgacgtgaccagacgcttgtctgaggattacggcgtgctgaaaacagatgagggcattgcctacaggggcctctttatcatcgatggcaagggtgtccttcgccagatcactgttaatgatttgcctgtgggacgctccgtggatgaggctctgcggctggtccaggccttccagtacacagacgagcatggggaagtttgtcccgctggctggaagcctggcagtgacacgattaagcccaacgtggatgacagcaaggaatatttctccaaacacaattaggctggctaacggatagtgagcttgtgcccctgcctaggtgcctgtgctgggtgtccacctgtgcccccacctgggtgccctatgctgacccaggaaaggccagacctgcccctccaaactccacagtatgggaccctggagggctaggccaaggccttctcatgcctccacctagaagctgaatagtgacgccctcccccaagcccacccagccgcacacaggcctagaggtaaccaataaagtattagggaaaggtgaaaaaaaaaaaaaagtcgacgcggccgcgaatttagtagtagtagtcg

SEQ ID NO: 307319 - DNA, 1275 bp, Homo sapiens
gagagagagagagagagagagagagagagagagagagagagagagagagagagagagagagagagagagagccgctccgctcgtccgctccctcccccgcgccgtgcacgtcttggttcgggccgggcataaaaggcttcgcggcccaggctcacttggcgctgagaacgcgggtccacgcgtgtgatcgtccgtgcgtctagcctttgcccacgcagctttcagtcatggcctccggtaacgcgcgcatcggaaagccagcccctgacttcaaggccacagcggtggttgatggcgccttcaaagaggtgaagctgtcggactacaaagggaagtacgtggtcctctttttctaccctctggacttcacttttgtgtgccccaccgagatcatcgcgttcagcaaccgtgcagaggacttccgcaagctgggctgtgaagtgctgggcgtctcggtggactctcagttcacccacctggcttggatcaacaccccccggaaagagggaggcttgggccccctgaacatccccctgcttgctgacgtgaccagacgcttgtctgaggattacggcgtgctgaaaacagatgagggcattgcctacaggggcctctttatcatcgatggcaagggtgtccttcgccagatcactgttaatgatttgcctgtgggacgctccgtggatgaggctctgcggctggtccaggccttccagtacacagacgagcatggggaagtttgtcccgctggctggaagcctggcagtgacacgattaagcccaacgtggatgacagcaaggaatatttctccaaacacaattaggctggctaacggatagtgagcttgtgcccctgcctaggtgcctgtgctgggtgtccacctgtgcccccacctgggtgccctatgctgacccaggaaaggccagacctgcccctccaaactccacagtatgggaccctggagggctaggccaaggccttctcatgcctccacctagaagctgaatagtgacgccctcccccaagcccacccagccgcacacaggcctagaggtaaccaataaagtattagggaaaggtgaccaacacacatgaacctcgggcattatttcgcggcgcgaaacagtggatatcactgccatggactagtttcgccaatttgtagaagggcattcagctccatatggacgatataatcgacggcctttagctgcagggacacacgccccaccgcgtgacacaccgctacttcagccgagaagtgacgcctatgc

SEQ ID NO: 307320 - DNA, 973 bp, Homo sapiens
aacccaccccacccccccacaccaccattaggcaggtacagccgggtgtgaatcggacgaggcactccacgcgtgtgatcgtccgtgcgtctagcctttgcccacgcagctttcagtcatggcctccggtaacgcgcgcatcggaaagccagcccctgacttcaaggccacagcggtggttgatggcgccttcaaagaggtgaagctgtcggactacaaagggaagtacgtggtcctctttttctaccctctggacttcacttttgtgtgccccaccgagatcatcgcgttcagcaaccgtgcagaggacttccgcaagctgggctgtgaagtgctgggcgtctcggtggactctcagttcacccacctggcttggatcaacaccccccggaaagagggaggcttgggccccctgaacatccccctgcttgctgacgtgaccagacgcttgtctgaggattacggcgtgctgaaaacagatgagggcattgcctacaggggcctctttatcatcgatggcaagggtgtccttcgccagatcactgttaatgatttgcctgtgggacgctccgtggatgaggctctgcggctggtccaggccttccagtacacagacgagcatggggaagtttgtcccgctggctggaagcctggcagtgacacgattaagcccaacgtggatgacagcaaggaatatttctccaaacacaattaggctggctaacggatagtgagcttgtgcccctgcctaggtgcctgtgctgggtgtccacctgtgcccccacctgggtgccctatgctgacccaggaaaggccagacctgcccctccaaactccacagtatgggaccctggagggctaggccaaggccttctcatgcctccacctagaagctgaatagtgacgccctcccccaagcccacccagccgcacacaggcctagaggtaaccaataaagtattagggaaaggtg

SEQ ID NO: 307321 - DNA, 923 bp, Homo sapiens
  misc_feature (13)..(13): n is a, c, g, or t
  misc_feature (19)..(19): n is a, c, g, or t
  misc_feature (23)..(23): n is a, c, g, or t
  misc_feature (41)..(41): n is a, c, g, or t
attcggcacaggncggganaaangtgtgatcgtccgtgcgnctagctttgcccacgcagctttcagtcatggcctccggtaacgcgcgcatcggaaagccagcccctgacttcaaggccacagcggtggttgatggcgccttcaaagaggtgaagctgtcggactacaaagggaagtacgtggtcctctttttctaccctctggacttcacttttgtgtgccccaccgagatcatcgcgttcagcaaccgtgcagaggacttccgcaagctgggctgtgaagtgctgggcgtctcggtggactctcagttcacccacctggcttggatcaacaccccccggaaagagggaggcttgggccccctgaacatccccctgcttgctgacgtgaccagacgcttgtctgaggattacggcgtgctgaaaacagatgagggcattgcctacaggggcctctttatcatcgatggcaagggtgtccttcgccagatcactgttaatgatttgcctgtgggacgctccgtggatgaggctctgcggctggtccaggccttccagtacacagacgagcatggggaagtttgtcccgctggctggaagcctggcagtgacacgattaagcccaacgtggatgacagcaaggaatatttctccaaacacaattaggctggctaacggatagtgagcttgtgcccctgcctaggtgcctgtgctgggtgtccacctgtgcccccacctgggtgccctatgctgacccaggaaaggccagacctgcccctccaaactccacagtatgggaccctggagggctaggccaaggccttctcatgcctccacctagaagctgaatagtgacgccctcccccaagcccacccagccgcacacaggcctagaggtaaccaataaagtattagggaaaggtg

SEQ ID NO: 307322 - DNA, 1144 bp, Homo sapiens
gagagagagagagagagagagagagagagagagagagagagagagagagagagagagagagagagagagagccgctccgctcgtccgctccctcccccgcgccgtgcacgtcttggttcgggccgggcataaaaggcttcgcggcccaggctcacttggcgctgagaacgcgggtccacgcgtgtgatcgtccgtgcgtctagcctttgcccacgcagctttcagtcatggcctccggtaacgcgcgcatcggaaagccagcccctgacttcaaggccacagcggtggttgatggcgccttcaaagaggtgaagctgtcggactacaaagggaagtacgtggtcctctttttctaccctctggacttcacttttgtgtgccccaccgagatcatcgcgttcagcaaccgtgcagaggacttccgcaagctgggctgtgaagtgctgggcgtctcggtggactctcagttcacccacctggcttggatcaacaccccccggaaagagggaggcttgggccccctgaacatccccctgcttgctgacgtgaccagacgcttgtctgaggattacggcgtgctgaaaacagatgagggcattgcctacaggggcctctttatcatcgatggcaagggtgtccttcgccagatcactgttaatgatttgcctgtgggacgctccgtggatgaggctctgcggctggtccaggccttccagtacacagacgagcatggggaagtttgtcccgctggctggaagcctggcagtgacacgattaagcccaacgtggatgacagcaaggaatatttctccaaacacaattaggctggctaacggatagtgagcttgtgcccctgcctaggtgcctgtgctgggtgtccacctgtgcccccacctgggtgccctatgctgacccaggaaaggccagacctgcccctcaatccaagtatgggactgaaggtagcaagcttaagctcacaaaatgtaggaggcccccaaacacaccacggaaagctgaggtacgaagttctgacggaaaaacacaaaaaaaggggcaagcacgggcacagacactgtaaggcccaaggaaaaagcggaaaggaagaggtcaaccgagacacaacaatattagaataaaaatcaac

SEQ ID NO: 307323 - DNA, 1269 bp, Homo sapiens
gagagagagagagagagagagagagagagagagagagagagagagagagagagagagagagagagagagagccgctccgctcgtccgctccctcccccgcgccgtgcacgtcttggttcgggccgggcataaaaggcttcgcggcccaggctcacttggcgctgagaacgcgggtccacgcgtgtgatcgtccgtgcgtctagcctttgcccacgcagctttcagtcatggcctccggtaacgcgcgcatcggaaagccagcccctgacttcaaggccacagcggtggttgatggcgccttcaaagaggtgaagctgtcggactacaaagggaagtacgtggtcctctttttctaccctctggacttcacttttgtgtgccccaccgagatcatcgcgttcagcaaccgtgcagaggacttccgcaagctgggctgtgaagtgctgggcgtctcggtggactctcagttcacccacctggcttggatcaacaccccccggaaagagggaggcttgggccccctgaacatccccctgcttgctgacgtgaccagacgcttgtctgaggattacggcgtgctgaaaacagatgagggcattgcctacaggtactgtgggaccctcagcccggctcagggagcgccctgccccccattcctgtgatgctgggaccactcctgtacaatgtcttctctgcccccagccctgtggctagcagcgggtggttggtagtcccttccttgtctctggcagtgggagctatcagctcctcactgggaaccctgatgtcttcaggggcctctttatcatcgatggcaagggtgtccttcgccagatcactgttaatgatttgcctgtgggacgctccgtggatgaggctctgcggctggtccaggccttccagtacacagacgagcatggggaagtttgtcccgctggctggaagcctggcagtgacacgattaagcccaacgtggatgacagcaaggaatatttctccaaacacaattaggctggctaacggatagtgagcttgtgcccctgcctaggtgcctgtgctgggtgtccacctgtgcccccacctgggtgccctatgctgacccaggaaaggccagacctgcccctccaaactccacagtatgggaccctggagggctaggccaaggccttctcatgcctccacctagaagctgaatagtgacgccctcccccaagcccacccagccgcacacaggcctagaggtaaccaataaagtattagggaaaggtg

SEQ ID NO: 307324 - DNA, 1698 bp, Homo sapiens
  misc_feature (875)..(875): n is a, c, g, or t
gagagagagagagagagagagagagagagagagagagagagagagagagagagagagagagagagagagagccgctccgctcgtccgctccctcccccgcgccgtgcacgtcttggttcgggccgggcataaaaggcttcgcggcccaggctcacttggcgctgagaacgcgggtccacgcgtgtgatcgtccgtgcgtctagcctttgcccacgcagctttcagtcatggcctccggtaacgcgcgcatcggaaagccagcccctgacttcaaggccacagcggtggttgatggcgccttcaaagaggtgaagctgtcggactacaaagggaagtacgtggtcctctttttctaccctctggacttcacttttgtgtgccccaccgagatcatcgcgttcagcaaccgtgcagaggacttccgcaagctgggctgtgaagtgctgggcgtctcggtggactctcagttcacccacctggcttgggtatgagcaggggccaaagagggaggttgcagctaagctcacaccctcaggtcctagcagtgtggcttcgtggccattgctcaacctctggaacctgcgtttccccatcgtgaaaataatggaaacattgccgcccaagtctttaaggatgatgacagtaattagcatttgacaactagttgcctggtatatagagttgcagatgcaactcagatgcaactctatctactctatgtacttagttcccaggagggaggctgtgctgccctatttcatgaagatggaaactccagttcaccgaagtgaagggctgtaccccatgacacagctagaggaggatggggactcttaacacaggctctctgctgggtgatgctgcaagttacaagnacatgtgaagccacttagctggagctgtgcctctcaaactcagtcttcccagccatggggatacagtccttgcacccaacccagggtggggtgggtgaggctcccagcggcctactctaaagccccttatctccggcctccagtgcttatcacattgggcccacagggtgaggaccctgctgtgccaggcatcctgaggccccaactctgtctcccctactcccagatcaacaccccccggaaagagggaggcttgggccccctgaacatccccctgcttgctgacgtgaccagacgcttgtctgaggattacggcgtgctgaaaacagatgagggcattgcctacaggggcctctttatcatcgatggcaagggtgtccttcgccagatcactgttaatgatttgcctgtgggacgctccgtggatgaggctctgcggctggtccaggccttccagtacacagacgagcatggggaagtttgtcccgctggctggaagcctggcagtgacacgattaagcccaacgtggatgacagcaaggaatatttctccaaacacaattaggctggctaacggatagtgagcttgtgcccctgcctaggtgcctgtgctgggtgtccacctgtgcccccacctgggtgccctatgctgacccaggaaaggccagacctgcccctccaaactccacagtatgggaccctggagggctaggccaaggccttctcatgcctccacctagaagctgaatagtgacgccctcccccaagcccacccagccgcacacaggcctagaggtaaccaataaagtattagggaaaggtg

SEQ ID NO: 307325 - DNA, 1028 bp, Homo sapiens
gagagagagagagagagagagagagagagagagagagagagagagagagagagagagagagagagagagagccgctccgctcgtccgctccctcccccgcgccgtgcacgtcttggttcgggccgggcataaaaggcttcgcggcccaggctcacttggcgctgagaacgcgggtccacgcgtgtgatcgtccgtgcgtctagcctttgcccacgcagctttcagtcatggcctccggtaacgcgcgcatcggaaagccagcccctgacttcaaggccacagcggtggttgatggcgccttcaaagaggtgaagctgtcggactacaaagggaagtacgtggtcctctttttctaccctctggacttcacttttgtgtgccccaccgagatcatcgcgttcagcaaccgtgcagaggacttccgcaagctgggctgtgaagtgctgggcgtctcggtggactctcagttcacccacctggcttggatcaacaccccccggaaagagggaggcttgggccccctgaacatccccctgcttgctgacgtgaccagacgcttgtctgaggattacggcgtgctggtccttcgccagatcactgttaatgatttgcctgtgggacgctccgtggatgaggctctgcggctggtccaggccttccagtacacagacgagcatggggaagtttgtcccgctggctggaagcctggcagtgacacgattaagcccaacgtggatgacagcaaggaatatttctccaaacacaattaggctggctaacggatagtgagcttgtgcccctgcctaggtgcctgtgctgggtgtccacctgtgcccccacctgggtgccctatgctgacccaggaaaggccagacctgcccctccaaactccacagtatgggaccctggagggctaggccaaggccttctcatgcctccacctagaagctgaatagtgacgccctcccccaagcccacccagccgcacacaggcctagaggtaaccaataaagtattagggaaaggtg

SEQ ID NO: 307326 - DNA, 3788 bp, Homo sapiens
  misc_feature (374)..(374): n is a, c, g, or t
  misc_feature (1434)..(1434): n is a, c, g, or t
gagagagagagagagagagagagagagagagagagagagagagagagagagagagagagagagagagagagccgctccgctcgtccgctccctcccccgcgccgtgcacgtcttggttcgggccgggcataaaaggcttcgcggcccaggctcacttggcgctgagaacgcgggtccacgcgtgtgatcgtccgtgcgtctagcctttgcccacgcagggtatgaacacccggagtgcacctggcgggaggacccccttcaggctgctttggcccgatcctgactttagtgctggccgcctttgctttccatccgctatagtggcctcctttgtccttgcgggggaaaccgaggccacagccttgcagcgcagncctgatcgcccgacttcccgccccctgctcgtgcgggcctcactgtctccttctgggctgggggcttgcgacaccgccctccggccgactcgctcgtggggtgctggtggcagtggctgggtcactcgtgctctggtcaggagagcgggtctccggcagcctccgggcctcgtagaccgggtacccgggagggtgagggttagtgctgtcgcctccgccgtgctgactcagtcatagggcccagcacgcagcgcgaccttgggttgggaggacaaagtgtcttcccgggcgcactgaccgggcgggggtctcagctttcagtcatggcctccggtaacgcgcgcatcggaaagccagcccctgacttcaaggccacagcggtggttgatggcgccttcaaagaggtgaagctgtcggactacaaaggtgagcgccgcccggagggggcccaggtagaagcggggccgtgcatgagagaagctgggccctaactcctctgtgtccctcctccccagggaagtacgtggtcctctttttctaccctctggacttcacttttgtgtgccccaccgagatcatcgcgttcagcaaccgtgcagaggacttccgcaagctgggctgtgaagtgctgggcgtctcggtggactctcagttcacccacctggcttgggtatgagcaggggccaaagagggaggttgcagctaagctcacaccctcaggtcctagcagtgtggcttcgtggccattgctcaacctctggaacctgcgtttccccatcgtgaaaataatggaaacattgccgcccaagtctttaaggatgatgacagtaattagcatttgacaactagttgcctggtatatagagttgcagatgcaactcagatgcaactctatctactctatgtacttagttcccaggagggaggctgtgctgccctatttcatgaagatggaaactccagttcaccgaagtgaagggctgtaccccatgacacagctagaggaggatggggactcttaacacaggctctctgctgggtgatgctgcaagttacaagnacatgtgaagccacttagctggagctgtgcctctcaaactcagtcttcccagccatggggatacagtccttgcacccaacccagggtggggtgggtgaggctcccagcggcctactctaaagccccttatctccggcctccagtgcttatcacattgggcccacagggtgaggaccctgctgtgccaggcatcctgaggccccaactctgtctcccctactcccagatcaacaccccccggaaagagggaggcttgggccccctgaacatccccctgcttgctgacgtgaccagacgcttgtctgaggattacggcgtgctgaaaacagatgagggcattgcctacaggtactgtgggaccctcagcccggctcagggagcgccctgccccccattcctgtgatgctgggaccactcctgtacaatgtcttctctgcccccagccctgtggctagcagcgggtggttggtagtcccttccttgtctctggcagtgggagctatcagctcctcactgggaaccctgatgtcttcaggggcctctttatcatcgatggcaagggtgtccttcgccagatcactgttaatgatttgcctgtgggacgctccgtggatgaggctctgcggctggtccaggccttccagtacacagacgagcatggggaagggtgagcagatacacacatgacacatgggtacatactgagcgcctccgtcactcatgcaaacattcactgcctgtcctcttacctgtccagatgggtgttagggccccaaagaagattcagctcagggctttgtctgcaggatgtttctaatgtggtaggagacaaataacgcctgacattcaaccaaggtggacaaaggggccgggctcagtggctcacggttgtattgccagcactttgggaagctgtggcaggtggatcacctgaggtcaggagttcgagaccagcctgaccaacatggtgaaaccccgtctctacgaagaacacaaaaaattagctggccgtggtggtgcacacttgtaatcccagctacttgagagactgaggcaggagttcgcttgaacccaggaggcagaggttgcagtgagctgagatcgcaccgttgtactccagcttgggcaacagagcaaaactcagtctcaaaaaaaaaaaaaattagcttggtttgtgaagcatgcctatagtcccagctactcaagaggctgaggctggaggatcacttgagcctgggaggtcaaggctgcagtaagctgtgatcgcaccactgcactccagcctgggtgacacagcaagaccctgtctcaaaaaaacaaacaaacaggccgagcgcggtggctcacgcctgtaatcccagcactttgggaggccgaggcgggcagatcatgaggtcaggagtttgagaccagcctggccaacatagtgaaaccgcgtctctgctaaaaatacaaaaaaattagctgggtgcggtggcaggtgcctgtaatcccagctacttgggaggctgaggcaggagactcccttgaacccgggaggaggttgcagtaagccgagatcacaccactgcactccagcctgggcgccagtgtgagactccatctcaaaaacaacaacaacaaaaaaacctgtaggggtggggcagagggacaaagatgggactaaaggagccaaaaagacaggaagatgctgtgtctcatgcctgtagatgctgtgtctcatgcctgtagttccacctactctggagagtgaggcagaagattgcttaggcccaggaatttgagtcgagcctaggcaacatagcaataccccatctcttttttttttttttttaagagatggggtattggttaaaaaaaaaaaaaaaaaaaaagaggccagatgcagtggctcacacctgtaatcccagcattttgggaggcctaggtgggtggatcacctgaggtcgggagttcgagacaagcttgaccgacatggagaaacccagtctctactaaaaatacaaaattagcccagcctggtggtgcatgcctgtaatcccagctacttgggaggctgaggcaagagaatcgtttgaagctgagaggcggaggttgcagtgagctgagatcgtgccattgcactccagcctgggcaacgagtgaagcgaaactccgtctcaaaaaataaaaaaaaaaaagaggccgggcacggtggctcatgcctgtaatcccaccactttgggaggctgaggcgggcggatcaagaggtcaggagatcgagaccatcctagctaacgcggtgaaaccctgtctctactaaaaatacaaaaaaattagtcgggcgtggtggcgggcgcctgtagtcccagcta

SEQ ID NO: 307327 - DNA, 830 bp, Homo sapiens
agggaagaggaaggaggccgcggcttcgcgtcccgcctctcgcctggctggccgtggggggcctggacgcagtggcctcccgaatctcccaggaccctaatatcgcccgaggatgctgggaggaacgctgagccgacctctccgttaggctgaagattgcacaaaccatgctaatggccagcatggatggagggagcgtgtgagatgtgtggggcagcgtgctgcatctcagccaactccaggagccagttgatgtgatggactaccttaattgatttttgaatgttgagccagccttatgcatgtgggataaacccctgttgatcatggctggctggagtgcagtggtgcaatcatggctcactgcaacctcaaattcctgggctcaagggatcctcctgcctcagcctcccgagtagctgggactacaggtgtgtgccaccactcccagctgatttttttattttttgtggggacgagatctaactttgttgcccaggctggtattgagctcttgggttcaagtaatcctcctgcctcagtctcctaaagtgctagggttatagatgtgagccactgtacccagccaggttgtatattgaaataataatttcttaatatattgaattaaaatatatttaaggcaattttatctgtttctttttactttttaaatgtggttactggataatttgaaattatatatatgactgtcatatataagacaaaggaaatgtaagagatttcctttggacaacactattctcaagggtacttgggaaaggtttccagagcttaaaagacggagaaataaagtcagatagaaggat

SEQ ID NO: 307328 - DNA, 2309 bp, Homo sapiens
agggaagaggaaggaggccgcggcttcgcgtcccgcctctcgcctggctggccgtggggggcctggacgcagtggcctcccgaatctcccaggaccctaatatcgcccgaggatgctgggaggaacgctgagccgacctctccgttaggctgaagattgcacaaaccatgctaatggccagcatggatggagggagcgtgtgagatgtgtggggcagcgtgctgcatctcagccaactccaggagccagttgatgtgatggactaccttaattgatttttgaatgttgagccagccttatgcatgtgggataaacccctgttgatcatggctggctggagtgcagtggtgcaatcatggctcactgcaacctcaaattcctgggctcaagggatcctcctgcctcagcctcccgagtagctgggactacagttcctgctggaatcttgctgttgcccattcaagtctggtggttcctgtgtgttggggtggccttgcttctcctgctcttagctctggaggagccctcggctggtgctgcagtgaatctgtcagagtcgtcctaaccagagtgcccccatcctgaatagaggctggataaagccaaacctgctgggttatagtcccaggggattgggcagtcctggtcacaagatatttaaggttgagggaataagttaatgatgctaagtaaataaagaccctgaattctttcccgtgagagattcaagaactcactcttggcatctgggataagaccctttttccggtaacaaacccctgccctggccctttcttccttctggaaaacttaaaaaaaaaataggcctcaaaaagactgcattaatctgagaaactgctgaatatggctactaagagaagctgggattttctgatttttaatgtcggtttcaaagagagcaggtatactttgcaggagggaaccatgctagctgcagaatcatggacgagctggaccacaagtttttacacagtgtgcatgcttttgttctcctgtcaacttctgttgttttcctgtcaacttctgttgttttcatcaaaagccatcaacccgcctcagccagggcatcataatgtacatgcaacagagtgttccaagaaactttcagctgagaccctaagaccctggacatgcaatgccagagtgaagtgtgaggaccacagctgtgcaggacatgcagaaaggaggggcagagagccaatgagatgatgtcccacgactcacctgtgtcagtggagaccgaaggagacttggagggtgcttttggagagaactgctgatgttttgtgagcctcactctctctgtgtgtggaaatgctggaggatgaaaccgtctaaactctcctgaagtcccgggaatggagttttaatggtaatgtgtgatgggatgtgtgttctcttatggtatgggagacacagaggactcacagaggactggcctctgcctcttgaccagggatcaggagagatgggaactgagctggtcagctgctcttcagagctggtcgaggagagatttctgctgtgctgggagggcctaaaaacatgcatggatggagcccaaggaccaggtgcagatcttatgcaagaatgaaccagggggtgacttaggtccaccaaaagactgcccagagggacaaaaggctatcagtgaaaagaatccacagatgaactgccagttcctcagggctgaggcaagatcttaattttgagtaggagcagagtgtattacctacaacaaggataccacagatgagaaaaccctagttttaaacctgctacatccaaagagagcaatgcaactctggcagtagcaaaaatgttgtgcctctcctttcctcactcctaatttcccatcccagagaagggtcagaaaccatcttctgcaagatgggaggaagggtagcagccagactgcaaaaagggagaagaaaccagctacctcttgctgttctcagtggcagactccccacctgcaacaggtcaggtctgttactggagagaaaagacaggacatttttaaattctaggtatagagcaataaaagaagaattcaaacaaagggatcaggaagaggattgctactaagaggcagagaaaccaatgaagccttttgccatctcacactggaaagacaaaaagtcatagaggcttgatttttataaggaaagagaagtgagaaactgacctcgatactttgttggacttgcctaaagacatttgctgaattctcgggctgtgctgggatggagattagaggccaaataaaaacctctggtaagtagtgc

SEQ ID NO: 307329 - DNA, 1365 bp, Homo sapiens
  misc_feature (346)..(346): n is a, c, g, or t
  misc_feature (443)..(443): n is a, c, g, or t
  misc_feature (543)..(543): n is a, c, g, or t
  misc_feature (561)..(561): n is a, c, g, or t
  misc_feature (605)..(605): n is a, c, g, or t
  misc_feature (670)..(670): n is a, c, g, or t
  misc_feature (956)..(956): n is a, c, g, or t
agggaagaggaaggaggccgcggcttcgcgtcccgcctctcgcctggctggccgtggggggcctggacgcagtggcctcccgaatctcccaggaccctaatatcgcccgaggatgctgggaggaacgctgagccgacctctccgttaggctgaagattgcacaaaccatgctaatggccagcatggatggagggagcgtgtgagatgtgtggggcagcgtgctgcatctcagccaactccaggagccagttgatgtgatggactaccttaattgatttttgaatgttgagccagccttatgcatgtgggataaacccctgttgatcatgatggaacgaagtctgtntgtggaaacacccttcccctctgtttacttggacctgattttgaaagtaacaagtcactttatttgggctggaggaaaaagcactaaaccagatgtngaggtgaccgggattcctggaagacattcttctctccaacgagacacatgatgcatgaagtaggagcccctggcaaggagcccaggctgccatggctcgntcgctcctgcttcccggnatggccccgaggctagctgctctgtactgctgagcatcgtcccntggcgtgtcaccagactacccactactgtgcttgccctgcggtgggcggttcagtcgttgcaggntgaagtccctgtacaggagtccatacgcacggagttacccaatgggccaggcacaggaggatggccatggcaaaaccggagatacaatgaagaccaaatgaccggaggagagagacacagcaggcaggacacaaggcatgcgaattaaagagcacatgttaccaacaggaacagcgaaaaccgagacacacaggactgcgggagagacgagaacacagcgagaggaaaacagagagaacacggcacagtcgtacatctgcggttgccacccgcatcgagcgatccnagctcacgcaaacaagcagacaggagacggagcgagccaggacgaacgaacagaggacgcaggaagaagagagggagcgcgaagcggcacagaagtaggacagtgcgacaagcaggaagagcgcgcgagagcggacgtgacgcgaacacggagacagagacaggacagaagacgagagagtgagcacagacgggaggaacgaagaaggcgagagcggcagagggagagaaaacagaaaaaggagagagagagagcgacaacaaacgcaggagacggagagcggcgagacgcacaaagggaagaagcgccgacgagacgaagagaggagcagcagacgagggcaggcagaagacgggcacagaccgagaagaagacaggaggagggaggaacggacagaagaggcaaacg

SEQ ID NO: 307330 - DNA, 1084 bp, Homo sapiens
agggaagaggaaggaggccgcggcttcgcgtcccgcctctcgcctggctggccgtggggggcctggacgcagtggcctcccgaatctcccaggaccctaatatcgcccgaggatgctgggaggaacgctgagccgacctctccgttaggctgaagattgcacaaaccatgctaatggccagcatggatggagggagcgtgtgagatgtgtggggcagcgtgctgcatctcagccaactccaggagccagttgatgtgatggactaccttaattgatttttgaatgttgagccagccttatgcatgtgggataaacccctgttgatcatggctggctggagtgcagtggtgcaatcatggctcactgcaacctcaaattcctgggctcaagggatcctcctgcctcagcctcccgagtagctgggactacagctttccaaagagctgtccaaaatgccccctgccccctgcttttccacagaggaaccccagccatctcagtgtgtgttctccctcacccagctgacctggccgaaggctgttctaggtgccaagaggacccttctctcatcgtggggagcactcggggatggttgcgtttcctgcctcatcccattactgaggcttgtactcatctccctccggggcactctcttacccgagttgagatacctctgcaactgaggggttgactccatgtcatttcaaaatgggaactttccaggctcacatttgtcaccaactgttcatggatggtcataagaaactactaaaccctattccagttacgtggccgaccaaaaacgcagcacctgcacgaactaacacagacagcgacagccacaacaaaagacaagacctccagaagaacagacacacacaacacgcgcggcgcgcacaaatagtcaaccgcggacgcatcaaagcgcagccgcaataggaacagccgacccgaaagcagagaaaaaaaacagagaggggtaagaaaccaggagaaacacacggactgaggagccacctctcgcgggatacgtagcacccgacgacggcgaggacaacaagagaggcgcacgcgccgagagcaa

SEQ ID NO: 307331 - DNA, 363 bp, Homo sapiens
gtccaactgcactagctaggactgctagtatgatgttgaaaaagagtggcaagagggatcacccttgtcttgttgctaatcttagccagaaagcttctaatttctcactattaagcatggtattaactgtagggctttaaacagatatattatttagcaggtttaggaagctcccctctattcttagtaggctgagtgtttttatcataaacaggcagtggattttgtcaaatgtcttttctgtgtatattgataagatcatatgattttcttttttagccagttgatgtgatggactaccttaattgatttttgaatgttgagccagccttatgcatgtgggataaacccctgttgatcatg

SEQ ID NO: 307332 - DNA, 1006 bp, Homo sapiens
ttaatataaaattttgaaagatgtaaggctatggaaaaacatagtaaaaaattattcaagaatattttgtaatgcatgaaagcttttgaaaggctaattttatctttagttgtataaatatattttggaagagaataagattttaatatgtgtatctacattatctgtgtctttcactaataagacaaggttcaacatctgtcttcagattgcattttctgtgggaagaacttaggttgtaggcatttagctcagagaaaggggaaaaggtactttcactgctcactttttgctatttctgccccaagacctactgttcattctccagacttgctgtattttatgtcgaaaggttttactgtttccatgaggaactgtggttcattttccccaggcttataatcagtaagtagtgattttcttttcagtgttacttactgtgatactgtaaaatcaaactaacaataaggtgccacaacgccataaaaaattaataatattgggaagatgttgattcccaaactaagatttgggctttggttttgaactgttaatttgttcattcattttaatatttcctttgactgtctcagatataccaaagcgtggtgcattgtggaatgtgtgccagtctcaatgcatgtagctctgtaggatggaaagtcagttatgaagagagacttctttttcttctgtgtcctgttgattaagaagaatctgtatggccgggcacggtggctcacgcctgtaatcccagcactttggaaggctgaggggggtggatcacgaggtcaggagttcaagatgaacttggccaagatagtgaaaccctgtctctactaaaaataaaaaaaaaaattagccgggcgtggtggtgggcgcctgtaatctcagctacttgggaggctgagacagagaattgcttgaacccaggaggcggaggttgcagtgagcctagatcgtgccactgcgctccagcctgggcgacagagagagactccatctc

SEQ ID NO: 307333 - DNA, 390 bp, Homo sapiens
gccacgtgtggtgctgtgtgcctatagtcccagctgcttaggaggctgagatgggaggattgcttgagccaaggaggttgatgctgcagagctgagattgtaccactgcattccggcctgggcaacagagcaagaccctgtctcaaagaaatctggacttaatataaaattttgaaagatgtaaggctatggaaaaacatagtaaaaaattattcaagaatattttgtaatgcatgaaagcttttgaaaggctaattttatctttagttgtataaatatattttggaagagaataagattttaatatgtgtatctacattatctgtgtctttcactaataagacaaggttcaacatctgtcttcagattgcattttctgtgggaagaact

SEQ ID NO: 307334 - DNA, 375 bp, Homo sapiens
tggtattaaatttgtgagtcattgaaattaatccctgactgaattggaaaggaattgtatttgcagtatttggatttatttatttttcaggtatggaattctggtgattttgaaaacatgaatgataccattttgcagcagcattgtagatttgtagtattttagattggtatcacagtgcacctgaaaagtaagtttcattttacttttttttattgttgttgagacggagtctcactttgtcacccaggctggagtgcagtggtgtgatcttggctcatggcagcctctgcctcgctggttcaagcgattctcctgcctcagcctcccgagtagctaggactatagatgctcgccaccatgcccagctaattt

SEQ ID NO: 307335 - DNA, 1818 bp, Homo sapiens
aacaaagcaaaacaaaccttgggaaactaaggccatttgttttgttttggtgtcccctttgaagccctgccttctggccttactcctgtacagatatttttgacctataggtgcctttatgagaattgagggtctgacatcctgccccaaggagtagctaaagtaattgctagtgttttcagggattttaacatcagactggaatgaatgaatgaaactttttgtcctttttttttctgtttttttttttctaatgtagtaaggactaaggaaaacctttggtgaagacaatcatttctctctgttgatgtggatacttttcacaccgtttatttaaatgctttctcaataggttccagagccagtgttcttgttcaacctgaaagtaatggctctgggttgggccagacagttgcactctctagtttgccctctgccacaaatttgatgtgtgacctttgggcaagtcatttatcttctctgggccttagttgcctcatctgtaaaatgagggagttggagtagattaattattccagctctgaaattctaagtgaccttggctaccttgcagcagttttggatttcttccttatctttgttctgctgtttgagggggctttttacttatttccatgttattcaaaggagactaggcttgatattttattactgttcttttatggacaaaaggttacatagtatgcccttaagacttaattttaaccaaaggcctagcaccaccttaggggctgcaataaacacttaacgcgcgtgcgcacgcacacacacacacacacacacacacacaggtcagagtttaaggctttcgagtcatgacattctagcttttgaattgcgtgcacacacacacgcacgcacacactctggtcagagtttattaaggctttcgagtcatgacattatagcttttgagttggtgtgtgtgacaccaccctcctaagtggtgtgtgcttgtaattttttttttcagtgaaaatggattgaaaacctgttgttaatgcttagtgatattatgctcaaaacaaggaaattcccttgaaccgtgtcaattaaactggtttatatgactcaagaaaacaataccagtagatgattattaactttattcttggctctttttaggtccattttgattaagtgacttttggctggatcattcagagctctcttctagcctacccttggatgagtacaattaatgaaattcatattttcaaggacctgggagccttccttggggctgggttgagggtggggggttggggagtcctggtagaggccagctttgtggtagctggagaggaagggatgaaaccagctgctgttgcaaaggctgcttgtcattgatagaaggactcacgggcttggattgattaagactaaacatggagttggcaaactttcttcaagtattgagttctgttcaatgcattggacatgtgatttaagggaaaagtgtgaatgcttatagatgatgaaaacctggtgggctgcagagcccagtttagaagaagtgagttgggggttggggacagatttggtggtggtatttcccaactgtttcctcccctaaattcagaggaatgcagctatgccagaagccagagaagagccactcgtagcttctgctttggggacaactggtcagttgaaagtcccaggagttcctttgtggctttctgtatacttttgcctggttaaagtctgtggctaaaaaatagtcgaacctttcttgagaactctgtaacaaagtatgtttttgattaaaagagaaagccaactaaaaaaaaatgt

SEQ ID NO: 307336 - DNA, 1833 bp, Homo sapiens
aacaaagcaaaacaaaccttgggaaactaaggccatttgttttgttttggtgtcccctttgaagccctgccttctggccttactcctgtacagatatttttgacctataggtgcctttatgagaattgagggtctgacatcctgccccaaggagtagctaaagtaattgctagtgttttcagggattttaacatcagactggaatgaatgaatgaaactttttgtcctttttttttctgtttttttttttctaatgtagtaaggactaaggaaaacctttggtgaagacaatcatttctctctgttgatgtggatacttttcacaccgtttatttaaatgctttctcaataggttccagagccagtgttcttgttcaacctgaaagtaatggctctgggttgggccagacagttgcactctctagtttgccctctgccacaaatttgatgtgtgacctttgggcaagtcatttatcttctctgggccttagttgcctcatctgtaaaatgagggagttggagtagattaattattccagctctgaaattctaagtgaccttggctaccttgcagcagttttggatttcttccttatctttgttctgctgtttgagggggctttttacttatttccatgttattcaaaggagactaggcttgatattttattactgttcttttatggacaaaaggttacatagtatgcccttaagacttaattttaaccaaaggcctagcaccaccttaggggctgcaataaacacttaacgcgcgtgcgcacgcgcgcgccgcacacacacacacacacacacacacacacacacaggtcagagtttaaggctttcgagtcatgacattctagcttttgaattgcgtgcacacacacacgcacgcacacactctggtcagagtttattaaggctttcgagtcatgacattatagcttttgagttggtgtgtgtgacaccaccctcctaagtggtgtgtgcttgtaattttttttttcagtgaaaatggattgaaaacctgttgttaatgcttagtgatattatgctcaaaacaaggaaattcccttgaaccgtgtcaattaaactggtttatatgactcaagaaaacaataccagtagatgattattaactttattcttggctctttttaggtccattttgattaagtgacttttggctggatcattcagagctctcttctagcctacccttggatgagtacaattaatgaaattcatattttcaaggacctgggagccttccttggggctgggttgagggtggggggttggggagtcctggtagaggccagctttgtggtagctggagaggaagggatgaaaccagctgctgttgcaaaggctgcttgtcattgatagaaggactcacgggcttggattgattaagactaaacatggagttggcaaactttcttcaagtattgagttctgttcaatgcattggacatgtgatttaagggaaaagtgtgaatgcttatagatgatgaaaacctggtgggctgcagagcccagtttagaagaagtgagttgggggttggggacagatttggtggtggtatttcccaactgtttcctcccctaaattcagaggaatgcagctatgccagaagccagagaagagccactcgtagcttctgctttggggacaactggtcagttgaaagtcccaggagttcctttgtggctttctgtatacttttgcctggttaaagtctgtggctaaaaaatagtcgaacctttcttgagaactctgtaacaaagtatgtttttgattaaaagagaaagccaactaaaaaaaaatgt

SEQ ID NO: 307337 - DNA, 1814 bp, Homo sapiens
aacaaagcaaaacaaaccttgggaaactaaggccatttgttttgttttggtgtcccctttgaagccctgccttctggccttactcctgtacagatatttttgacctataggtgcctttatgagaattgagggtctgacatcctgccccaaggagtagctaaagtaattgctagtgttttcagggattttaacatcagactggaatgaatgaatgaaactttttgtcctttttttttctgtttttttttttctaatgtagtaaggactaaggaaaacctttggtgaagacaatcatttctctctgttgatgtggatacttttcacaccgtttatttaaatgctttctcaataggttccagagccagtgttcttgttcaacctgaaagtaatggctctgggttgggccagacagttgcactctctagtttgccctctgccacaaatttgatgtgtgacctttgggcaagtcatttatcttctctgggccttagttgcctcatctgtaaaatgagggagttggagtagattaattattccagctctgaaattctaagtgaccttggctaccttgcagcagttttggatttcttccttatctttgttctgctgtttgagggggctttttacttatttccatgttattcaaaggagactaggcttgatattttattactgttcttttatggacaaaaggttacatagtatgcccttaagacttaattttaaccaaaggcctagcaccaccttaggggctgcaataaacacttaacgcgcgtgcgcacgcgcgcgccgcacacacacacacacacacacacacacacacacaggtcagagtttaaggctttcgagtcatgacattctagcttttgaattgcgtgcacacacacacgcacgcacacactctggtcagagtttattaaggctttcgagtcatgacattatagcttttgagttggtgtgtgtgacaccaccctcctaagtggtgtgtgcttgtaattttttttttcagtgaaaatggattgaaaacctgttgttaatgcttagtgatattatgctcaaaacaaggaaattcccttgaaccgtgtcaattaaactggtttatatgactcaagaaaacaataccagtagatgattattaactttattcttggctctttttaggtccattttgattaagtgacttttggctggatcattcagagctctcttctagcctacccttggatgagtacaattaatgaaattcatattttcaaggacctgggagccttccttggggctgggttgagggtggggggttggggagtcctggtagaggccagctttgtggtagctggagaggaagggatgaaaccagctgctgttgcaaaggctgcttgtcattgatagaaggactcacgggcttggattgattaagactaaacatggagttggcaaactttcttcaagtattgagttctgttcaatgcattggacatgtgatttaagggaaaagtgtgaatgcttatagatgatgaaaacctggtggaagaagtgagttgggggttggggacagatttggtggtggtatttcccaactgtttcctcccctaaattcagaggaatgcagctatgccagaagccagagaagagccactcgtagcttctgctttggggacaactggtcagttgaaagtcccaggagttcctttgtggctttctgtatacttttgcctggttaaagtctgtggctaaaaaatagtcgaacctttcttgagaactctgtaacaaagtatgtttttgattaaaagagaaagccaactaaaaaaaaatgt

SEQ ID NO: 307338 - DNA, 4051 bp, Homo sapiens
ggcagagggcggcagccatcaggtaagccaagatgggtgcatacaagtacatccaggagctatggagaaagaagcagtctgatgtcatgcgctttcttctgagggtccgctgctggcagtaccgccagctctctgctctccacagggctccccgccccacccggcctgataaagcgcgccgactgggctacaaggccaagcaaggttacgttatatataggattcgtgttcgccgtggtggccgaaaacgcccagttcctaagggtgcaacttacggcaagcctgtccatcatggtgttaaccagctaaagtttgctcgaagccttcagtccgttgcagaggagcgagctggacgccactgtggggctctgagagtcctgaattcttactgggttggtgaagattccacatacaaattttttgaggttatcctcattgatccattccataaagctatcagaagaaatcctgacacccagtggatcaccaaaccagtccacaagcacagggagatgcgtgggctgacatctgcaggccgaaagagccgtggccttggaaagggccacaagttccaccacactattggtggctctcgccgggcagcttggagaaggcgcaatactctccagctccaccgttaccgctaatataagtaaagtttgtaaaattcatacttaataaacaatttaggacagtcaaaaaaaaaaaaaaaaaactcgagactagttctctctctctcctcgaacgctgacgttggctcctgagccgggcgctgcctcgcgcctgattggcgggtcctcggggccgccctccccagcgcaccacccctgggttccctcccgggtccgcagtggaaacactgccctctcccttcttgacccctagcccttccttccctccctccttccctcctgtcgccgtctcttctggcgccgctgctcccggaggagctcccggcacggcgatgggttctcgggcctccacgttactgcgggacgaagagctcgaggagatcaagaaggagaccggcttttcccacagtcaaatcactcgcctctacagccggttcaccagcctggacaaaggagagaatgggactctcagccgggaagatttccagaggattccagaacttgccatcaacccactgggggaccggatcatcaatgccttctttccagagggagaggaccaggtaaacttccgtggattcatgcgaactttggctcatttccgccccattgaggataatgaaaagagcaaagatgtgaatggacccgaaccactcaacagccgaagcaacaaactgcactttgcttttcgactatatgatttggataaagatgaaaagatctcccgtgatgagctgttacaggtgctacgcatgatggtcggagtaaatatctcagatgagcagctgggcagcatcgcagacaggaccattcaggaggctgatcaggatggggacagtgccatatctttcacagaatttgttaaggttttggagaaggtggatgtagaacagaaaatgagcatccgatttcttcactaaaggagaccaaactgttccttgcggtctagtatttaagaactggaacttgaaagtcctccttctaccaactccacctccaccccctcattccccttctcccaaagtactactgctgttgcatgacaaccccaaatatgttctgtcaacacaaacctgcctttggtgtataaacagggcattacagaatggtacaccctatatatttctgttcagtatccattcactagttcttcatttataaatatcatcttccccattctgctgctgaatgccacacatccatccagtctgagaaagtgagagaggcaatcatgccaagaacaagccagcaaagctctttcaccagatgtagactgtagccctgctgccttccctccagcgagtctgccagcatgcttcttcatcctttttatatgttctttgcttcctacttccctgtcttccaacatactgttcacttactctggcagtctttctgcttttcattaagcctcaaaatctcctctgttctacttggcaccacaagctatgtcctatatatgtatttctgacttggcaggatagttcaggggtctggcagtttttatttaccttcattattaaatgggcctctgggatgttgcctcttcaggagctttttggtaatcaatacttctctcagaagtatgagaccatcctctgcactctgctctgtcatcaaaggctgctgggtggagataccctttttgaaaggtggccttggtgagaggtatggagccaagtcttctaggttgcttgcccacatcactctatctctggcctctgattctcaactttgtacctgtgtggctcctcttgttagtgcaatgttgactgttgaaaaagcagcagtatgcttacaggtttgcttagtttggggacaccgttaccaccagaatggctgctctgacaatatgcctagggactttctcatggcttttatttaataaggaggctgggcaccctataaagcctcatgcattcacacctttgcagcatggtttatgcctcagtgttatgtgcactggaatgttttccacttcacatttccaagtagaaatattagtgttacggaagtgcctaatatcccagtccaaattttttttttttttttttttttttttttgagacagagtcttgctctgtcacccaggctggagtgcagtggtgcgatcgctcactgcaacctcagcctcctggatttaagtgattctcctgcctcagcctcccaagtagctgggattacaggtgtgcaccaccatgcccggctaattttttgtatttttagtggagacagggtttcaccatgttggccaggctggtctcgaactcctgacctcgtgatccgcctgcctcagcctcccaaagtgctgggattacaggtgtgagccaccacgcctggccccagtccaaaatatttaaagattgtttccttagtgtcttgaagttttgcacaaaattcttttttttgagatggagtctcactctgtcacccaggctggagtgcagtggcgtgatcttggctcactgcaacctctgcctcctgggttcaagcaattctcccacctcagcctcccaagtagctgggattacagacgtgtgccaccatacctgggtaatttttgcatttttagtggagagggagtttcaccatgttggccaggttggtcttgaactcctgacctcaggtgatcctcctgcctcggcctcccaaagtgctgggattacaggcatgagccaccgtgctcagccgcaaaattctttatgaattttacacttggcaaatgttaatgacggaagccatagtctgctcctaatacatgtccaaagcattgactgttgtgtcattagctgcctggttacattagctccctggcttcttgtttagaccactgctaatcccttaaaaacaagaggtctggcactagtagcacaacctaaggtggcattacagatctttgagcgagccacagcaacttttctgccaagtcagcttagtttagacttcagtgaatcaggctattgctatcctaatgtatgtctctatgagtgtatttagccacacatctgcccttggttgactttctgactcattgcttgcttgcttgtttccttgctttggaaaactattgaagattgctaaaaaataccactgcaaagtgatggaaaagggtggagaacaggggagtagccaggctggatggctcaaatataaatgaatgaggaattctttatgaagtatcagtcagattttatgattaagtgatgtaatataggaattatgtaaaagggaagaatgtctgatactgatctattagagaggtactttagaggcttcttgattggcataaagttcctaaggttatagattttccccccttttggctgtatagcaaagtgttttaatccacggttgtgccttattgttccattaaaattgtatcttcgatccatcaataaatacttgtggttgaaacaaaa

SEQ ID NO: 307339 - DNA, 3113 bp, Homo sapiens
atcaagggaccgcagggccggctctgctttcccagcacgctgcctcaccaagaaagaatccagagaaggactggtggacttggaatgttaagtcatggcccatttgatgatgttcagggatgtggctgtagatttctctcaggaggagtgggagtgcctggacctggaacagagggatttatatagagatgtgatgttggagaactacagcacatggtctcactgggtttttgcatttatcagccagaagcgttctctttattggagaaagggaaagagccctggaagattttgagggatgagacaagaggaccttgcccagacatgcagtcgaggtgtcagaccaagaagttattaccaaaaaatggcatttttgagagagaaatagcccaattggaaataatgagaatttgtaaaaaccacagccttgactgtttatgttttagaggtgactgggaaggcaacactcagtttcaaacacttcaagataatcaagaggaatgcttcaagcaggtgatacgcacctgtgaaaaaaggcccacttttaaccagcatacagtgtttaatctacaccagagacttaatacaggagacaaactgaatgaatttaaagaactggggaaagcctttatttctggttcagatcatactcaacatcagttaattcacacaagtgagaaattctgtggagataaagaatgtgggaatacctttcttcctgattcagaagttattcaatatcagacagttcacactgttaagaaaacatatgaatgtaaagaatgtgggaagtcttttagtttacgttcgagtcttactggtcataagagaattcataccggtgagaagccttttaaatgtaaggattgtgggaaagcctttagatttcattcacaacttagtgtccataagcgaattcatactggtgagaaatcttatgaatgtaaggaatgtgggaaggcctttagttgtggctcagatcttactcgacatcagagaattcatactggtgaaaaaccctatgaatgtaatgaatgtagaaaggcctttagtcagcgatcacatcttattaaacatcagagaattcacactggtgaaaaaccttatgaatgtaaggagtgtgggaaagcttttactcgtggatcacacctaactcagcatcagagaattcatactggtgagaaatctcatgagtgtaaggaatgtggaaaagcctttattcgtggttcaaatcttgctcaacatcagaatgttcatgttggtaggaaaccttataaatgtgagaaatgtgggaaagcctatatttggagctcacaccttgctcgacatcagcgaattcatactggcaggaaaccttatgaatgtaagcaatgcgggaagacttttacttgggcttcgtatcttgctcaacatgagaaaattcacaatgagaggaaatcctatgaatgtaaggaatgtggaaagacctttcttcatggctcagagtttaatcgacatcagaaaattcatactggtgagagaaactatgaatgtaaggaatgtggaaagaccttttttcgtggttcagaacttaatcgacaccagaaaattcatactggaaagaggccatatgaatgtgaagaatgtggaaaagcctttctctggggttcacaacttactcgacatcagagaatgcatactggtgaggaaccttacgtatgtaaagaatgtgggaaatcttttatctggggttcacagcttacacgacataagaaaattcatactgatgcagaaccttatggatgcaagaaaagtagccacatctttagtcaccattcatattttactgaacaaaaaattcataatagtgcaaatctctgtgaatggacagactatgggaacacctttagtcatgagtcaaactttgctcaacaccagaatatttacacttttgagaaatcctatgaatttaaagattttgagaaagcattttcttcaagctctcacttcatttcactcttgtgaaatattatataaaagtgtaggaagggctttattcatgactcattaattgatgtcatttatttttttctcttgaggaacaccacaaatgtaagtaatattggaaggcattttaacagagcacacatccagcagcagcagcagcagcagcagagaattcatcatgcaatcaatataggaaagaaattactgatcagttatcaattgcagaatatcagggtaaaattttatgagatagcatgaattctttttgaatcattctcaaaacattctcatcagagatgttgcataaagaatttatatataatcctgacctcaggtgatcctcctgcctcggcctcccaaagtgctgggattacaggcatgagccaccgtgctcagccgcaaaattctttatgaattttacacttggcaaatgttaatgacggaagccatagtctgctcctaatacatgtccaaagcattgactgttgtgtcattagctgcctggttacattagctccctggcttcttgtttagaccactgctaatcccttaaaaacaagaggtctggcactagtagcacaacctaaggtggcattacagatctttgagcgagccacagcaacttttctgccaagtcagcttagtttagacttcagtgaatcaggctattgctatcctaatgtatgtctctatgagtgtatttagccacacatctgcccttggttgactttctgactcattgcttgcttgcttgtttccttgctttggaaaactattgaagattgctaaaaaataccactgcaaagtgatggaaaagggtggagaacaggggagtagccaggctggatggctcaaatataaatgaatgaggaattctttatgaagtatcagtcagattttatgattaagtgatgtaatataggaattatgtaaaagggaagaatgtctgatactgatctattagagaggtactttagaggcttcttgattggcataaagttcctaaggttatagattttccccccttttggctgtatagcaaagtgttttaatccacggttgtgccttattgttccattaaaattgtatcttcgatccatcaataaatacttgtggttgaaacaaaa

SEQ ID NO: 307340 - DNA, 400 bp, Homo sapiens
gcacgagtagcaatcttcaatagttttccaaagcaaggaaacaagcaagcaagcattgctaaaaaataccactgcaaagtgatggaaaagggtggagaacaggggagtagccaggctggatggctcaaatataaatgaatgaggaattctttatgaagtatcagtcagattttatgattaagtgatgtaatataggaattatgtaaaagggaagaatgtctgatactgatctattagagaggtactttagaggcttcttgattggcataaagttcctaaggttatagattttccccccttttggctgtatagcaaagtgttttaatccacggttgtgccttattgttccattaaaattgtatcttcgatccatcaataaatacttgtggttgaaacaaaa

SEQ ID NO: 307341 - DNA, 675 bp, Homo sapiens
aattcactggaatgtggcgtaatcaaatctggctccttccacttctgagttggtgcaagaaacacttggcagctattaaagtgctattctttgcagttatttggtataatttgccacagaagtaaattccaggagccgggaagatttccagaggattccagaacttgccatcaacccactgggggaccggatcatcaatgccttctttccagagggagaggaccaggtaaacttccgtggattcatgcgaactttggctcatttccgccccattgaggataatgaaaagagcaaagatgtgaatggacccgaaccactcaacagccgaagcaacaaactgcactttgcttttcgactatatgatttggataaagatgaaaagatctcccgtgatgagctgttacagtagagacggggtttcagcatattggccaggctggtctcgaactcctaacctcaagtgatccacccacctcggcctcccaaagtgctgggagtacaagcacgagccatcatgcctggccccaactgtccattttaaatatgtacagcttattgtatattatttatacttcaataaagatagttactcgggaggctgaggcaggagaatggtgtgaacctaggaggcggagcttgcagtgagccgagatcacgctactgcactccagcctg

SEQ ID NO: 307342 - DNA, 3268 bp, Homo sapiens
gaattccgggcaaagctctttcaccagatgtagactgtagccctgctgccttccctccagcgagtctgccagcatgcttcttcatcctttttatatgttctttgcttccttccctccctccttccctcctgtcgccgtctcttctggcgccgctgctcccggaggagctcccggcacggcgatgggttctcgggcctccacgttactgcgggacgaagagctcgaggagatcaagaaggagaccggcttttcccacagtcaaatcactcgcctctacagccggttcaccagcctggacaaaggagagaatgggactctcagccgggaagatttccagaggattccagaacttgccatcaacccactgggggaccggatcatcaatgccttctttccagagggagaggaccaggtaaacttccgtggattcatgcgaactttggctcatttccgccccattgaggataatgaaaagagcaaagatgtgaatggacccgaaccactcaacagccgaagcaacaaactgcactttgcttttcgactatatgatttggataaagatgaaaagatctcccgtgatgagctgttacaggtgctacgcatgatggtcggagtaaatatctcagatgagcagctgggcagcatcgcagacaggaccattcaggaggctgatcaggatggggacagtgccatatctttcacagaatttgttaaggttttggagaaggtggatgtagaacagaaaatgagcatccgatttcttcactaaaggagaccaaactgttccttgcggtctagtatttaagaactggaacttgaaagtcctccttctaccaactccacctccaccccctcattccccttctcccaaagtactactgctgttgcatgacaaccccaaatatgttctgtcaacacaaacctgcctttggtgtataaacagggcattacagaatggtacaccctatatatttctgttcagtatccattcactagttcttcatttataaatatcatcttccccattctgctgctgaatgccacacatccatccagtctgagaaagtgagagaggcaatcatgccaagaacaagccagcaaagctctttcaccagatgtagactgtagccctgctgccttccctccagcgagtctgccagcatgcttcttcatcctttttatatgttctttgcttcctacttccctgtcttccaacatactgttcacttactctggcagtctttctgcttttcattaagcctcaaaatctcctctgttctacttggcaccacaagctatgtcctatatatgtatttctgacttggcaggatagttcaggggtctggcagtttttatttaccttcattattaaatgggcctctgggatgttgcctcttcaggagctttttggtaatcaatacttctctcagaagtatgagaccatcctctgcactctgctctgtcatcaaaggctgctgggtggagataccctttttgaaaggtggccttggtgagaggtatggagccaagtcttctaggttgcttgcccacatcactctatctctggcctctgattctcaactttgtacctgtgtggctcctcttgttagtgcaatgttgactgttgaaaaagcagcagtatgcttacaggtttgcttagtttggggacaccgttaccaccagaatggctgctctgacaatatgcctagggactttctcatggcttttatttaataaggaggctgggcaccctataaagcctcatgcattcacacctttgcagcatggtttatgcctcagtgttatgtgcactggaatgttttccacttcacatttccaagtagaaatattagtgttacggaagtgcctaatatcccagtccaaattttttttttttttttttttttttttttgagacagagtcttgctctgtcacccaggctggagtgcagtggtgcgatcgctcactgcaacctcagcctcctggatttaagtgattctcctgcctcagcctcccaagtagctgggattacaggtgtgcaccaccatgcccggctaattttttgtatttttagtggagacagggtttcaccatgttggccaggctggtctcgaactcctgacctcgtgatccgcctgcctcagcctcccaaagtgctgggattacaggtgtgagccaccacgcctggccccagtccaaaatatttaaagattgtttccttagtgtcttgaagttttgcacaaaattcttttttttgagatggagtctcactctgtcacccaggctggagtgcagtggcgtgatcttggctcactgcaacctctgcctcctgggttcaagcaattctcccacctcagcctcccaagtagctgggattacagacgtgtgccaccatacctgggtaatttttgcatttttagtggagagggagtttcaccatgttggccaggttggtcttgaactcctgacctcaggtgatcctcctgcctcggcctcccaaagtgctgggattacaggcatgagccaccgtgctcagccgcaaaattctttatgaattttacacttggcaaatgttaatgacggaagccatagtctgctcctaatacatgtccaaagcattgactgttgtgtcattagctgcctggttacattagctccctggcttcttgtttagaccactgctaatcccttaaaaacaagaggtctggcactagtagcacaacctaaggtggcattacagatctttgagcgagccacagcaacttttctgccaagtcagcttagtttagacttcagtgaatcaggctattgctatcctaatgtatgtctctatgagtgtatttagccacacatctgcccttggttgactttctgactcattgcttgcttgcttgtttccttgctttggaaaactattgaagattgctaaaaaataccactgcaaagtgatggaaaagggtggagaacaggggagtagccaggctggatggctcaaatataaatgaatgaggaattctttatgaagtatcagtcagattttatgattaagtgatgtaatataggaattatgtaaaagggaagaatgtctgatactgatctattagagaggtactttagaggcttcttgattggcataaagttcctaaggttatagattttccccccttttggctgtatagcaaagtgttttaatccacggttgtgccttattgttccattaaaattgtatcttcgatccatcaataaatacttgtggttgaaacaaaa

SEQ ID NO: 307343 - DNA, 3978 bp, Homo sapiens
ggcagagggcggcagccatcaggtaagccaagatgggtgcatacaagtacatccaggagctatggagaaagaagcagtctgatgtcatgcgctttcttctgagggtccgctgctggcagtaccgccagctctctgctctccacagggctccccgccccacccggcctgataaagcgcgccgactgggctacaaggccaagcaaggttacgttatatataggattcgtgttcgccgtggtggccgaaaacgcccagttcctaagggtgcaacttacggcaagcctgtccatcatggtgttaaccagctaaagtttgctcgaagccttcagtccgttgcagaggagcgagctggacgccactgtggggctctgagagtcctgaattcttactgggttggtgaagattccacatacaaattttttgaggttatcctcattgatccattccataaagctatcagaagaaatcctgacacccagtggatcaccaaaccagtccacaagcacagggagatgcgtgggctgacatctgcaggccgaaagagccgtggccttggaaagggccacaagttccaccacactattggtggctctcgccgggcagcttggagaaggcgcaatactctccagctccaccgttaccgctaatataagtaaagtttgtaaaattcatacttaataaacaatttaggacagtcaaaaaaaaaaaaaaaaaactcgagactagttctctctctctcctcgaacgctgacgttggctcctgagccgggcgctgcctcgcgcctgattggcgggtcctcggggccgccctccccagcgcaccacccctgggttccctcccgggtccgcagtggaaacactgccctctcccttcttgacccctagcccttccttccctccctccttccctcctgtcgccgtctcttctggcgccgctgctcccggaggagctcccggcacggcgatgggttctcgggcctccacgttactgcgggacgaagagctcgaggagatcaagaaggagaccggctccgggaagatttccagaggattccagaacttgccatcaacccactgggggaccggatcatcaatgccttctttccagagggagaggaccaggtaaacttccgtggattcatgcgaactttggctcatttccgccccattgaggataatgaaaagagcaaagatgtgaatggacccgaaccactcaacagccgaagcaacaaactgcactttgcttttcgactatatgatttggataaagatgaaaagatctcccgtgatgagctgttacaggtgctacgcatgatggtcggagtaaatatctcagatgagcagctgggcagcatcgcagacaggaccattcaggaggctgatcaggatggggacagtgccatatctttcacagaatttgttaaggttttggagaaggtggatgtagaacagaaaatgagcatccgatttcttcactaaaggagaccaaactgttccttgcggtctagtatttaagaactggaacttgaaagtcctccttctaccaactccacctccaccccctcattccccttctcccaaagtactactgctgttgcatgacaaccccaaatatgttctgtcaacacaaacctgcctttggtgtataaacagggcattacagaatggtacaccctatatatttctgttcagtatccattcactagttcttcatttataaatatcatcttccccattctgctgctgaatgccacacatccatccagtctgagaaagtgagagaggcaatcatgccaagaacaagccagcaaagctctttcaccagatgtagactgtagccctgctgccttccctccagcgagtctgccagcatgcttcttcatcctttttatatgttctttgcttcctacttccctgtcttccaacatactgttcacttactctggcagtctttctgcttttcattaagcctcaaaatctcctctgttctacttggcaccacaagctatgtcctatatatgtatttctgacttggcaggatagttcaggggtctggcagtttttatttaccttcattattaaatgggcctctgggatgttgcctcttcaggagctttttggtaatcaatacttctctcagaagtatgagaccatcctctgcactctgctctgtcatcaaaggctgctgggtggagataccctttttgaaaggtggccttggtgagaggtatggagccaagtcttctaggttgcttgcccacatcactctatctctggcctctgattctcaactttgtacctgtgtggctcctcttgttagtgcaatgttgactgttgaaaaagcagcagtatgcttacaggtttgcttagtttggggacaccgttaccaccagaatggctgctctgacaatatgcctagggactttctcatggcttttatttaataaggaggctgggcaccctataaagcctcatgcattcacacctttgcagcatggtttatgcctcagtgttatgtgcactggaatgttttccacttcacatttccaagtagaaatattagtgttacggaagtgcctaatatcccagtccaaattttttttttttttttttttttttttttgagacagagtcttgctctgtcacccaggctggagtgcagtggtgcgatcgctcactgcaacctcagcctcctggatttaagtgattctcctgcctcagcctcccaagtagctgggattacaggtgtgcaccaccatgcccggctaattttttgtatttttagtggagacagggtttcaccatgttggccaggctggtctcgaactcctgacctcgtgatccgcctgcctcagcctcccaaagtgctgggattacaggtgtgagccaccacgcctggccccagtccaaaatatttaaagattgtttccttagtgtcttgaagttttgcacaaaattcttttttttgagatggagtctcactctgtcacccaggctggagtgcagtggcgtgatcttggctcactgcaacctctgcctcctgggttcaagcaattctcccacctcagcctcccaagtagctgggattacagacgtgtgccaccatacctgggtaatttttgcatttttagtggagagggagtttcaccatgttggccaggttggtcttgaactcctgacctcaggtgatcctcctgcctcggcctcccaaagtgctgggattacaggcatgagccaccgtgctcagccgcaaaattctttatgaattttacacttggcaaatgttaatgacggaagccatagtctgctcctaatacatgtccaaagcattgactgttgtgtcattagctgcctggttacattagctccctggcttcttgtttagaccactgctaatcccttaaaaacaagaggtctggcactagtagcacaacctaaggtggcattacagatctttgagcgagccacagcaacttttctgccaagtcagcttagtttagacttcagtgaatcaggctattgctatcctaatgtatgtctctatgagtgtatttagccacacatctgcccttggttgactttctgactcattgcttgcttgcttgtttccttgctttggaaaactattgaagattgctaaaaaataccactgcaaagtgatggaaaagggtggagaacaggggagtagccaggctggatggctcaaatataaatgaatgaggaattctttatgaagtatcagtcagattttatgattaagtgatgtaatataggaattatgtaaaagggaagaatgtctgatactgatctattagagaggtactttagaggcttcttgattggcataaagttcctaaggttatagattttccccccttttggctgtatagcaaagtgttttaatccacggttgtgccttattgttccattaaaattgtatcttcgatccatcaataaatacttgtggttgaaacaaaa

SEQ ID NO: 307344 - DNA, 2846 bp, Homo sapiens
gaattccgggcaaagctctttcaccagatgtagactgtagccctgctgccttccctccagcgagtctgccagcatgcttcttcatcctttttatatgttctttgcttccttccctccctccttccctcctgtcgccgtctcttctggcgccgctgctcccggaggagctcccggcacggcgatgggttctcgggcctccacgttactgcgggacgaagagctcgaggagatcaagaaggagaccggcttttcccacagtcaaatcactcgcctctacagccggttcaccagcctggacaaaggagagaatgggactctcagccgggaagatttccagaggattccagaacttgccatcaacccactgggggaccggatcatcaatgccttctttccagagggagaggaccaggtaaacttccgtggattcatgcgaactttggctcatttccgccccattgaggataatgaaaagagcaaagatgtgaatggacccgaaccactcaacagccgaagcaacaaactgcactttgcttttcgactatatgatttggataaagatgaaaagatctcccgtgatgagctgttacaggtgctacgcatgatggtcggagtaaatatctcagatgagcagctgggcagcatcgcagacaggaccattcaggaggctgatcaggatggggacagtgccatatctttcacagaatttgttaaggttttggagaaggtggatgtagaacagaaaatgagcatccgatttcttcactaaaggagaccaaactgttccttgcggtctagtatttaagaactggaacttgaaagtcctccttctaccaactccacctccaccccctcattccccttctcccaaagtactactgctgttgcatgacaaccccaaatatgttctgtcaacacaaacctgcctttggtgtataaacagggcattacagaatggtacaccctatatatttctgttcagtatccattcactagttcttcatttataaatatcatcttccccattctgctgctgaatgccacacatccatccagtctgagaaagtgagagaggcaatcatgccaagaacaagccagcaaagctctttcaccagatgtagactgtagccctgctgccttccctccagcgagtctgccagcatgcttcttcatcctttttatatgttctttgcttcctacttccctgtcttccaacatactgttcacttactctggcagtctttctgcttttcattaagcctcaaaatctcctctgttctacttggcaccacaagctatgtcctatatatgtatttctgacttggcaggatagttcaggggtctggcagtttttatttaccttcattattaaatgggcctctgggatgttgcctcttcaggagctttttggtaatcaatacttctctcagaagtatgagaccatcctctgcactctgctctgtcatcaaaggctgctgggtggagataccctttttgaaaggtggccttggtgagaggtatggagccaagtcttctaggttgcttgcccacatcactctatctctggcctctgattctcaactttgtacctgtgtggctcctcttgttagtgcaatgttgactgttgaaaaagcagcagtatgcttacaggtttgcttagtttggggacaccgttaccaccagaatggctgctctgacaatatgcctagggactttctcatggcttttatttaataaggaggctgggcaccctataaagcctcatgcattcacacctttgcagcatggtttatgcctcagcctcccaagtagctgggattacaggtgtgcaccaccatgcccggctaattttttgtatttttagtggagacagggtttcaccatgttggccaggctggtctctgcctcctgggttcaagcaattctcccacctcagcctcccaagtagctgggattacagacgtgtgccaccatacctgggtaatttttgcatttttagtggagagggagtttcaccatgttggccaggttggtcttgaactcctgacctcaggtgatcctcctgcctcggcctcccaaagtgctgggattacaggcatgagccaccgtgctcagccgcaaaattctttatgaattttacacttggcaaatgttaatgacggaagccatagtctgctcctaatacatgtccaaagcattgactgttgtgtcattagctgcctggttacattagctccctggcttcttgtttagaccactgctaatcccttaaaaacaagaggtctggcactagtagcacaacctaaggtggcattacagatctttgagcgagccacagcaacttttctgccaagtcagcttagtttagacttcagtgaatcaggctattgctatcctaatgtatgtctctatgagtgtatttagccacacatctgcccttggttgactttctgactcattgcttgcttgcttgtttccttgctttggaaaactattgaagattgctaaaaaataccactgcaaagtgatggaaaagggtggagaacaggggagtagccaggctggatggctcaaatataaatgaatgaggaattctttatgaagtatcagtcagattttatgattaagtgatgtaatataggaattatgtaaaagggaagaatgtctgatactgatctattagagaggtactttagaggcttcttgattggcataaagttcctaaggttatagattttccccccttttggctgtatagcaaagtgttttaatccacggttgtgccttattgttccattaaaattgtatcttcgatccatcaataaatacttgtggttgaaacaaaa

SEQ ID NO: 307345 - DNA, 4109 bp, Homo sapiens
ggcagagggcggcagccatcaggtaagccaagatgggtgcatacaagtacatccaggagctatggagaaagaagcagtctgatgtcatgcgctttcttctgagggtccgctgctggcagtaccgccagctctctgctctccacagggctccccgccccacccggcctgataaagcgcgccgactgggctacaaggccaagcaaggttacgttatatataggattcgtgttcgccgtggtggccgaaaacgcccagttcctaagggtgcaacttacggcaagcctgtccatcatggtgttaaccagctaaagtttgctcgaagccttcagtccgttgcagaggagcgagctggacgccactgtggggctctgagagtcctgaattcttactgggttggtgaagattccacatacaaattttttgaggttatcctcattgatccattccataaagctatcagaagaaatcctgacacccagtggatcaccaaaccagtccacaagcacagggagatgcgtgggctgacatctgcaggccgaaagagccgtggccttggaaagggccacaagttccaccacactattggtggctctcgccgggcagcttggagaaggcgcaatactctccagctccaccgttaccgctaatataagtaaagtttgtaaaattcatacttaataaacaatttaggacagtcaaaaaaaaaaaaaaaaaactcgagactagttctctctctctcctcgaacgctgacgttggctcctgagccgggcgctgcctcgcgcctgattggcgggtcctcggggccgccctccccagcgcaccacccctgggttccctcccgggtccgcagtggaaacactgccctctcccttcttgacccctagcccttccttccctccctccttccctcctgtcgccgtctcttctggcgccgctgctcccggaggagctcccggcacggcgatgggttctcgggcctccacgttactgcgggacgaagagctcgaggagatcaagaaggagaccggcttttcccacagtcaaatcactcgcctctacagccggttcaccagcctggacaaaggagagaatgggactctcagccgggaagatttccagaggattccagaacttgccatcaacccactgggggaccggatcatcaatgccttctttccagagggcagagtgatcctaggtgtataacattccgttgtgattcgatgctggaactttgcgctcaatttcctgcctccatgggaggtataactgaaagaagagcataggagagtgtgcatagtggagcccgaagccagccgtctagagcatgcctgaatgcaacagaacgtgcaacttgtgcttttgccgactatatgagtttggactatacacgatgatagaagatcttcccgtgtatgatgcatgttacgaggtgctacgcatgatggtcggagtaaatatctcagatgagcagctgggcagcatcgcagacaggaccattcaggaggctgatcaggatggggacagtgccatatctttcacagaatttgttaaggttttggagaaggtggatgtagaacagaaaatgagcatccgatttcttcactaaaggagaccaaactgttccttgcggtctagtatttaagaactggaacttgaaagtcctccttctaccaactccacctccaccccctcattccccttctcccaaagtactactgctgttgcatgacaaccccaaatatgttctgtcaacacaaacctgcctttggtgtataaacagggcattacagaatggtacaccctatatatttctgttcagtatccattcactagttcttcatttataaatatcatcttccccattctgctgctgaatgccacacatccatccagtctgagaaagtgagagaggcaatcatgccaagaacaagccagcaaagctctttcaccagatgtagactgtagccctgctgccttccctccagcgagtctgccagcatgcttcttcatcctttttatatgttctttgcttcctacttccctgtcttccaacatactgttcacttactctggcagtctttctgcttttcattaagcctcaaaatctcctctgttctacttggcaccacaagctatgtcctatatatgtatttctgacttggcaggatagttcaggggtctggcagtttttatttaccttcattattaaatgggcctctgggatgttgcctcttcaggagctttttggtaatcaatacttctctcagaagtatgagaccatcctctgcactctgctctgtcatcaaaggctgctgggtggagataccctttttgaaaggtggccttggtgagaggtatggagccaagtcttctaggttgcttgcccacatcactctatctctggcctctgattctcaactttgtacctgtgtggctcctcttgttagtgcaatgttgactgttgaaaaagcagcagtatgcttacaggtttgcttagtttggggacaccgttaccaccagaatggctgctctgacaatatgcctagggactttctcatggcttttatttaataaggaggctgggcaccctataaagcctcatgcattcacacctttgcagcatggtttatgcctcagtgttatgtgcactggaatgttttccacttcacatttccaagtagaaatattagtgttacggaagtgcctaatatcccagtccaaattttttttttttttttttttttttttttgagacagagtcttgctctgtcacccaggctggagtgcagtggtgcgatcgctcactgcaacctcagcctcctggatttaagtgattctcctgcctcagcctcccaagtagctgggattacaggtgtgcaccaccatgcccggctaattttttgtatttttagtggagacagggtttcaccatgttggccaggctggtctcgaactcctgacctcgtgatccgcctgcctcagcctcccaaagtgctgggattacaggtgtgagccaccacgcctggccccagtccaaaatatttaaagattgtttccttagtgtcttgaagttttgcacaaaattcttttttttgagatggagtctcactctgtcacccaggctggagtgcagtggcgtgatcttggctcactgcaacctctgcctcctgggttcaagcaattctcccacctcagcctcccaagtagctgggattacagacgtgtgccaccatacctgggtaatttttgcatttttagtggagagggagtttcaccatgttggccaggttggtcttgaactcctgacctcaggtgatcctcctgcctcggcctcccaaagtgctgggattacaggcatgagccaccgtgctcagccgcaaaattctttatgaattttacacttggcaaatgttaatgacggaagccatagtctgctcctaatacatgtccaaagcattgactgttgtgtcattagctgcctggttacattagctccctggcttcttgtttagaccactgctaatcccttaaaaacaagaggtctggcactagtagcacaacctaaggtggcattacagatctttgagcgagccacagcaacttttctgccaagtcagcttagtttagacttcagtgaatcaggctattgctatcctaatgtatgtctctatgagtgtatttagccacacatctgcccttggttgactttctgactcattgcttgcttgcttgtttccttgctttggaaaactattgaagattgctaaaaaataccactgcaaagtgatggaaaagggtggagaacaggggagtagccaggctggatggctcaaatataaatgaatgaggaattctttatgaagtatcagtcagattttatgattaagtgatgtaatataggaattatgtaaaagggaagaatgtctgatactgatctattagagaggtactttagaggcttcttgattggcataaagttcctaaggttatagattttccccccttttggctgtatagcaaagtgttttaatccacggttgtgccttattgttccattaaaattgtatcttcgatccatcaataaatacttgtggttgaaacaaaa

SEQ ID NO: 307346 - DNA, 2884 bp, Homo sapiens
aaatggagaccatcctggctaaacagtggaaccccgtctgtagtaaaaataccaaaaaattagccggccggagtggcaagcacctgtagtcccagctacttgggaggctgaggcagaagaatggcttgaacccaggaggccaaggttgcagtgagccgagaccacaccactgcactccagcctggcaaaagagtgagactctgcctccaaaaaaaaaaaaaagttacgttttactgcacaggaggaaggggggaaaacattactcagataagagcttgggagtgttgtaatcttcataacctttgtaactgttactggttttctcccccaggttttggagaaggtggatgtagaacagaaaatgagcatccgatttcttcactaaaggagaccaaactgttccttgcggtctagtatttaagaactggaacttgaaagtcctccttctaccaactccacctccaccccctcattccccttctcccaaagtactactgctgttgcatgacaaccccaaatatgttctgtcaacacaaacctgcctttggtgtataaacagggcattacagaatggtacaccctatatatttctgttcagtatccattcactagttcttcatttataaatatcatcttccccattctgctgctgaatgccacacatccatccagtctgagaaagtgagagaggcaatcatgccaagaacaagccagcaaagctctttcaccagatgtagactgtagccctgctgccttccctccagcgagtctgccagcatgcttcttcatcctttttatatgttctttgcttcctacttccctgtcttccaacatactgttcacttactctggcagtctttctgcttttcattaagcctcaaaatctcctctgttctacttggcaccacaagctatgtcctatatatgtatttctgacttggcaggatagttcaggggtctggcagtttttatttaccttcattattaaatgggcctctgggatgttgcctcttcaggagctttttggtaatcaatacttctctcagaagtatgagaccatcctctgcactctgctctgtcatcaaaggctgctgggtggagataccctttttgaaaggtggccttggtgagaggtatggagccaagtcttctaggttgcttgcccacatcactctatctctggcctctgattctcaactttgtacctgtgtggctcctcttgttagtgcaatgttgactgttgaaaaagcagcagtatgcttacaggtttgcttagtttggggacaccgttaccaccagaatggctgctctgacaatatgcctagggactttctcatggcttttatttaataaggaggctgggcaccctataaagcctcatgcattcacacctttgcagcatggtttatgcctcagtgttatgtgcactggaatgttttccacttcacatttccaagtagaaatattagtgttacggaagtgcctaatatcccagtccaaattttttttttttttttttttttttttttgagacagagtcttgctctgtcacccaggctggagtgcagtggtgcgatcgctcactgcaacctcagcctcctggatttaagtgattctcctgcctcagcctcccaagtagctgggattacaggtgtgcaccaccatgcccggctaattttttgtatttttagtggagacagggtttcaccatgttggccaggctggtctcgaactcctgacctcgtgatccgcctgcctcagcctcccaaagtgctgggattacaggtgtgagccaccacgcctggccccagtccaaaatatttaaagattgtttccttagtgtcttgaagttttgcacaaaattcttttttttgagatggagtctcactctgtcacccaggctggagtgcagtggcgtgatcttggctcactgcaacctctgcctcctgggttcaagcaattctcccacctcagcctcccaagtagctgggattacagacgtgtgccaccatacctgggtaatttttgcatttttagtggagagggagtttcaccatgttggccaggttggtcttgaactcctgacctcaggtgatcctcctgcctcggcctcccaaagtgctgggattacaggcatgagccaccgtgctcagccgcaaaattctttatgaattttacacttggcaaatgttaatgacggaagccatagtctgctcctaatacatgtccaaagcattgactgttgtgtcattagctgcctggttacattagctccctggcttcttgtttagaccactgctaatcccttaaaaacaagaggtctggcactagtagcacaacctaaggtggcattacagatctttgagcgagccacagcaacttttctgccaagtcagcttagtttagacttcagtgaatcaggctattgctatcctaatgtatgtctctatgagtgtatttagccacacatctgcccttggttgactttctgactcattgcttgcttgcttgtttccttgctttggaaaactattgaagattgctaaaaaataccactgcaaagtgatggaaaagggtggagaacaggggagtagccaggctggatggctcaaatataaatgaatgaggaattctttatgaagtatcagtcagattttatgattaagtgatgtaatataggaattatgtaaaagggaagaatgtctgatactgatctattagagaggtactttagaggcttcttgattggcataaagttcctaaggttatagattttccccccttttggctgtatagcaaagtgttttaatccacggttgtgccttattgttccattaaaattgtatcttcgatccatcaataaatacttgtggttgaaacaaaa

SEQ ID NO: 307347 - DNA, 3479 bp, Homo sapiens
gaattccgggcaaagctctttcaccagatgtagactgtagccctgctgccttccctccagcgagtctgccagcatgcttcttcatcctttttatatgttctttgcttccttccctccctccttccctcctgtcgccgtctcttctggcgccgctgctcccggaggagctcccggcacggcgatgggttctcgggcctccacgttactgcgggacgaagagctcgaggagatcaagaaggagaccggcttttcccacagtcaaatcactcgcctctacagccggttcaccagcctggacaaaggagagaatgggactctcagccgggaagatttccagaggattccagaacttgccatcaacccactgggggaccggatcatcaatgccttctttccagagggagaggaccaggtaaacttccgtggattcatgcgaactttggctcatttccgccccattgaggataatgaaaagagcaaagatgtgaatggacccgaaccactcaacagccgaagcaacaaactgcactttgcttttcgactatatgatttggataaagatgaaaagatctcccgtgatgagctgttacaggtgctacgcatgatggtcggagtaaatatctcagatgagcagctgggcagcatcgcagacaggaccattcaggaggctgatcaggatggggacagtgccatatctttcacagaatttgttaaggttttggagaaggtggatgtagaacagaaaatgagcatccgatttcttcactaaaggagaccaaactgttccttgcggtctagtatttaagaactggaacttgaaagtcctccttctaccaactccacctccaccccctcattccccttctcccaaagtactactgctgttgcatgacaaccccaaatatgttctgtcaacacaaacctgcctttggtgtataaacagggcattacagaatggtacaccctatatatttctgttcagtatccattcactagttcttcatttataaatatcatcttccccattctgctgctgaatgccacacatccatccagtctgagaaagtgagagaggcaatcatgccaagaacaagccagcaaagctctttcaccagatgtagactgtagccctgctgccttccctccagcgagtctgccagcatgcttcttcatcctttttatatgttctttgcttcctacttccctgtcttccaacatactgttcacttactctggcagtctttctgcttttcattaagcctcaaaatctcctctgttctacttggcaccacaagctatgtcctatatatgtatttctgacttggcaggatagttcaggggtctggcagtttttatttaccttcattattaaatgggcctctgggatgttgcctcttcaggagctttttggtaatcaatacttctctcagaagtatgagaccatcctctgcactctgctctgtcatcaaaggctgctgggtggagataccctttttgaaaggtggccttggtgagaggtatggagccaagtcttctaggttgcttgcccacatcactctatctctggcctctgattctcaactttgtacctgtgtggctcctcttgttagtgcaatgttgactgttgaaaaagcagcagtatgcttacaggtttgcttagtttggggacaccgttaccaccagaatggctgctctgacaatatgcctagggactttctcatggcttttatttaataaggaggctgggcaccctataaagcctcatgcattcacacctttgcagcatggtttatgcctcagtgttatgtgcactggaatgttttccacttcacatttccaagtagaaatattagtgttacggaagtgcctaatatcccagtccaaattttttttttttttttttttttttttttgagacagagtcttgctctgtcacccaggctggagtgcagtggtgcgatcgctcactgcaacctcagcctcctggatttaagtgattctcctgcctcagcctcccaagtagctgggattacaggtgtgcaccaccatgcccggctaattttttgtatttttagtggagacagggtttcaccatgttggccaggctggtctcgaactcctgacctcgtgatccgcctgcctcagcctcccaaagtgctgggattacaggtgtgagccaccacgcctggccccagtccaaaatatttaaagattgtttccttagtgtcttgaagttttgcacaaaattcttttttttgagatggagtctcactctgtcacccaggctggagtgcagtggcgtgatcttggctcactgcaacctctgcctcctgggttcaagcaattctcccacctcagcctcccaagtagctgggattacagacgtgtgccaccatacctgggtaatttttgcatttttagtggagagggagtttcaccatgttggccaggttggtcttgaactcctgacctcaggtgatcctcctgcctcggcctcccaaagtgctgggattacaggcatgagccaccgtgctcagccgcaaaattctttatgaattttacacttggcaaatgttaatgacggaagccatagtctgctcctaatacatgtccaaagcattgactgttgtgtcattagctgcctggttacattagctccctggcttcttgtttagaccactgctaatcccttaaaaacaagaggtctggcactagtagcacaacctaaggtggcattacagatctttgagcgagccacagcaacttttctgccaagtcagcttagtttagacttcagtgaatcaggctattgctatcctaatgtatgtctctatgagtgtatttagccacacatctgcccttggttgactttctgactcattgcttgcttgcttgtttccttgctttggaaaactattgaagattgctaaaaaataccactgcaaagtgatggaaaagggtggagaacaggggagtagccaggctggatggctcaaatataaatgaatgaggaattctttatgaagtatcagtcagattttatgattaagtgatgtaatataggaattatgtaaaagggaagaatgtctgatactgatctattagagaggtactttagaggcttcttgattggcataaagttcctaaggttatagattttccccccttttggctgtatagcaaagtgttttaatccacggttgtgccttattgttccattaaaattgtatcttcgatccatcaataaatacttgtggttgaaacaaaaaaaaaaaaacaaacaaaaacaagagggggggtaaaaaaatcccagggggacaagtaaaggacgaaccgagtttgtgaaaagggcgccaaaaggagggattaaaagacgagggcgctttaaagtgagggaacgttggggtttgaaagaacttcttggtggcattggacacccgataagcgggaaaatagttggaacgctgggagttgttaag

SEQ ID NO: 307348 - DNA, 3576 bp, Homo sapiens
  misc_feature (3270)..(3270): n is a, c, g, or t
gaattccgggcaaagctctttcaccagatgtagactgtagccctgctgccttccctccagcgagtctgccagcatgcttcttcatcctttttatatgttctttgcttccttccctccctccttccctcctgtcgccgtctcttctggcgccgctgctcccggaggagctcccggcacggcgatgggttctcgggcctccacgttactgcgggacgaagagctcgaggagatcaagaaggagaccggcttttcccacagtcaaatcactcgcctctacagccggttcaccagcctggacaaaggagagaatgggactctcagccgggaagatttccagaggattccagaacttgccatcaacccactgggggaccggatcatcaatgccttctttccagagggagaggaccaggtaaacttccgtggattcatgcgaactttggctcatttccgccccattgaggataatgaaaagagcaaagatgtgaatggacccgaaccactcaacagccgaagcaacaaactgcactttgcttttcgactatatgatttggataaagatgaaaagatctcccgtgatgagctgttacaggtgctacgcatgatggtcggagtaaatatctcagatgagcagctgggcagcatcgcagacaggaccattcaggaggctgatcaggatggggacagtgccatatctttcacagaatttgttaaggttttggagaaggtggatgtagaacagaaaatgagcatccgatttcttcactaaaggagaccaaactgttccttgcggtctagtatttaagaactggaacttgaaagtcctccttctaccaactccacctccaccccctcattccccttctcccaaagtactactgctgttgcatgacaaccccaaatatgttctgtcaacacaaacctgcctttggtgtataaacagggcattacagaatggtacaccctatatatttctgttcagtatccattcactagttcttcatttataaatatcatcttccccattctgctgctgaatgccacacatccatccagtctgagaaagtgagagaggcaatcatgccaagaacaagccagcaaagctctttcaccagatgtagactgtagccctgctgccttccctccagcgagtctgccagcatgcttcttcatcctttttatatgttctttgcttcctacttccctgtcttccaacatactgttcacttactctggcagtctttctgcttttcattaagcctcaaaatctcctctgttctacttggcaccacaagctatgtcctatatatgtatttctgacttggcaggatagttcaggggtctggcagtttttatttaccttcattattaaatgggcctctgggatgttgcctcttcaggagctttttggtaatcaatacttctctcagaagtatgagaccatcctctgcactctgctctgtcatcaaaggctgctgggtggagataccctttttgaaaggtggccttggtgagaggtatggagccaagtcttctaggttgcttgcccacatcactctatctctggcctctgattctcaactttgtacctgtgtggctcctcttgttagtgcaatgttgactgttgaaaaagcagcagtatgcttacaggtttgcttagtttggggacaccgttaccaccagaatggctgctctgacaatatgcctagggactttctcatggcttttatttaataaggaggctgggcaccctataaagcctcatgcattcacacctttgcagcatggtttatgcctcagtgttatgtgcactggaatgttttccacttcacatttccaagtagaaatattagtgttacggaagtgcctaatatcccagtccaaattttttttttttttttttttttttttttgagacagagtcttgctctgtcacccaggctggagtgcagtggtgcgatcgctcactgcaacctcagcctcctggatttaagtgattctcctgcctcagcctcccaagtagctgggattacaggtgtgcaccaccatgcccggctaattttttgtatttttagtggagacagggtttcaccatgttggccaggctggtctcgaactcctgacctcgtgatccgcctgcctcagcctcccaaagtgctgggattacaggtgtgagccaccacgcctggccccagtccaaaatatttaaagattgtttccttagtgtcttgaagttttgcacaaaattcttttttttgagatggagtctcactctgtcacccaggctggagtgcagtggcgtgatcttggctcactgcaacctctgcctcctgggttcaagcaattctcccacctcagcctcccaagtagctgggattacagacgtgtgccaccatacctgggtaatttttgcatttttagtggagagggagtttcaccatgttggccaggttggtcttgaactcctgacctcaggtgatcctcctgcctcggcctcccaaagtgctgggattacaggcatgagccaccgtgctcagccgcaaaattctttatgaattttacacttggcaaatgttaatgacggaagccatagtctgctcctaatacatgtccaaagcattgactgttgtgtcattagctgcctggttacattagctccctggcttcttgtttagaccactgctaatcccttaaaaacaagaggtctggcactagtagcacaacctaaggtggcattacagatctttgagcgagccacagcaacttttctgccaagtcagcttagtttagacttcagtgaatcaggctattgctatcctaatgtatgtctctatgagtgtatttagccacacatctgcccttggttgactttctgactcattgcttgcttgcttgtttccttgctttggaaaactattgaagattgctaaaaaataccactgcaaagtgatggaaaagggtggagaacaggggagtagccaggctggatggctcaaatataaatgaatgaggaattctttatgaagtatcagtcagattttatgattaagtgatgtaatataggaattatgtaaaagggaagaatgtctgatactgatctattagagaggtactttagaggcttcttgattggcataaagttcctaaggttatagattttccccccttttggctgtatagcaaagtgttttaatccacggttgtgccttattgttccattaaaattgtatcttcgatccatcaataaatacttgtggttgaaacaaaaanaaaaaaaaaaaaaaaaaaaaaaaaaaaaaaaaaaaaaaaaaaaaaaaaaaaagggggggggggcgccccaatcccctccggagggggagcaacaatatatcataccagatacaaccgagtgtgtggtagaaaacaagggggcgccccacaaggaggggaggctcaataaacaacagacagagagacagaggcacgtattataacaacgacgttgggtgggcggagaaaacagtcgctacggcgcgaaactccttcgggaagagaaaccccacatcaggcggggggaacaaacgcggagaacatatg

SEQ ID NO: 307349 - DNA, 3244 bp, Homo sapiens
gaattccgggcaaagctctttcaccagatgtagactgtagccctgctgccttccctccagcgagtctgccagcatgcttcttcatcctttttatatgttctttgcttccttccctccctccttccctcctgtcgccgtctcttctggcgccgctgctcccggaggagctcccggcacggcgatgggttctcgggcctccacgttactgcgggacgaagagctcgaggagatcaagaaggagaccggcttttcccacagtcaaatcactcgcctctacagccggttcaccagcctggacaaaggagagaatgggactctcagccgggaagatttccagaggattccagaacttgccatcaacccactgggggaccggatcatcaatgccttctttccagagggagaggaccaggtaaacttccgtggattcatgcgaactttggctcatttccgccccattgaggataatgaaaagagcaaagatgtgaatggacccgaaccactcaacagccgaagcaacaaactgcactttgcttttcgactatatgatttggataaagatgaaaagatctcccgtgatgagctgttacaggtgctacgcatgatggtcggagtaaatatctcagatgagcagctgggcagcatcgcagacaggaccattcaggaggctgatcaggatggggacagtgccatatctttcacagaatttgttaaggttttggagaaggtggatgtagaacagaaaatgagcatccgatttcttcactaaaggagaccaaactgttccttgcggtctagtatttaagaactggaacttgaaagtcctccttctaccaactccacctccaccccctcattccccttctcccaaagtactactgctgttgcatgacaaccccaaatatgttctgtcaacacaaacctgcctttggtgtataaacagggcattacagaatggtacaccctatatatttctgttcagtatccattcactagttcttcatttataaatatcatcttccccattctgctgctgaatgccacacatccatccagtctgagaaagtgagagaggcaatcatgccaagaacaagccagcaaagctctttcaccagatgtagactgtagccctgctgccttccctccagcgagtctgccagcatgcttcttcatcctttttatatgttctttgcttcctacttccctgtcttccaacatactgttcacttactctggcagtctttctgcttttcattaagcctcaaaatctcctctgttctacttggcaccacaagctatgtcctatatatgtatttctgacttggcaggatagttcaggggtctggcagtttttatttaccttcattattaaatgggcctctgggatgttgcctcttcaggagctttttggtaatcaatacttctctcagaagtatgagaccatcctctgcactctgctctgtcatcaaaggctgctgggtggagataccctttttgaaaggtggccttggtgagaggtatggagccaagtcttctaggttgcttgcccacatcactctatctctggcctctgattctcaactttgtacctgtgtggctcctcttgttagtgcaatgttgactgttgaaaaagcagcagtatgcttacaggtttgcttagtttggggacaccgttaccaccagaatggctgctctgacaatatgcctagggactttctcatggcttttatttaataaggaggctgggcaccctataaagcctcatgcattcacacctttgcagcatggtttatgcctcagtgttatgtgcactggaatgttttccacttcacatttccaagtagaaatattagtgttacggaagtgcctaatatcccagtccaaattttttttttttttttttttttttttttgagacagagtcttgctctgtcacccaggctggagtgcagtggtgcgatcgctcactgcaacctcagcctcctggatttaagtgattctcctgcctcagcctcccaagtagctgggattacaggtgtgcaccaccatgcccggctaattttttgtatttttagtggagacagggtttcaccatgttggccaggctggtctcgaactcctgacctcgtgatccgcctgcctcagcctcccaaagtgctgggattacaggtgtgagccaccacgcctggccccagtccaaaatatttaaagattgtttccttagtgtcttgaagttttgcacaaaattcttttttttgagatggagtctcactctgtcacccaggctggagtgcagtggcgtgatcttggctcactgcaacctctgcctcctgggttcaagcaattctcccacctcagcctcccaagtagctgggattacagacgtgtgccaccatacctgggtaatttttgcatttttagtggagagggagtttcaccatgttggccaggttggtcttgaactcctgacctcaggtgatcctcctgcctcggcctcccaaagtgctgggattacaggcatgagccaccgtgctcagccgcaaaattctttatgaattttacacttggcaaatgttaatgacggaagccatagtctgctcctaatacatgtccaaagcattgactgttgtgtcattagctgcctggttacattagctccctggcttcttgtttagaccactgctaatcccttaaaaacaagaggtctggcactagtagcacaacctaaggtggcattacagatctttgagcgagccacagcaacttttctgccaagtcagcttagtttagacttcagtgaatcaggctattgctatcctaatgtatgtctctatgagtgtatttagccacacatctgcccttggttgactttctgactcattgcttgcttgcttgtttccttgctttggaaaactattgaagattgctaaaaaataccactgcaaagtgatggaaaagggtggagaacaggggagtagccaggctggatggctcaaatataaatgaatgaggaattctttatgaagtatcagtcagattttatgatttaaaagggaagaatgtctgatactgatctattagagaggtactttagaggcttcttgattggcataaagttcctaaggttatagattttccccccttttggctgtatagcaaagtgttttaatccacggttgtgccttattgttccattaaaattgtatcttcgatccatcaataaatacttgtggttgaaacaaaa

SEQ ID NO: 307350 - DNA, 1481 bp, Homo sapiens
gaattccgggcaaagctctttcaccagatgtagactgtagccctgctgccttccctccagcgagtctgccagcatgcttcttcatcctttttatatgttctttgcttccttccctccctccttccctcctgtcgccgtctcttctggcgccgctgctcccggaggagctcccggcacggcgatgggttctcgggcctccacgttactgcgggacgaagagctcgaggagatcaagaaggagaccggcttttcccacagtcaaatcactcgcctctacagccggttcaccagcctggacaaaggagagaatgggactctcagccgggaagatttccagaggattccagaacttgccatcaacccactgggggaccggatcatcaatgccttctttccagagggagaggaccaggtaaacttccgtggattcatgcgaactttggctcatttccgccccattgaggataatgaaaagagcaaagatgtgaatggacccgaaccactcaacagccgaagcaacaaactgcactttgcttttcgactatatgatttggataaagatgaaaagatctcccgtgatgagctgttacaggtgctacgcatgatggtcggagtaaatatctcagatgagcagctgggcagcatcgcagacaggaccattcaggaggctgatcaggatggggacagtgccatatctttcacagaatttgttaaggttttggagaaggtggatgtagaacagaaaatgagcatccgatttcttcactaaaggagaccaaactgttccttgcggtctagtatttaagaactggaacttgaaagtcctccttctaccaactccacctccaccccctcattccccttctcccaaagtactactgctgttgcatgacaaccccaaatatgttctgtcaacacaaacctgcctttggtgtataaacagggcattacagaatggtacaccctatatatttctgttcagtatccattcactagttcttcatttataaatatcatcttccccattctgctgctgaatgccacacatccatccagtctgagaaagtgagagaggcaatcatgccaagaacaagccagcaaagctctttcaccagatgtagactgtagccctgctgccttccctccagcgagtcttccaacatactgttcacttactctggcagtctttctgcttttcattaagctcaaatataaatgaatgaggaattctttatgaagtatcagtcagattttatgattaagtgatgtaatataggaattatgtaaaagggaagaatgtctgatactgatctattagagaggtactttagaggcttcttgattggcataaagttcctaaggttatagattttccccccttttggctgtatagcaaagtgttttaatccacggttgtgccttattgttccattaaaattgtatcttcgatccatcaataaatacttgtggttgaaacaaaa

SEQ ID NO: 307351 - DNA, 1644 bp, Homo sapiens
ggcagagggcggcagccatcaggtaagccaagatgggtgcatacaagtacatccaggagctatggagaaagaagcagtctgatgtcatgcgctttcttctgagggtccgctgctggcagtaccgccagctctctgctctccacagggctccccgccccacccggcctgataaagcgcgccgactgggctacaaggccaagcaaggttacgttatatataggattcgtgttcgccgtggtggccgaaaacgcccagttcctaagggtgcaacttacggcaagcctgtccatcatggtgttaaccagctaaagtttgctcgaagccttcagtccgttgcagaggagcgagctggacgccactgtggggctctgagagtcctgaattcttactgggttggtgaagattccacatacaaattttttgaggttatcctcattgatccattccataaagctatcagaagaaatcctgacacccagtggatcaccaaaccagtccacaagcacagggagatgcgtgggctgacatctgcaggccgaaagagccgtggccttggaaagggccacaagttccaccacactattggtggctctcgccgggcagcttggagaaggcgcaatactctccagctccaccgttaccgctaatataagtaaagtttgtaaaattcatacttaataaacaatttaggacagtcaaaaaaaaaaaaaaaaaactcgagactagttctctctctctcctcgaacgctgacgttggctcctgagccgggcgctgcctcgcgcctgattggcgggtcctcggggccgccctccccagcgcaccacccctgggttccctcccgggtccgcagtggaaacactgccctctcccttcttgacccctagcccttccttccctccctccttccctcctgtcgccgtctcttctggcgccgctgctcccggaggagctcccggcacggcgatgggttctcgggcctccacgttactgcgggacgaagagctcgaggagatcaagaaggagaccggcttttcccacagtcaaatcactcgcctctacagccggttcaccagcctggacaaaggagagaatgggactctcagccgggaagatttccagaggattccagaacttgccatcaacccactgggggaccggatcatcaatgccttctttccagagggagaggaccaggtaaacttccgtggattcatgcgaactttggctcatttccgccccattgaggataatgaaaagagcaaagatgtgaatggacccgaaccactcaacagccgaagcaacaaactgcactttgcttttcgactatatgatttggataaagatgaaaagatctcccgtgatgagctgttacagtagagacggggtttcagcatattggccaggctggtctcgaactcctaacctcaagtgatccacccacctcggcctcccaaagtgctgggagtacaagcacgagccatcatgcctggccccaactgtccattttaaatatgtacagcttattgtatattatttatacttcaataaagatagttactcgggaggctgaggcaggagaatggtgtgaacctaggaggcggagcttgcagtgagccgagatcacgctactgcactccagcctg

SEQ ID NO: 307352 - DNA, 1431 bp, Homo sapiens
ggcagagggcggcagccatcaggtaagccaagatgggtgcatacaagtacatccaggagctatggagaaagaagcagtctgatgtcatgcgctttcttctgagggtccgctgctggcagtaccgccagctctctgctctccacagggctccccgccccacccggcctgataaagcgcgccgactgggctacaaggccaagcaaggttacgttatatataggattcgtgttcgccgtggtggccgaaaacgcccagttcctaagggtgcaacttacggcaagcctgtccatcatggtgttaaccagctaaagtttgctcgaagccttcagtccgttgcagaggagcgagctggacgccactgtggggctctgagagtcctgaattcttactgggttggtgaagattccacatacaaattttttgaggttatcctcattgatccattccataaagctatcagaagaaatcctgacacccagtggatcaccaaaccagtccacaagcacagggagatgcgtgggctgacatctgcaggccgaaagagccgtggccttggaaagggccacaagttccaccacactattggtggctctcgccgggcagcttggagaaggcgcaatactctccagctccaccgttaccgctaatataagtaaagtttgtaaaattcatacttaataaacaatttaggacagtcaaaaaaaaaaaaaaaaaactcgagactagttctctctctctcctcgaacgctgacgttggctcctgagccgggcgctgcctcgcgcctgattggcgggtcctcggggccgccctccccagcgcaccacccctgggttccctcccgggtccgcagtggaaacactgccctctcccttcttgacccctagcccttccttccctccctccttccctcctgtcgccgtctcttctggcgccgctgctcccggaggagctcccggcacggcgatgggttctcgggcctccacgttactgcgggacgaagagctcgaggagatcaagaaggagaccggcttttcccacagtcaaatcactcgcctctacagccggttcaccagcctggacaaaggagagaatgggactctcagccgggaagatttccagaggattccagaacttgccatcaacccactgggggaccggatcatcaatgccttctttccagagggagaggaccaggtcaaaatgcagatcttcgtgaaaacccttaccggcaagaccatcacccttgaggtggagcccagtgacaccatcgaaaatgtgaaggccaagatccaggataaggaaggcattccccccggacagcagaggctcatctttgcaggcaagcagctggaagatggccgtactctttctgactacaacatccagaaggagtcgaccctgcacctggtcctgcgtctgagaggtggatg

SEQ ID NO: 307353 - DNA, 2383 bp, Homo sapiens
agtcggaagtggcaccagcacttccggtacggaaaactcgctgctgccccaacctggcttgacaggcttggtctctgcaagtggctctcagccccttcttctttcctgcctcaccttccaattcgtttgccgccgccgtcccgcagctgctgtttccggagttgccccttccccatgttccggggcaggagtccgcaaagcgaagatccgcccgccggttcctcatcatgtccgaactgactaaagagctgatggagctggtgtggggcaccaagagcagccccggtctctcggacaccattttctgccgctggacgcaagggtttgtgtttagtgaatcagagggatctgcattagaacagtttgaaggtggcccctgtgctgttattgcacctgttcaggcatttcttttgaagaagctcctgttttcttcggagaagtcttcttggcgggattgttcagaggaagagcagaaggaactcctttgtcataccttgtgtgatattttagaaagtgcttgttgtgaccactctggatcatactgcttggtttcatggttaagaggaaagacaactgaggaaactgctagtatttctgggagtcctgcagagtctagttgccaagtggaacattcttctgccttggctgtcgaagagcttggctttgagcgatttcatgcattaattcaaaaaagatcgttcagaagtttaccagaattaaaagatgctgtcttggaccagtattcaatgtggggaaataaatttggagtattgctttttctgtattctgtattactgacaaagggcattgaaaacataaaaaacgaaattgaagatgcaagtgaacccttgatagatcctgtatatggacatggcagccaaagtttaattaatctcctgctgacgggacatgctgtttctaatgtatgggatggtgatagagagtgctcaggaatgaaacttcttggtatacatgaacaagcagcagtaggatttttaacactaatggaagctttaagatactgtaaggttggttcttacttgaaatctccaaaattccctatttggattgttggcagtgagactcacctcaccgtattttttgccaaggatatggctttagttgcccctgaagctccttcagaacaagccagaagagtttttcaaacctacgacccagaagataatggattcatacccgattcacttctggaagatgtgatgaaagcattggaccttgtttcagatcctgaatatataaatctcatgaagaataaattagatccagaaggattaggaatcatattattgggcccatttcttcaagaattttttcctgatcagggctccagtggtccagaatcttttactgtctaccactacaatggattgaagcagtcaaattataatgaaaaggtcatgtacgtagaagggactgcagttgtgatgggttttgaagatcccatgctacagacagatgacactcctattaaacgctgtctgcaaaccaaatggccatacattgagttactctggaccacagatcgctctccttcactaaattaatttgtctaagtatttataaggaagatcttaataacagatgttgaaagaaggagtcaagactggcaattggctggattaagctaaacactggtatcactgattaactgtaaataacaattaaaaacacattttcagtgtttatgatatgtttaaattatttgtcctaaagctttatgttaaagattatcctattttaccccttcgtgtgaaatttactagcaaaattaagctttcatcaaagttcatcacttttgcattcagatacttggtcatttacttaccaaattacaaacgcaatactacagcatttgtatattaagtatcacagttactattgataaactacttttgggttttatttcattgaggcactttttttattgtttgaatgattccggcttgtaatatatcagcctctacaatgaaatgcagaagagttcatttttctaagatctgtttttcattagaaatattgacaaataacacattgtcaacctggatcctttgacaatttacttaactctggcatgttcacaaaaagtagaaactctaagagaccattaccatttattcacagatgtataggggatgtattctaaaaactgacagaaaagagaatctgatagtcaacactgttaacttttactgtgtaattgccaaatacacttttccaaatttgtcccaacagccctgtaagccagctttcttctatatttataaacacgataaatgcatgagaagatctgttattacattagtatattacgttatttattatgatcctagttgatggcctaaataaacacctttttctttaa

SEQ ID NO: 307354 - DNA, 472 bp, Homo sapiens
cccagtcaaaggataaggatttgagaaacatgcattttactttcagttgattagaaattgcctgatataaatataatttaaagtgttaatagtcctttatttataatagggctccagtggtccagaatcttttactgtctaccactacaatggattgaagcagtcaaattataatgaaaaggtcatgtacgtagaagggactgcagttgtgatgggttttgaagatcccatgctacagacagatgacactcctattaaacgctgtctgcaaaccaaatggccatacattgagttactctggaccacagatcgctctccttcactaaattaatttgtctaagtatttataaggaagatcttaataacagatgttgaaagaaggagtcaagactggcaattggctggattaagctaaacactggtatcactgattaactgtaaataacaattaaaaacacattttcagtgttta

SEQ ID NO: 307355 - DNA, 2331 bp, Homo sapiens
agtcggaagtggcaccagcacttccggtacggaaaactcgctgctgccccaacctggcttgacaggcttggtctctgcaagtggctctcagccccttcttctttcctgcctcaccttccaattcgtttgccgccgccgtcccgcagctgctgtttccggagttgccccttccccatgttccggggcaggagtccgcaaagcgaagatccgcccgccggttcctcatcatgtccgaactgactaaagagctgatggagctggtgtggggcaccaagagcagccccggtctctcggacaccattttctgccgctggacgcaagggtttgtgtttagtgaatcagagggatctgcattagaacagtttgaaggtggcccctgtgctgttattgcacctgttcaggcatttcttttgaagaagctcctgttttcttcggagaagtcttcttggcgggattgttcagaggaagagcagaaggaactcctttgtcataccttgtgtgatattttagaaagtgcttgttgtgaccactctggatcatactgcttggtttcatggttaagaggaaagacaactgaggaaactgctagtatttctgggagtcctgcagagtctagttgccaagtggaacattcttaaaaagatcgttcagaagtttaccagaattaaaagatgctgtcttggaccagtattcaatgtggggaaataaatttggagtattgctttttctgtattctgtattactgacaaagggcattgaaaacataaaaaacgaaattgaagatgcaagtgaacccttgatagatcctgtatatggacatggcagccaaagtttaattaatctcctgctgacgggacatgctgtttctaatgtatgggatggtgatagagagtgctcaggaatgaaacttcttggtatacatgaacaagcagcagtaggatttttaacactaatggaagctttaagatactgtaaggttggttcttacttgaaatctccaaaattccctatttggattgttggcagtgagactcacctcaccgtattttttgccaaggatatggctttagttgcccctgaagctccttcagaacaagccagaagagtttttcaaacctacgacccagaagataatggattcatacccgattcacttctggaagatgtgatgaaagcattggaccttgtttcagatcctgaatatataaatctcatgaagaataaattagatccagaaggattaggaatcatattattgggcccatttcttcaagaattttttcctgatcagggctccagtggtccagaatcttttactgtctaccactacaatggattgaagcagtcaaattataatgaaaaggtcatgtacgtagaagggactgcagttgtgatgggttttgaagatcccatgctacagacagatgacactcctattaaacgctgtctgcaaaccaaatggccatacattgagttactctggaccacagatcgctctccttcactaaattaatttgtctaagtatttataaggaagatcttaataacagatgttgaaagaaggagtcaagactggcaattggctggattaagctaaacactggtatcactgattaactgtaaataacaattaaaaacacattttcagtgtttatgatatgtttaaattatttgtcctaaagctttatgttaaagattatcctattttaccccttcgtgtgaaatttactagcaaaattaagctttcatcaaagttcatcacttttgcattcagatacttggtcatttacttaccaaattacaaacgcaatactacagcatttgtatattaagtatcacagttactattgataaactacttttgggttttatttcattgaggcactttttttattgtttgaatgattccggcttgtaatatatcagcctctacaatgaaatgcagaagagttcatttttctaagatctgtttttcattagaaatattgacaaataacacattgtcaacctggatcctttgacaatttacttaactctggcatgttcacaaaaagtagaaactctaagagaccattaccatttattcacagatgtataggggatgtattctaaaaactgacagaaaagagaatctgatagtcaacactgttaacttttactgtgtaattgccaaatacacttttccaaatttgtcccaacagccctgtaagccagctttcttctatatttataaacacgataaatgcatgagaagatctgttattacattagtatattacgttatttattatgatcctagttgatggcctaaataaacacctttttctttaa

SEQ ID NO: 307356 - DNA, 2475 bp, Homo sapiens
agtcggaagtggcaccagcacttccggtacggaaaactcgctgctgccccaacctggcttgacaggcttggtctctgcaagtggctctcagccccttcttctttcctgcctcaccttccaattcgtttgccgccgccgtcccgcagctgctgtttccggagttgccccttccccatgttccggggcaggagtccgcaaagcgaagatccgcccgccggttcctcatcatgtccgaactgactaaagagctgatggagctggtgtggggcaccaagagcagccccggtctctcggacaccattttctgccgctggacgcaagggtttgtgtttagtgaatcagagggatctgcattagaacagtttgaaggtggcccctgtgctgttattgcacctgttcaggcatttcttttgaagaagctcctgttttcttcggagaagtcttcttggcgggattgttcagaggaagagcagaaggaactcctttgtcataccttgtgtgatattttagaaagtgcttgttgtgaccactctggatcatactgcttggtttcatggttaagaggaaagacaactgaggaaactgctagtatttctgggagtcctgcagagtctagttgccaagtggaacattcttctgccttggctgtcgaagagcttggctttgagcgatttcatgcattaattcaaaggccactctattctttaaataactgtatattattgaagaatttactgatgccagacagttcacctaagagatgaagaggttccctgccaaaaaaagatcgttcagaagtttaccagaattaaaagatgctgtcttggaccagtattcaatgtggggaaataaatttggagtattgctttttctgtattctgtattactgacaaagggcattgaaaacataaaaaacgaaattgaagatgcaagtgaacccttgatagatcctgtatatggacatggcagccaaagtttaattaatctcctgctgacgggacatgctgtttctaatgtatgggatggtgatagagagtgctcaggaatgaaacttcttggtatacatgaacaagcagcagtaggatttttaacactaatggaagctttaagatactgtaaggttggttcttacttgaaatctccaaaattccctatttggattgttggcagtgagactcacctcaccgtattttttgccaaggatatggctttagttgcccctgaagctccttcagaacaagccagaagagtttttcaaacctacgacccagaagataatggattcatacccgattcacttctggaagatgtgatgaaagcattggaccttgtttcagatcctgaatatataaatctcatgaagaataaattagatccagaaggattaggaatcatattattgggcccatttcttcaagaattttttcctgatcagggctccagtggtccagaatcttttactgtctaccactacaatggattgaagcagtcaaattataatgaaaaggtcatgtacgtagaagggactgcagttgtgatgggttttgaagatcccatgctacagacagatgacactcctattaaacgctgtctgcaaaccaaatggccatacattgagttactctggaccacagatcgctctccttcactaaattaatttgtctaagtatttataaggaagatcttaataacagatgttgaaagaaggagtcaagactggcaattggctggattaagctaaacactggtatcactgattaactgtaaataacaattaaaaacacattttcagtgtttatgatatgtttaaattatttgtcctaaagctttatgttaaagattatcctattttaccccttcgtgtgaaatttactagcaaaattaagctttcatcaaagttcatcacttttgcattcagatacttggtcatttacttaccaaattacaaacgcaatactacagcatttgtatattaagtatcacagttactattgataaactacttttgggttttatttcattgaggcactttttttattgtttgaatgattccggcttgtaatatatcagcctctacaatgaaatgcagaagagttcatttttctaagatctgtttttcattagaaatattgacaaataacacattgtcaacctggatcctttgacaatttacttaactctggcatgttcacaaaaagtagaaactctaagagaccattaccatttattcacagatgtataggggatgtattctaaaaactgacagaaaagagaatctgatagtcaacactgttaacttttactgtgtaattgccaaatacacttttccaaatttgtcccaacagccctgtaagccagctttcttctatatttataaacacgataaatgcatgagaagatctgttattacattagtatattacgttatttattatgatcctagttgatggcctaaataaacacctttttctttaa

SEQ ID NO: 307357 - DNA, 2312 bp, Homo sapiens
agtcggaagtggcaccagcacttccggtacggaaaactcgctgctgccccaacctggcttgacaggcttggtctctgcaagtggctctcagccccttcttctttcctgcctcaccttccaattcgtttgccgccgccgtcccgcagctgctgtttccggagttgccccttccccatgttccggggcaggagtccgcaaagcgaagatccgcccgccggttcctcatcatgtccgaactgactaaagagctgatggagctggtgtggggcaccaagagcagccccggtctctcggacaccattttctgccgctggacgcaagggtttgtgtttagtgaatcagagggatctgcattagaacagtttgaaggtggcccctgtgctgttattgcacctgttcaggcatttcttttgaagaagctcctgttttcttcggagaagtcttcttggcgggattgttcagaggaagagcagaaggaactcctttgtcataccttgtgtgatattttagaaagtgcttgttgtgaccactctggatcatactgcttggtttcatggttaagaggaaagacaactgaggaaactgctagtatttctgggagtcctgcagagtctagttgccaagtggaacattcttctgccttggctgtcgaagagcttggctttgagcgatttcatgcattaattcaaaaaagatcgttcagaagtttaccagaattaaaagatgctgtcttggaccagtattcaatgtggggaaataaatttggagtattgctttttctgtattctgtattactgacaaagggcattgaaaacataaaaaacgaaattgaagatgcaagtgaacccttgatagatcctgtatatggacatggcagccaaagtttaattaatctcctgctgacgggacatgctgtttctaatgtatgggatggtgatagagagtgctcaggaatgagttggttcttacttgaaatctccaaaattccctatttggattgttggcagtgagactcacctcaccgtattttttgccaaggatatggctttagttgcccctgaagctccttcagaacaagccagaagagtttttcaaacctacgacccagaagataatggattcatacccgattcacttctggaagatgtgatgaaagcattggaccttgtttcagatcctgaatatataaatctcatgaagaataaattagatccagaaggattaggaatcatattattgggcccatttcttcaagaattttttcctgatcagggctccagtggtccagaatcttttactgtctaccactacaatggattgaagcagtcaaattataatgaaaaggtcatgtacgtagaagggactgcagttgtgatgggttttgaagatcccatgctacagacagatgacactcctattaaacgctgtctgcaaaccaaatggccatacattgagttactctggaccacagatcgctctccttcactaaattaatttgtctaagtatttataaggaagatcttaataacagatgttgaaagaaggagtcaagactggcaattggctggattaagctaaacactggtatcactgattaactgtaaataacaattaaaaacacattttcagtgtttatgatatgtttaaattatttgtcctaaagctttatgttaaagattatcctattttaccccttcgtgtgaaatttactagcaaaattaagctttcatcaaagttcatcacttttgcattcagatacttggtcatttacttaccaaattacaaacgcaatactacagcatttgtatattaagtatcacagttactattgataaactacttttgggttttatttcattgaggcactttttttattgtttgaatgattccggcttgtaatatatcagcctctacaatgaaatgcagaagagttcatttttctaagatctgtttttcattagaaatattgacaaataacacattgtcaacctggatcctttgacaatttacttaactctggcatgttcacaaaaagtagaaactctaagagaccattaccatttattcacagatgtataggggatgtattctaaaaactgacagaaaagagaatctgatagtcaacactgttaacttttactgtgtaattgccaaatacacttttccaaatttgtcccaacagccctgtaagccagctttcttctatatttataaacacgataaatgcatgagaagatctgttattacattagtatattacgttatttattatgatcctagttgatggcctaaataaacacctttttctttaa

SEQ ID NO: 307358 - DNA, 2438 bp, Homo sapiens
agtcggaagtggcaccagcacttccggtacggaaaactcgctgctgccccaacctggcttgacaggcttggtctctgcaagtggctctcagccccttcttctttcctgcctcaccttccaattcgtttgccgccgccgtcccgcagctgctgtttccggagttgccccttccccatgttccggggcaggagtccgcaaagcgaagatccgcccgccggttcctcatcatgtccgaactgactaaagagctgatggagctggtgtggggcaccaagagcagccccggtctctcggacaccattttctgccgctggacgcaagggtttgtgtttagtgaatcagagggatctgcattagaacagtttgaaggtggcccctgtgctgttattgcacctgttcaggcatttcttttgaagaagctcctgttttcttcggagaagtcttcttggcgggattgttcagaggaagagcagaaggaactcctttgtcataccttgtgtgatattttagaaagtgcttgttgtgaccactctggatcatactgcttggtttcatggttaagaggaaagacaactgaggaaactgctagtatttctgggagtcctgcagagtctagttgccaagtggaacattcttctgccttggctgtcgaagagcttggctttgagcgatttcatgcattaattcaaaaaagatcgttcagaagtttaccagaattaaaagatgctgtcttggaccagtattcaatgtggggaaataaatttggagtattgctttttctgtattctgtattactgacaaagggcattgaaaacataaaaaacgaaattgaagatgcaagtgaacccttgatagatcctgtatatggacatggcagccaaagtttaattaatctcctgctgacgggacatgctgtttctaatgtatgggatggtgatagagagtgctcaggaatgaaacttcttggtatacatgaacaagcagcagtaggatttttaacactaatggaagctttaagatactgtaaggttggttcttacttgaaatctccaaaattccctatttggattgttggcagtgagactcacctcaccgtattttttgccaaggatatggctttagttgcccctgaagctccttcagaacaagccagaagagtttttcaaacctacgacccagaagataatggattcatacccgattcacttctggaagatgtgatgaaagcattggaccttgtttcagatcctgaatatataaatctcatgaagaataaattagatccagaaggattaggaatcatattattgggcccatttcttcaagaattttttcctgatcagggctccagtggtccagaatcttttactgtctaccactacaatggattgaagcagtcaaattataatgaaaaggtcatgtacgtagaagggactgcagttgtgatgggttttgaagatcccatgctacagacagatgacactcctattaaacgctgtctgcaaaccaaatggccatacattgagttactctggaccacagatcgctctccttcactaaattaatttgtctaagtatttataaggaagatcttaataacagatgttgaaagaaggagtcaagactggcaattggctggattaagctaaacactggtatcactgattaactgtaaataacaattaaaaacacattttcagtgtttatgatatgtttaaattatttgtcctaaagctttatgttaaagattatcctattttaccccttcgtgtgaaatttactagcaaaattaagctttcatcaaagttcatcacttttgcattcagatacttggtcatttacttaccaaattacaaacgcaatactacagcatttgtatattaagtatcacagttactattgataaactacttttgggttttatttcattgaggcactttttttattgtttgaatgattccggcttgtaatatatcagcctctacaatgaaatgcagaagagttcatttttctaagatctgtttttcattagaaatattgacaaataacacattgtcaacctggatcctttgacaatttacttaactctggcatgttcacaaaaagtagaaactctaagagaccattaccatttattcacagatgtataggggatgtattctaaaaactgacagaaaagagaatctgatagtcaacactgttaacttttactgtgtaattgccaaatacacttttccaaatttgtcccaacagccctgtaagccagctttcttctatatttataaacacgataaatgcatgagaagatctgttattacattagtatattacgttatttattatgatcctagttgatggcctaaataaacacctttttctttaagatgcggcagatattatacatacatatcttcatatcacggaaataattacagcga

SEQ ID NO: 307359 - DNA, 1706 bp, Homo sapiens
agtcggaagtggcaccagcacttccggtacggaaaactcgctgctgccccaacctggcttgacaggcttggtctctgcaagtggctctcagccccttcttctttcctgcctcaccttccaattcgtttgccgccgccgtcccgcagctgctgtttccggagttgccccttccccatgttccggggcaggagtccgcaaagcgaagatccgcccgccggttcctcatcatgtccgaactgactaaagagctgatggagctggtgtggggcaccaagagcagccccggtctctcggacaccattttctgccgctggacgcaagggtttgtgtttagtgaatcagagggatctgcattagaacagtttgaaggtggcccctgtgctgttattgcacctgttcaggcatttcttttgaagaagctcctgttttcttcggagaagtcttcttggcgggattgttcagaggaagagcagaaggaactcctttgtcataccttgtgtgatattttagaaagtgcttgttgtgaccactctggatcatactgcttggtttcatggttaagaggaaagacaactgaggaaactgctagtatttctgggagtcctgcagagtctagttgccaagtggaacattcttctgccttggctgtcgaagagcttggctttgagcgatttcatgcattaattcaaaaaagatcgttcagaagtttaccagaattaaaagatgctgtcttggaccagtattcaatgtggggaaataaatttggagtattgctttttctgtattctgtattactgacaaagggcattgaaaacataaaaaacgaaattgaagatgcaagtgaacccttgatagatcctgtatatggacatggcagccaaagtttaattaatctcctgctgacgggacatgctgtttctaatgtatgggatggtgatagagagtgctcaggaatgaaacttcttggtatacatgaacaagcagcagtaggatttttaacactaatggaagctttaagatactgtaaggttggttcttacttgaaatctccaaaattccctatttggattgttggcagtgagactcacctcaccgtattttttgccaaggatatggctttagttgcccctgaagctccttcagaacaagccagaagagtttttcaaacctacgacccagaagataatggattcatacccgattcacttctggaagatgtgatgaaagcattggaccttgtttcagatcctgaatatataaatctcatgaagaataaattagatccagaaggattaggaatcatattattgggcccatttcttcaagaattttttcctgatcagggctccagtggtccagaatcttttactgtctaccactacaatggattgaagcagtcaaattataatgaaaaggtcatgtacgtagaagggactgcagttgtgatgggttttgaagatcccatgctacagacagatgacactcctattaaacgctgtctgcaaaccaaatggccatacattgagttactctggaccacagatcgctctccttcactaaattaatttgtctaagtatttataaggaagatcttaataacagatgttgaaagaaggagtcaagactggcaattggctggattaagctaaacactggtatcactgattaactgtaaataacaattaaaaacacattttcagtgttta

SEQ ID NO: 307360 - DNA, 1130 bp, Homo sapiens
ttcgtatcacgtctcgtaccccaccactcctatagatcagtaggaatcatattattgggcccatttcttcaagaattttttcctgatcagggctccagtggtccagaatcttttactgtctaccactacaatggattgaagcagtcaaattataatgaaaaggtcatgtacgtagaagggactgcagttgtgatgggttttgaagatcccatgctacagacagatgacactcctattaaacgctgtctgcaaaccaaatggccatacattgagttactctggaccacagatcgctctccttcactaaattaatttgtctaagtatttataaggaagatcttaataacagatgttgaaagaaggagtcaagactggcaattggctggattaagctaaacactggtatcactgattaactgtaaataacaattaaaaacacattttcagtgtttatgatatgtttaaattatttgtcctaaagctttatgttaaagattatcctattttaccccttcgtgtgaaatttactagcaaaattaagctttcatcaaagttcatcacttttgcattcagatacttggtcatttacttaccaaattacaaacgcaatactacagcatttgtatattaagtatcacagttactattgataaactacttttgggttttatttcattgaggcactttttttattgtttgaatgattccggcttgtaatatatcagcctctacaatgaaatgcagaagagttcatttttctaagatctgtttttcattagaaatattgacaaataacacattgtcaacctggatcctttgacaatttacttaactctggcatgttcacaaaaagtagaaactctaagagaccattaccatttattcacagatgtataggggatgtattctaaaaactgacagaaaagagaatctgatagtcaacactgttaacttttactgtgtaattgccaaatacacttttccaaatttgtcccaacagccctgtaagccagctttcttctatatttataaacacgataaatgcatgagaagatctgttattacattagtatattacgttatttattatgatcctagttgatggcctaaataaacacctttttctttaa

SEQ ID NO: 307361 - DNA, 1216 bp, Homo sapiens
aaagaaggacagacagacagatgaacttgggatatggctttagttgcccctgaagctccttcagaacaagccagaagagtttttcaaacctacgacccagaagataatggattcatacccgattcacttctggaagatgtgatgaaagcattggaccttgtttcagatcctgaataggctccagtggtccagaatcttttactgtctaccactacaatggattgaagcagtcaaattataatgaaaaggtcatgtacgtagaagggactgcagttgtgatgggttttgaagatcccatgctacagacagatgacactcctattaaacgctgtctgcaaaccaaatggccatacattgagttactctggaccacagatcgctctccttcactaaattaatttgtctaagtatttataaggaagatcttaataacagatgttgaaagaaggagtcaagactggcaattggctggattaagctaaacactggtatcactgattaactgtaaataacaattaaaaacacattttcagtgtttatgatatgtttaaattatttgtcctaaagctttatgttaaagattatcctattttaccccttcgtgtgaaatttactagcaaaattaagctttcatcaaagttcatcacttttgcattcagatacttggtcatttacttaccaaattacaaacgcaatactacagcatttgtatattaagtatcacagttactattgataaactacttttgggttttatttcattgaggcactttttttattgtttgaatgattccggcttgtaatatatcagcctctacaatgaaatgcagaagagttcatttttctaagatctgtttttcattagaaatattgacaaataacacattgtcaacctggatcctttgacaatttacttaactctggcatgttcacaaaaagtagaaactctaagagaccattaccatttattcacagatgtataggggatgtattctaaaaactgacagaaaagagaatctgatagtcaacactgttaacttttactgtgtaattgccaaatacacttttccaaatttgtcccaacagccctgtaagccagctttcttctatatttataaacacgataaatgcatgagaagatctgttattacattagtatattacgttatttattatgatcctagttgatggcctaaataaacacctttttctttaa

SEQ ID NO: 307362 - DNA, 1274 bp, Homo sapiens
gggtgtcggttcggcttctcgggtcggattccgcggtcccaacccttccccatggccgaccctgaggagttgcaggtttcttcgccgcccccgccgctccctcttctccctcctcttcagacgcctctgcagcatcttccccgggcggccagtgagtttgggctggccagttccgagcaggagcagcggccaacggtggaccagctggaggaagtggagctgcagatcggagacggctccagtggtccagaatcttttactgtctaccactacaatggattgaagcagtcaaattataatgaaaaggtcatgtacgtagaagggactgcagttgtgatgggttttgaagatcccatgctacagacagatgacactcctattaaacgctgtctgcaaaccaaatggccatacattgagttactctggaccacagatcgctctccttcactaaattaatttgtctaagtatttataaggaagatcttaataacagatgttgaaagaaggagtcaagactggcaattggctggattaagctaaacactggtatcactgattaactgtaaataacaattaaaaacacattttcagtgtttatgatatgtttaaattatttgtcctaaagctttatgttaaagattatcctattttaccccttcgtgtgaaatttactagcaaaattaagctttcatcaaagttcatcacttttgcattcagatacttggtcatttacttaccaaattacaaacgcaatactacagcatttgtatattaagtatcacagttactattgataaactacttttgggttttatttcattgaggcactttttttattgtttgaatgattccggcttgtaatatatcagcctctacaatgaaatgcagaagagttcatttttctaagatctgtttttcattagaaatattgacaaataacacattgtcaacctggatcctttgacaatttacttaactctggcatgttcacaaaaagtagaaactctaagagaccattaccatttattcacagatgtataggggatgtattctaaaaactgacagaaaagagaatctgatagtcaacactgttaacttttactgtgtaattgccaaatacacttttccaaatttgtcccaacagccctgtaagccagctttcttctatatttataaacacgataaatgcatgagaagatctgttattacattagtatattacgttatttattatgatcctagttgatggcctaaataaacacctttttctttaa

SEQ ID NO: 307363 - DNA, 1677 bp, Homo sapiens
agtcggaagtggcaccagcacttccggtacggaaaactcgctgctgccccaacctggcttgacaggcttggtctctgcaagtggctctcagccccttcttctttcctgcctcaccttccaattcgtttgccgccgccgtcccgcagctgctgtttccggagttgccccttccccatgttccggggcaggagtccgcaaagcgaagatccgcccgccggttcctcatcatgtccgaactgactaaagagctgatggagctggtgtggggcaccaagagcagccccggtctctcggacaccattttctgccgctggacgcaagggtttgtgtttagtgaatcagagggatctgcattagaacagtttgaaggtggcccctgtgctgttattgcacctgttcaggcatttcttttgaagaagctcctgttttcttcggagaagtcttcttggcgggattgttcagaggaagagcagaaggaactcctttgtcataccttgtgtgatattttagaaagtgcttgttgtgaccactctggatcatactgcttggtttcatggttaagaggaaagacaactgaggaaactgctagtatttctgggagtcctgcagagtctagttgccaagtggaacattcttctgccttggctgtcgaagagcttggctttgagcgatttcatgcattaattcaaaaaagatcgttcagaagtttaccagaattaaaagatgctgtcttggaccagtattcaatgtggggaaataaatttggagtattgctttttctgtattctgtattactgacaaagggcattgaaaacataaaaaacgaaattgaagatgcaagtgaacccttgatagatcctgtatatggacatggcagccaaagtttaattaatctcctgctgacgggacatgctgtttctaatgtatgggatggtgatagagagtgctcaggaatgaaacttcttggtatacatgaacaagcagcagtaggatttttaacactaatggaagctttaagatactgtaaggttggttcttacttgaaatctccaaaattccctatttggattgttggcagtgagactcacctcaccgtattttttgccaaggatatggctttagttgcccctgaagctccttcagaacaagccagaagagtttttcaaacctacgacccagaagataatggattcatacccgattcacttctggaagatgtgatgaaagcattggaccttgtttcagatcctgaatagtaagctaaataggaagtgttatttagccaactcaaaaagattcgattaagtttaagacatattgtacattttttgcctttttaaaaatctatatctgcatatatgaagcatagcaatctatgtaaggcaaagattaagaaatcgaactaatccaatattatagcagacttgacatacttaaattgagtttcctttcccacccagcaattactgtcctgctttttaaaaaatgctaaaagtgtctttctataaactttaaaaagtttctctgcaaacacttccccacgtcttaaaattttatgtgacattagtatcttcagtaaagtaatgacggttctgtgtagatggtgctagttgccctgcttaaataaccagcaggcctctgactttccctcttaaataaagatgatcaaagataaaa

SEQ ID NO: 307364 - DNA, 851 bp, Homo sapiens
agtcggaagtggcaccagcacttccggtacggaaaactcgctgctgccccaacctggcttgacaggcttggtctctgcaagtggctctcagccccttcttctttcctgcctcaccttccaattcgtttgccgccgccgtcccgcagctgctgtttccggagttgccccttccccatgttccggggcaggagtccgcaaagcgaagatccgcccgccggttcctcatcatgtccgaactgactaaagagctgatggagctggtgtggggcaccaagagcagccccggtctctcggacaccattttctgccgctggacgcaagggtttgtgtttagtgaatcagagggatctgcattagaacagtttgaaggtggcccctgtgctgttattgcacctgttcaggcatttcttttgaagaagctcctgttttcttcggagaagtcttcttggcgggattgttcagaggaagagcagaaggaactcctttgtcataccttgtgtgatattttagaaagtgcttgttgtgaccactctggatcatactgcttggtttcatggttaagaggaaagacaactgaggaaactgctagtatttctgggagtcctgcagagtctagttgccaagtggaacattcttgtaagatatatttttatttcctgaagtttttttcttgttcctttgttttaatgaatctattgaatattttgaagaaaaaattacttaaaattttcataacatgtattcttttccagcttaagcttaattactgagcctcactattttttatttccatatcatttattttaactacttagaagatactacatttttgcaaaaaaaaatgcatctct

SEQ ID NO: 307365 - DNA, 3316 bp, Homo sapiens
ggaggcaggcggtgccgcggcgccgggacccgactcatccggtgcttgcgtgtggtggtgagcgcagcgccgaggatgaggaggtgcaacagcggctccgggccgccgccgtcgctgctgctgctgctgctgtggctgctcgcggttcccggcgctaacgcggccccgcggtcggcgctctattcgccttccgacccgctgacgctgctgcaggcggacacggtgcgcggcgcggtgctgggctcccgcagcgcctgggccgtggagttcttcgcctcctggtgcggccactgcatcgccttcgccccgacgtggaaggcgctggccgaagacgtcaaagcctggaggccggccctgtatctcgccgccctggactgtgctgaggagaccaacagtgcagtctgcagagacttcaacatccctggcttcccgactgtgaggttcttcaaggcctttaccaagaacggctcgggagcagtatttccagtggctggtgctgacgtgcagacgctgcgggagaggctcattgacgccctggagtcccatcatgacacgtggcccccagcctgtcccccactggagcctgccaagctggaggagattgatggattctttgcgagaaataacgaagagtacctggctctgatctttgaaaagggaggctcctacctgggtagagaggtggctctggacctgtcccagcacaaaggcgtggcggtgcgcagggtgctgaacacagaggccaatgtggtgagaaagtttggtgtcaccgacttcccctcttgctacctgctgttccggaatggctctgtctcccgagtccccgtgctcatggaatccaggtccttctataccgcttacctgcagagactctctgggctcaccagggaggctgcccagaccacagttgcaccaaccactgctaacaagatagctcccactgtttggaaattggcagatcgctccaagatctacatggctgacctggaatctgcactgcactacatcctgcggatagaagtgggcaggttcccggtcctggaagggcagcgcctggtggccctgaaaaagtttgtggcagtgctggccaagtatttccctggccggcccttagtccagaacttcctgcactccgtgaatgaatggctcaagaggcagaagagaaataaaattccctacagtttctttaaaactgccctggacgacaggaaagagggtgccgttcttgccaagaaggtgaactggattggctgccaggggagtgagccgcatttccggggctttccctgctccctgtgggtcctcttccacttcttgactgtgcaggcagctcggcaaaatgtagaccactcacaggaagcagccaaggccaaggaggtcctcccagccatccgaggctacgtgcactacttcttcggctgccgagactgcgctagccacttcgagcagatggctgctgcctccatgcaccgggtggggagtcccaacgccgctgtcctctggctctggtctagccacaacagggtcaatgctcgccttgcaggtgcccccagcgaggacccccagttccccaaggtgcagtggccaccccgtgaactttgttctgcctgccacaatgaacgcctggatgtgcccgtgtgggacgtggaagccaccctcaacttcctcaaggcccacttctccccaagcaacatcatcctggacttccctgcagctgggtcagctgcccggagggatgtgcagaatgtggcagccgccccagagctggcgatgggagccctggagctggaaagccggaattcaactctggaccctgggaagcctgagatgatgaagtcccccacaaacaccaccccacatgtgccggctgagggacctgaggcaagtcgacccccgaagctgcaccctggcctcagagctgcaccaggccaggagcctcctgagcacatggcagagcttcagaggaatgagcaggagcagccgcttgggcagtggcacttgagcaagcgagacacaggggctgcattgctggctgagtccagggctgagaagaaccgcctctggggccctttggaggtcaggcgcgtgggccgcagctccaagcagctggtcgacatccctgagggccagctggaggcccgagctggacggggccgaggccagtggctgcaggtgctgggagggggcttctcttacctggacatcagcctctgtgtggggctctattccctgtccttcatgggcctgctggccatgtacacctacttccaggccaagataagggccctgaagggccatgctggccaccctgcagcctgaaccacctggggaggaggcgggagagggagctgccatctctaggcacctcaagccccctgaccccattccctcccctcccaccccttgctccttgtctggcctagaagtgtgggaaattcaggaaaacgagttgctccagtgaagcttcttggggttgctaggacagagagctcctttgacacaaaagacaggagcagggtccaggttcccctgctgtgcagggagggcagccccgggcagtgggcatagggcagctcagtccctggcctcttagcaccacattcctgtttttcagcttatttgaagtcctgcctcattctcactggagcctcagtctctcctgcttggtcttggccctcaactggggcaagtgaagccagaggagggtcccccagctgggtgggctggaatggaactcctcactagctgctggggctccgcccaccctgctcccttccggacaatgaagaagcctttgcaccctgggaggaaggaccaccccgggccctctatgcctggccagcctccagctcctcagacctcctgggtggggtttggcttcagggtggggtttggaagcttctggaagtcgtgctggtctcccaggtgaggcaagccatggttgctgggctgtagggtgagtggcttgcttggtgggacctgacgagttggtggcatgggaaggatgtgggtctctagtgccttgccctggcttagctgcaggagaagatggctgctttcacttccccccattgagctctgctccctctgagcctggtcttttgtccttttttattttggtctccaagatgaatgctcatctttggagggtgccaggtagaagctagggaggggagtgtcttctctctccaggtttcaccttccagtgtgcagaagttagaagggtctggcgggggcagtgccttacacatgcttgattcccacgctaccccctgccttgggaggtgtgtggaataaattatttttgttaaggcaa

SEQ ID NO: 307366 - DNA, 6013 bp, Homo sapiens
ggaggcaggcggtgccgcggcgccgggacccgactcatccggtgcttgcgtgtggtggtgagcgcagcgccgaggatgaggaggtgcaacagcggctccgggccgccgccgtcgctgctgctgctgctgctgtggctgctcgcggttcccggcgctaacgcggccccgcggtcggcgctctattcgccttccgacccgctgacgctgctgcaggcggacacggtgcgcggcgcggtgctgggctcccgcagcgcctgggccgtggagttcttcgcctcctggtgcggccactgcatcgccttcgccccgacgtggaaggcgctggccgaagacgtcaaagcctggaggccggccctgtatctcgccgccctggactgtgctgaggagaccaacagtgcagtctgcagagacttcaacatccctggcttcccgactgtgaggttcttcaaggcctttaccaagaacggctcgggagcagtatttccagtggctggtgctgacgtgcagacgctgcgggagaggctcattgacgccctggagtcccatcatgacacgtggcccccagcctgtcccccactggagcctgccaagctggaggagattgatggattctttgcgagaaataacgaagagtacctggctctgatctttgaaaagggaggctcctacctgggtagagaggtggctctggacctgtcccagcacaaaggcgtggcggtgcgcagggtgctgaacacagaggccaatgtggtgagaaagtttggtgtcaccgacttcccctcttgctacctgctgttccggaatggctctgtctcccgagtccccgtgctcatggaatccaggtccttctataccgcttacctgcagagactctctgggctcaccagggaggctgcccagaccacagttgcaccaaccactgctaacaagatagctcccactgtttggaaattggcagatcgctccaagatctacatggctgacctggaatctgcactgcactacatcctgcggatagaagtgggcaggttcccggtcctggaagggcagcgcctggtggccctgaaaaagtttgtggcagtgctggccaagtatttccctggccggcccttagtccagaacttcctgcactccgtgaatgaatggctcaagaggcagaagagaaataaaattccctacagtttctttaaaactgccctggacgacaggaaagagggtgccgttcttgccaagaaggtgaactggattggctgccaggggagtgagccgcatttccggggctttccctgctccctgtgggtcctcttccacttcttgactgtgcaggcagctcggcaaaatgtagaccactcacaggaagcagccaaggccaaggaggtcctcccagccatccgaggctacgtgcactacttcttcggctgccgagactgcgctagccacttcgagcagatggctgctgcctccatgcaccgggtggggagtcccaacgccgctgtcctctggctctggtctagccacaacagggtcaatgctcgccttgcaggtgcccccagcgaggacccccagttccccaaggtgcagtggccaccccgtgaactttgttctgcctgccacaatgaacgcctggatgtgcccgtgtgggacgtggaagccaccctcaacttcctcaaggcccacttctccccaagcaacatcatcctggacttccctgcagctgggtcagctgcccggagggatgtgcagaatgtggcagccgccccagagctggcgatgggagccctggagctggaaagccggaattcaactctggaccctgggaagcctgagatgatgaagtcccccacaaacaccaccccacatgtgccggctgagggacctgaggcaagtcgacccccgaagctgcaccctggcctcagagctgcaccaggccaggagcctcctgagcacatggcagagcttcagaggaatgagcaggagcagccgcttgggcagtggcacttgagcaagcgagacacaggggctgcattgctggctgagtccagggctgagaagaaccgcctctggggccctttggaggtcaggcgcgtgggccgcagctccaagcagctggtcgacatccctgagggccagctggaggcccgagctggacggggccgaggccagtggctgcaggtgctgggagggggcttctcttacctggacatcagcctctgtgtggggctctattccctgtccttcatgggcctgctggccatgtacacctacttccaggccaagataagggccctgaagggccatgctggccaccctgcagcctgaaccacctggggaggaggcgggagagggagctgccatctctaggcacctcaagccccctgaccccattccctcccctcccaccccttgctccttgtctggcctagaagtgtgggaaattcaggaaaacgagttgctccagtgaagcttcttggggttgctaggacagagagctcctttgacacaaaagacaggagcagggtccaggttcccctgctgtgcagggagggcagccccgggcagtgggcatagggcagctcagtccctggcctcttagcaccacattcctgtttttcagcttatttgaagtcctgcctcattctcactggagcctcagtctctcctgcttggtcttggccctcaactggggcaagtgaagccagaggagggtcccccagctgggtgggctggaatggaactcctcactagctgctggggctccgcccaccctgctcccttccggacaatgaagaagcctttgcaccctgggaggaaggaccaccccgggccctctatgcctggccagcctccagctcctcagacctcctgggtggggtttggcttcagggtggggtttggaagcttctggaagtcgtgctggtctcccaggtgaggcaagccatggttgctgggctgtagggtgagtggcttgcttggtgggacctgacgagttggtggcatgggaaggatgtgggtctctagtgccttgccctggcttagctgcaggagaagatggctgctttcacttccccccattgagctctgctccctctgagcctggtcttttgtccttttttattttggtctccaagatgaatgctcatctttggagggtgccaggtagaagctagggaggggagtgtcttctctctccaggtttcaccttccagtgtgcagaagttagaagggtctggcgggggcagtgccttacacatgcttgattcccacgctaccccctgccttgggaggtgtgtggaataaattatttttgttaaggcaaaggcaagcattggtgtgttctttaacttgctacttggagacctagtgtccagtctggacagaatgcacagagaccagcctcacctggaatgacgttcagctcggtacccctcctcagcagacgcagctcctggccacagactgcccatagaactgtctgcacccaaaccccatggccttttcatgcacggagacaggcctctggatgtgcagccttgccaccccctgccccaatcctccctgagagctcctgcctcagtgccctgggctggtgagggagaagcctgtctgcacctgcctaattccagctcctccaggaagcaagggcttgtttgtcagagctgcagggttggccactcggtggggaggagtcagccaggattagagagcctgcccctaatccggcctgctgggttttacaaggatcagagctgctgataatgaacctcattaagggggagcaggagcctcaatccgatttggttttctctttgacatcttcactctgctcagatggcctgggtgctatgtggagcaggtgggatgccaaggccactcctgctatggggcagctggggctggggagggatggcagtctccctgcatgtttccctcgacctctttagctgcagcgccttgctgggctcctgggttggactccctctctgtgcccctgctccaggcacccattggctccatcctcctggttgtgctctgcaccccctgctcccttgggctggccctggctgggggcctgagagacagacaggaacccacaatcaggaggcaaccctggcctgcaagaggaagacagaggctcccagggccggtgccctgtgtgcccactgcaccaaggccgctgaataagcctgcccttcaccccctaagggctccttgcccaatgccaagtgctggggatttctgtcagcaagccctgtggctccagtgacggtatttctaaagccaaacttagttacctagaattagcgccatgttggaaacactgtcgcagcagcccgggctgcacagtgtgtagcccagcctccaggtccacggagtggtgtggacctcccacctcacagctgcctctggcagccaagcctcttttcgcccggccccagcccctctggttgataaacgggtgggcctcctcagcagcgtggctgcctttcaccttgatttccccagggctctcggcaacatcgataaaccagcctcgcccaccagctgggccctcccccacccagtctgccaggctgggagctggagcttgctgagtcttgaatgcccttctagatggcttctctagaggctctcctggcaagagagggtcccaaggggagccctgcaaagcaaaggctccttgtctggggcgggatagagaatctcgcctctgtctggtgtgttacctactgggggcacaggaacaatttcctcaaggagacagtggcatggagctttgaaagacgagtaggtgttagcaaggaaataaggaggaacgggggttacgggcagaggagaaagcacatgccaagtcagcaaagaaaagtagaattcgaaaactttttaaaaatattactaaggattttcacaatgctgcactgggctagaaactgaagctaaaacagatacgtggtccctgctgctatggggcttccgttctagaggcaaggacaggttgtgatgagggttctgaaggatagagaccaagcagggagggtgttgaggaggcttctgcgagacctgaaggatgggaagccaggaagtgggaggggtgggggtccaggctggaggggcccaatgtaggtgtagagggactacagccctgaggggctgctccatgcggcattcttggaggtccaagaggggcagcgccaccttgggccaggctcctctccagcagccttggtatggggtgggggtgggaagacccctgatgcagcctgtcctctgggtgtgggggtggaggagagggctccaggggacccagccagccttgaccctggaggaaagtcaggtgggctcagagagagccctcaaatctgggccctgggtcagggtggggtcaagtccagccttgaagagaatggactctggaatctgacgtctgggtttgaatccagcttccaacactcactggctgtgtgactttgggcaagataacttatcctcttgtccccatgtgtcattggagataaactacccacctaccagattgttgtaccatgctgggcaaacactaagtgcttaataatggtagcccactgctcatgtcgtgtcgtctcctgtcttgatacctgaaaactcaaggggccctgttgtgcttggaggggggtgccgttcccacaggatattctgtgaagggtgtccctggagctgggcctccaggtggcaagccccaagccaccccggcaggtgccactggccagagttgaactgaggtgttgagtggaaagtgcctccccacccccatctgccacagtagtatggatttccttcatgagatggggctcctaaaatgcctgaaatgtgtatgctgttggagaattgatgtgtatgatttattgaactttgcactcatttaaatctcatttaatcctccaacaacgcaagatgaagaagctgaggcttaaagagattaagaaacatcctatcccctttactcccaccaaaataaatacatttgccctattctccc

SEQ ID NO: 307367 - DNA, 5678 bp, Homo sapiens
  misc_feature (5608)..(5608): n is a, c, g, or t
  misc_feature (5615)..(5615): n is a, c, g, or t
  misc_feature (5619)..(5619): n is a, c, g, or t
  misc_feature (5627)..(5627): n is a, c, g, or t
  misc_feature (5630)..(5630): n is a, c, g, or t
  misc_feature (5633)..(5633): n is a, c, g, or t
  misc_feature (5635)..(5635): n is a, c, g, or t
  misc_feature (5638)..(5638): n is a, c, g, or t
  misc_feature (5645)..(5645): n is a, c, g, or t
  misc_feature (5659)..(5659): n is a, c, g, or t
ggaggcaggcggtgccgcggcgccgggacccgactcatccggtgcttgcgtgtggtggtgagcgcagcgccgaggatgaggaggtgcaacagcggctccgggccgccgccgtcgctgctgctgctgctgctgtggctgctcgcggttcccggcgctaacgcggccccgcggtcggcgctctattcgccttccgacccgctgacgctgctgcaggcggacacggtgcgcggcgcggtgctgggctcccgcagcgcctgggccgtggagttcttcgcctcctggtgcggccactgcatcgccttcgccccgacgtggaaggcgctggccgaagacgtcaaagcctggaggccggccctgtatctcgccgccctggactgtgctgaggagaccaacagtgcagtctgcagagacttcaacatccctggcttcccgactgtgaggttcttcaaggcctttaccaagaacggctcgggagcagtatttccagtggctggtgctgacgtgcagacgctgcgggagaggctcattgacgccctggagtcccatcatgacacgtggcccccagcctgtcccccactggagcctgccaagctggaggagattgatggattctttgcgagaaataacgaagagtacctggctctgatctttgaaaagggaggctcctacctgggtagagaggtggctctggacctgtcccagcacaaaggcgtggcggtgcgcagggtgctgaacacagaggccaatgtggtgagaaagtttggtgtcaccgacttcccctcttgctacctgctgttccggaatggctctgtctcccgagtccccgtgctcatggaatccaggtccttctataccgcttacctgcagagactctctgggctcaccagggaggctgcccagaccacagttgcaccaaccactgctaacaagatagctcccactgtttggaaattggcagatcgctccaagatctacatggctgacctggaatctgcactgcactacatcctgcggatagaagtgggcaggttcccggtcctggaagggcagcgcctggtggccctgaaaaagtttgtggcagtgctggccaagtatttccctggccggcccttagtccagaacttcctgcactccgtgaatgaatggctcaagaggcagaagagaaataaaattccctacagtttctttaaaactgccctggacgacaggaaagagggtgccgttcttgccaagaaggtgaactggattggctgccaggggagtgagccgcatttccggggctttccctgctccctgtgggtcctcttccacttcttgactgtgcaggcagctcggcaaaatgtagaccactcacaggaagcagccaaggccaaggaggtcctcccagccatccgaggctacgtgcactacttcttcggctgccgagactgcgctagccacttcgagcagatggctgctgcctccatgcaccgggtggggagtcccaacgccgctgtcctctggctctggtctagccacaacagggtcaatgctcgccttgcaggtgcccccagcgaggacccccagttccccaaggtgcagtggccaccccgtgaactttgttctgcctgccacaatgaacgcctggatgtgcccgtgtgggacgtggaagccaccctcaacttcctcaaggcccacttctccccaagcaacatcatcctggacttccctgcagctgggtcagctgcccggagggatgtgcagaatgtggcagccgccccagagctggcgatgggagccctggagctggaaagccggaattcaactctggaccctgggaagcctgagatgatgaagtcccccacaaacaccaccccacatgtgccggctgagggacctgaggcaagtcgacccccgaagctgcaccctggcctcagagctgcaccaggccaggagcctcctgagcacatggcagagcttcagaggaatgagcaggagcagccgcttgggcagtggcacttgagcaagcgagacacaggggctgcattgctggctgagtccagggctgagaagaaccgcctctggggccctttggaggtcaggcgcgtgggccgcagctccaagcagctggtcgacatccctgagggccagctggaggcccgagctggacggggccgaggccagtggctgcaggtgctgggagggggcttctcttacctggacatcagcctctgtgtggggctctattccctgtccttcatgggcctgctggccatgtacacctacttccaggccaagataagggccctgaagggccatgctggccaccctgcagcctgaaccacctggggaggaggcgggagagggagctgccatctctaggcacctcaagccccctgaccccattccctcccctcccaccccttgctccttgtctggcctagaagtgtgggaaattcaggaaaacgagttgctccagtgaagcttcttggggttgctaggacagagagctcctttgacacaaaagacaggagcagggtccaggttcccctgctgtgcagggagggcagccccgggcagtgggcatagggcagctcagtccctggcctcttagcaccacattcctgtttttcagcttatttgaagtcctgcctcattctcactggagcctcagtctctcctgcttggtcttggccctcaactggggcaagtgaagccagaggagggtcccccagctgggtgggctggaatggaactcctcactagctgctggggctccgcccaccctgctcccttccggacaatgaagaagcctttgcaccctgggaggaaggaccaccccgggccctctatgcctggccagcctccagctcctcagacctcctgggtggggtttggcttcagggtggggtttggaagcttctggaagtcgtgctggtctcccaggtgaggcaagccatggttgctgggctgtagggtgagtggcttgcttggtgggacctgacgagttggtggcatgggaaggatgtgggtctctagtgccttgccctggcttagctgcaggagaagatggctgctttcacttccccccattgagctctgctccctctgagcctggtcttttgtccttttttattttggtctccaagatgaatgctcatctttggagggtgccaggtagaagctagggaggggagtgtcttctctctccaggtttcaccttccagtgtgcagaagttagaagggtctggcgggggcagtgccttacacatgcttgattcccacgctaccccctgccttgggaggtgtgtggaataaattatttttgttaaggcaaaggcaagcattggtgtgttctttaacttgctacttggagacctagtgtccagtctggacagaatgcacagagaccagcctcacctggaatgacgttcagctcggtacccctcctcagcagacgcagctcctggccacagactgcccatagaactgtctgcacccaaaccccatggccttttcatgcacggagacaggcctctggatgtgcagccttgccaccccctgccccaatcctccctgagagctcctgcctcagtgccctgggctggtgagggagaagcctgtctgcacctgcctaattccagctcctccaggaagcaagggcttgtttgtcagagctgcagggttggccactcggtggggaggagtcagccaggattagagagcctgcccctaatccggcctgctgggttttacaaggatcagagctgctgataatgaacctcattaagggggagcaggagcctcaatccgatttggttttctctttgacatcttcactctgctcagatggcctgggtgctatgtggagcaggtgggatgccaaggccactcctgctatggggcagctggggctggggagggatggcagtctccctgcatgtttccctcgacctctttagctgcagcgccttgctgggctcctgggttggactccctctctgtgcccctgctccaggcacccattggctccatcctcctggttgtgctctgcaccccctgctcccttgggctggccctggctgggggcctgagagacagacaggaacccacaatcaggaggcaaccctggcctgcaagaggaagacagaggctcccagggccggtgccctgtgtgcccactgcaccaaggccgctgaataagcctgcccttcaccccctaagggctccttgcccaatgccaagtgctggggatttctgtcagcaagccctgtggctccagtgacggtatttctaaagccaaacttagttacctagaattagcgccatgttggaaacactgtcgcagcagcccgggctgcacagtgtgtagcccagcctccaggtccacggagtggtgtggacctcccacctcacagctgcctctggcagccaagcctcttttcgcccggccccagcccctctggttgataaacgggtgggcctcctcagcagcgtggctgcctttcaccttgatttccccagggctctcggcaacatcgataaaccagcctcgcccaccagctgggccctcccccacccagtctgccaggctgggagctggagcttgctgagtcttgaatgcccttctagatggcttctctagaggctctcctggcaagagagggtcccaaggggagccctgcaaagcaaaggctccttgtctggggcgggatagagaatctcgcctctgtctggtgtgttacctactgggggcacaggaacaatttcctcaaggagacagtggcatggagctttgaaagacgagtaggtgttagcaaggaaataaggaggaacgggggttacgggcagaggagaaagcacatgccaagtcagcaaagaaaagtagaattcgaaaactttttaaaaatattactaaggattttcacaatgctgcactgggctagaaactgaagctaaaacagatacgtggtccctgctgctatggggcttccgttctagaggcaaggacaggttgtgatgagggttctgaaggatagagaccaagcagggagggtgttgaggaggcttctgcgagacctgaaggatgggaagccaggaagtgggaggggtgggggtccaggctggaggggcccaatgtaggtgtagagggactacagccctgaggggctgctccatgcggcattcttggaggtccaagaggggcagcgccaccttgggccaggctcctctccagcagccttggtatggggtgggggtgggaagacccctgatgcagcctgtcctctgggtgtgggggtggaggagagggctccaggggacccagccagccttgaccctggaggaaagtcaggtgggctcagagagagccctcaaatctgggccctgggtcagggtggggtcaagtccagccttgaagagaatggactctggaatctgacgtctgggtttgaatccagcttccaacactcactggctgtgtgactttgggcaagataacttatcctcttgtccccatgtgtcattggagataaactacccacctaccagattgttgtaccatgctgggcaaacactaagtgcttaataatggtagcccactgctcaaaaaaaaaaaaaaaaaaaaaanaaaaaanaaanaaaaaaanaanaananaanaaacaanaaagaaaaaaaaanaaaaaaaaaaaaggggggg

SEQ ID NO: 307368 - DNA, 2579 bp, Homo sapiens
ggaggcaggcggtgccgcggcgccgggacccgactcatccggtgcttgcgtgtggtggtgagcgcagcgccgaggatgaggaggtgcaacagcggctccgggccgccgccgtcgctgctgctgctgctgctgtggctgctcgcggttcccggcgctaacgcggccccgcggtcggcgctctattcgccttccgacccgctgacgctgctgcaggcggacacggtgcgcggcgcggtgctgggctcccgcagcgcctgggccgtggagttcttcgcctcctggtgcggccactgcatcgccttcgccccgacgtggaaggcgctggccgaagacgtcaaagcctggaggccggccctgtatctcgccgccctggactgtgctgaggagaccaacagtgcagtctgcagagacttcaacatccctggcttcccgactgtgaggttcttcaaggcctttaccaagaacggctcgggagcagtatttccagtggctggtgctgacgtgcagacgctgcgggagaggctcattgacgccctggagtcccatcatgacacgtggcccccagcctgtcccccactggagcctgccaagctggaggagattgatggattctttgcgagaaataacgaagagtacctggctctgatctttgaaaagggaggctcctacctgggtagagaggtggctctggacctgtcccagcacaaaggcgtggcggtgcgcagggtgctgaacacagaggccaatgtggtgagaaagtttggtgtcaccgacttcccctcttgctacctgctgttccggaatggctctgtctcccgagtccccgtgctcatggaatccaggtccttctataccgcttacctgcagagactctctgggctcaccagggaggctgcccagaccacagttgcaccaaccactgctaacaagatagctcccactgtttggaaattggcagatcgctccaagatctacatggctgacctggaatctgcactgcactacatcctgcggatagaagtgggcaggttcccggtcctggaagggcagcgcctggtggccctgaaaaagtttgtggcagtgctggccaagtatttccctggccggcccttagtccagaacttcctgcactccgtgaatgaatggctcaagaggcagaagagaaataaaattccctacagtttctttaaaactgccctggacgacaggaaagagggtgccgttcttgccaagaaggtgaactggattggctgccaggggagtgagccgcatttccggggctttccctgctccctgtgggtcctcttccacttcttgactgtgcaggcagctcggcaaaatgtagaccactcacaggaagcagccaaggccaaggaggtcctcccagccatccgaggctacgtgcactacttcttcggctgccgagactgcgctagccacttcgagcagatggctgctgcctccatgcaccgggtggggagtcccaacgccgctgtcctctggctctggtctagccacaacagggtcaatgctcgccttgcaggtgcccccagcgaggacccccagttccccaaggtgcagtggccaccccgtgaactttgttctgcctgccacaatgaacgcctggatgtgcccgtgtgggacgtggaagccaccctcaacttcctcaaggcccacttctccccaagcaacatcatcctggacttccctgcagctgggtcagctgcccggagggatgtgcagaatgtggcagccgccccagagctggcgatgggagccctggagctggaaagccggaattcaactctggaccctgggaagcctgagatgatgaagtcccccacaaacaccaccccacatgtgccggctgagggacccttatttgaagtcctgcctcattctcactggagcctcagtctctcctgcttggtcttggccctcaactggggcaagtgaagccagaggagggtcccccagctgggtgggctggaatggaactcctcactagctgctggggctccgcccaccctgctcccttccggacaatgaagaagcctttgcaccctgggaggaaggaccaccccgggccctctatgcctggccagcctccagctcctcagacctcctgggtggggtttggcttcagggtggggtttggaagcttctggaagtcgtgctggtctcccaggtgaggcaagccatggttgctgggctgtagggtgagtggcttgcttggtgggacctgacgagttggtggcatgggaaggatgtgggtctctagtgccttgccctggcttagctgcaggagaagatggctgctttcacttccccccattgagctctgctccctctgagcctggtcttttgtccttttttattttggtctccaagatgaatgctcatctttggagggtgccaggtagaagctagggaggggagtgtcttctctctccaggtttcaccttccagtgtgcagaagttagaagggtctggcgggggcagtgccttacacatgcttgattcccacgctaccccctgccttgggaggtgtgtggaataaattatttttgttaaggcaa

SEQ ID NO: 307369 - DNA, 4445 bp, Homo sapiens
  misc_feature (3338)..(3338): n is a, c, g, or t
  misc_feature (3345)..(3345): n is a, c, g, or t
  misc_feature (3349)..(3349): n is a, c, g, or t
ggaggcaggcggtgccgcggcgccgggacccgactcatccggtgcttgcgtgtggtggtgagcgcagcgccgaggatgaggaggtgcaacagcggctccgggccgccgccgtcgctgctgctgctgctgctgtggctgctcgcggttcccggcgctaacgcggccccgcggtcggcgctctattcgccttccgacccgctgacgctgctgcaggcggacacggtgcgcggcgcggtgctgggctcccgcagcgcctgggccgtggagttcttcgcctcctggtgcggccactgcatcgccttcgccccgacgtggaaggcgctggccgaagacgtcaaagcctggaggccggccctgtatctcgccgccctggactgtgctgaggagaccaacagtgcagtctgcagagacttcaacatccctggcttcccgactgtgaggttcttcaaggcctttaccaagaacggctcgggagcagtatttccagtggctggtgctgacgtgcagacgctgcgggagaggctcattgacgccctggagtcccatcatgacacgtggcccccagcctgtcccccactggagcctgccaagctggaggagattgatggattctttgcgagaaataacgaagagtacctggctctgatctttgaaaagggaggctcctacctgggtagagaggtggctctggacctgtcccagcacaaaggcgtggcggtgcgcagggtgctgaacacagaggccaatgtggtgagaaagtttggtgtcaccgacttcccctcttgctacctgctgttccggaatggctctgtctcccgagtccccgtgctcatggaatccaggtccttctataccgcttacctgcagagactctctgggctcaccagggaggctgcccagaccacagttgcaccaaccactgctaacaagatagctcccactgtttggaaattggcagatcgctccaagatctacatggctgacctggaatctgcactgcactacatcctgcggatagaagtgggcaggttcccggtcctggaagggcagcgcctggtggccctgaaaaagtttgtggcagtgctggccaagtatttccctggccggcccttagtccagaacttcctgcactccgtgaatgaatggctcaagaggcagaagagaaataaaattccctacagtttctttaaaactgccctggacgacaggaaagagggtgccgttcttgccaagaaggtgaactggattggctgccaggggagtgagccgcatttccggggctttccctgctccctgtgggtcctcttccacttcttgactgtgcaggcagctcggcaaaatgtagaccactcacaggaagcagccaaggccaaggaggtcctcccagccatccgaggctacgtgcactacttcttcggctgccgagactgcgctagccacttcgagcagatggctgctgcctccatgcaccgggtggggagtcccaacgccgctgtcctctggctctggtctagccacaacagggtcaatgctcgccttgcaggtgcccccagcgaggacccccagttccccaaggtgcagtggccaccccgtgaactttgttctgcctgccacaatgaacgcctggatgtgcccgtgtgggacgtggaagccaccctcaacttcctcaaggcccacttctccccaagcaacatcatcctggacttccctgcagctgggtcagctgcccggagggatgtgcagaatgtggcagccgccccagagctggcgatgggagccctggagctggaaagccggaattcaactctggaccctgggaagcctgagatgatgaagtcccccacaaacaccaccccacatgtgccggctgagggacctgaggcaagtcgacccccgaagctgcaccctggcctcagagctgcaccaggccaggagcctcctgagcacatggcagagcttcagaggaatgagcaggagcagccgcttgggcagtggcacttgagcaagcgagacacaggggctgcattgctggctgagtccagggctgagaagaaccgcctctggggccctttggaggtcaggcgcgtgggccgcagctccaagcagctggtcgacatccctgagggccagctggaggcccgagctggacggggccgaggccagtggctgcaggtgctgggagggggcttctcttacctggacatcagcctctgtgtggggctctattccctgtccttcatgggcctgctggccatgtacacctacttccaggccaagataagggccctgaagggccatgctggccaccctgcagcctgaaccacctggggaggaggcgggagagggagctgccatctctaggcacctcaagccccctgaccccattccctcccctcccaccccttgctccttgtctggcctagaagtgtgggaaattcaggaaaacgagttgctccagtgaagcttcttggggttgctaggacagagagctcctttgacacaaaagacaggagcagggtccaggttcccctgctgtgcagggagggcagccccgggcagtgggcatagggcagctcagtccctggcctcttagcaccacattcctgtttttcagcttatttgaagtcctgcctcattctcactggagcctcagtctctcctgcttggtcttggccctcaactggggcaagtgaagccagaggagggtcccccagctgggtgggctggaatggaactcctcactagctgctggggctccgcccaccctgctcccttccggacaatgaagaagcctttgcaccctgggaggaaggaccaccccgggccctctatgcctggccagcctccagctcctcagacctcctgggtggggtttggcttcagggtggggtttggaagcttctggaagtcgtgctggtctcccaggtgaggcaagccatggttgctgggctgtagggtgagtggcttgcttggtgggacctgacgagttggtggcatgggaaggatgtgggtctctagtgccttgccctggcttagctgcaggagaagatggctgctttcacttccccccattgagctctgctccctctgagcctggtcttttgtccttttttattttggtctccaagatgaatgctcatctttggagggtgccaggtagaagctagggaggggagtgtcttctctctccaggtttcaccttccagtgtgcagaagttagaagggtctggcgggggcagtgccttacacatgcttgattcccacgctaccccctgccttgggaggtgtgtggaataaattatttttgttaaggcaaaaaaaaaaaaaaaaaaaaaaanaaaaaanaaanaaaaaaaaaaaaaaaaatagtaggagtgagcggcgcggcgcacattataattatctcctcccttagagaggcgcccgacaatagctatattcgacgctagctccaccgcatattattgttagacaacaagggggcgcctcctactataggagagcgcgatcatatttatatgacaagtaagcaacgacgggcgcccgtcgattaatacacagagatctgtaatcagtgtggagagacaaagcgggatcaacctagctgtgggcgacaccttctgtgtggagaaaaggaagaaccctctatcctctgctctgtgtgaggagagcgtgaacaatatatgtgtgatgtcaaacaactatctccactgaagagaaaaaatcttaacacgctcctctactacgggaaactatatctatatattacgaatcttattcacaaagagagggtgagaaatcaaacacagcggtgtgatgcatacacacaaaccacaccccagcgcgcagcatgatgtatttatgcgcaccgctgcgcaggagagctatgtgcagacaacagatatctgtgtgctgcaggtgcaatctcaccacctgatgcgacaatattatatgatcatcctttaatacgcagaagcaaaatatattatttgtattaatatcagctcgcgagggcgcgacgcatacacgtgtagatgaatatatacggagagataaactgcatccgcttgactcgctgttgtgtgttggcttgattaggtcgaactaatatggagccatagagacacaaagaccataggacggcgttgaaggaggaatatgagctatactgcgtatgtatccgctgcgtgttcatgatgttcgctgagaagaatgaaaagcgtatcaatatggcatcgtaacagagaacattgtcagggagtgggtgtgtcgggtgactgagaaaaagtaacaaataggtgaaaaaagagaggatgagcatacatacaagttggtgtagatgctgtttagtgaagagtgagagatagaaatataaatatagaagtaagataaataaatagtaaagagtatcataactgaagagtgcagatgaacggagtgcgtgg

SEQ ID NO: 307370 - DNA, 3782 bp, Homo sapiens
ggaggcaggcggtgccgcggcgccgggacccgactcatccggtgcttgcgtgtggtggtgagcgcagcgccgaggatgaggaggtgcaacagcggctccgggccgccgccgtcgctgctgctgctgctgctgtggctgctcgcggttcccggcgctaacgcggccccgcggtcggcgctctattcgccttccgacccgctgacgctgctgcaggcggacacggtgcgcggcgcggtgctgggctcccgcagcgcctgggccgtggagttcttcgcctcctggtgcggccactgcatcgccttcgccccgacgtggaaggcgctggccgaagacgtcaaagcctggaggccggccctgtatctcgccgccctggactgtgctgaggagaccaacagtgcagtctgcagagacttcaacatccctggcttcccgactgtgaggttcttcaaggcctttaccaagaacggctcgggagcagtatttccagtggctggtgctgacgtgcagacgctgcgggagaggctcattgacgccctggagtcccatcatgacacgtggcccccagcctgtcccccactggagcctgccaagctggaggagattgatggattctttgcgagaaataacgaagagtacctggctctgatctttgaaaagggaggctcctacctgggtagagaggtggctctggacctgtcccagcacaaaggcgtggcggtgcgcagggtgctgaacacagaggccaatgtggtgagaaagtttggtgtcaccgacttcccctcttgctacctgctgttccggaatggctctgtctcccgagtccccgtgctcatggaatccaggtccttctataccgcttacctgcagagactctctgggctcaccagggaggctgcccagaccacagttgcaccaaccactgctaacaagatagctcccactgtttggaaattggcagatcgctccaagatctacatggctgacctggaatctgcactgcactacatcctgcggatagaagtgggcaggttcccggtcctggaagggcagcgcctggtggccctgaaaaagtttgtggcagtgctggccaagtatttccctggccggcccttagtccagaacttcctgcactccgtgaatgaatggctcaagaggcagaagagaaataaaattccctacagtttctttaaaactgccctggacgacaggaaagagggtgccgttcttgccaagaaggtgaactggattggctgccaggggagtgagccgcatttccggggctttccctgctccctgtgggtcctcttccacttcttgactgtgcaggcagctcggcaaaatgtagaccactcacaggaagcagccaaggccaaggaggtcctcccagccatccgaggctacgtgcactacttcttcggctgccgagactgcgctagccacttcgagcagatggctgctgcctccatgcaccgggtggggagtcccaacgccgctgtcctctggctctggtctagccacaacagggtcaatgctcgccttgcaggtgcccccagcgaggacccccagttccccaaggtgcagtggccaccccgtgaactttgttctgcctgccacaatgaacgcctggatgtgcccgtgtgggacgtggaagccaccctcaacttcctcaaggcccacttctccccaagcaacatcatcctggacttccctgcagctgggtcagctgcccggagggatgtgcagaatgtggcagccgccccagagctggcgatgggagccctggagctggaaagccggaattcaactctggaccctgggaagcctgagatgatgaagtcccccacaaacaccaccccacatgtgccggctgagggacctgaggcaagtcgacccccgaagctgcaccctggcctcagagctgcaccaggccaggagcctcctgagcacatggcagagcttcagaggaatgagcaggagcagccgcttgggcagtggcacttgagcaagcgagacacaggggctgcattgctggctgagtccagggctgagaagaaccgcctctggggccctttggaggtcaggcgcgtgggccgcagctccaagcagctggtcgacatccctgagggccagctggaggcccgagctggacggggccgaggccagtggctgcaggtgctgggagggggcttctcttacctggacatcagcctctgtgtggggctctattccctgtccttcatgggcctgctggccatgtacacctacttccaggccaagataagggccctgaagggccatgctggccaccctgcagcctgaaccacctggggaggaggcgggagagggagctgccatctctaggcacctcaagccccctgaccccattccctcccctcccaccccttgctccttgtctggcctagaagtgtgggaaattcaggaaaacgagttgctccagtgaagcttcttggggttgctaggacagagagctcctttgacacaaaagacaggagcagggtccaggttcccctgctgtgcagggagggcagccccgggcagtgggcatagggcagctcagtccctggcctcttagcaccacattcctgtttttcagcttatttgaagtcctgcctcattctcactggagcctcagtctctcctgcttggtcttggccctcaactggggcaagtgaagccagaggagggtcccccagctgggtgggctggaatggaactcctcactagctgctggggctccgcccaccctgctcccttccggacaatgaagaagcctttgcaccctgggaggaaggaccaccccgggccctctatgcctggccagcctccagctcctcagacctcctgggtggggtttggcttcagggtggggtttggaagcttctggaagtcgtgctggtctcccaggtgaggcaagccatggttgctgggctgtagggtgagtggcttgcttggtgggacctgacgagttggtggcatgggaaggatgtgggtctctagtgccttgccctggcttagctgcaggagaagatggctgctttcacttccccccattgagctctgctccctctgagcctggtcttttgtccttttttattttggtctccaagatgaatgctcatctttggagggtgccaggtagaagctagggaggggagtgtcttctctctccaggtttcaccttccagtgtgcagaagttagaagggtctggcgggggcagtgccttacacatgcttgattcccacgctaccccctgccttgggaggtgtgtggaataaattatttttgttaaggcaaaggcaagcattggtgtgttctttaacttgctacttggagacctagtgtccagtctggacagaatgcacagagaccagcctcacctggaatgacgttcagctcggtacccctcctcagcagacgcagctcctggccacagactgcccatagaactgtctgcacccaaaccccatggccttttcatgcacggagacaggcctctggatgtgcagccttgccaccccctgccccaatcctccctgagagctcctgcctcagtgccctgggctggtgagggagaagcctgtctgcacctgcctaattccagctcctccaggaagcaagggcttgtttgtcagagctgcagggttggccactcggtggggaggagtcagccaggattagagagcctgcccctaatccggcctgctgggttttacaaggatcagagctgcgtctgctgaggaggggatccgctagatcacct

SEQ ID NO: 307371 - DNA, 5436 bp, Homo sapiens
ggaggcaggcggtgccgcggcgccgggacccgactcatccggtgcttgcgtgtggtggtgagcgcagcgccgaggatgaggaggtgcaacagcggctccgggccgccgccgtcgctgctgctgctgctgctgtggctgctcgcggttcccggcgctaacgcggccccgcggtcggcgctctattcgccttccgacccgctgacgctgctgcaggcggacacggtgcgcggcgcggtgctgggctcccgcagcgcctgggccgtggagttcttcgcctcctggtgcggccactgcatcgccttcgccccgacgtggaaggcgctggccgaagacgtcaaagcctggaggccggccctgtatctcgccgccctggactgtgctgaggagaccaacagtgcagtctgcagagacttcaacatccctggcttcccgactgtgaggttcttcaaggcctttaccaagaacggctcgggagcagtatttccagtggctggtgctgacgtgcagacgctgcgggagaggctcattgacgccctggagtcccatcatgacacgtggcccccagcctgtcccccactggagcctgccaagctggaggagattgatggattctttgcgagaaataacgaagagtacctggctctgatctttgaaaagggaggctcctacctgggtagagaggtggctctggacctgtcccagcacaaaggcgtggcggtgcgcagggtgctgaacacagaggccaatgtggtgagaaagtttggtgtcaccgacttcccctcttgctacctgctgttccggaatggctctgtctcccgagtccccgtgctcatggaatccaggtccttctataccgcttacctgcagagactctctgggctcaccagggaggctgcccagaccacagttgcaccaaccactgctaacaagatagctcccactgtttggaaattggcagatcgctccaagatctacatggctgacctggaatctgcactgcactacatcctgcggatagaagtgggcaggttcccggtcctggaagggcagcgcctggtggccctgaaaaagtttgtggcagtgctggccaagtatttccctggccggcccttagtccagaacttcctgcactccgtgaatgaatggctcaagaggcagaagagaaataaaattccctacagtttctttaaaactgccctggacgacaggaaagagggtgccgttcttgccaagaaggtgaactggattggctgccaggggagtgagccgcatttccggggctttccctgctccctgtgggtcctcttccacttcttgactgtgcaggcagctcggcaaaatgtagaccactcacaggaagcagccaaggccaaggaggtcctcccagccatccgaggctacgtgcactacttcttcggctgccgagactgcgctagccacttcgagcagatggctgctgcctccatgcaccgggtggggagtcccaacgccgctgtcctctggctctggtctagccacaacagggtcaatgctcgccttgcaggtgcccccagcgaggacccccagttccccaaggtgcagtggccaccccgtgaactttgttctgcctgccacaatgaacgcctggatgtgcccgtgtgggacgtggaagccaccctcaacttcctcaaggcccacttctccccaagcaacatcatcctggacttccctgcagctgggtcagctgcccggagggatgtgcagaatgtggcagccgccccagagctggcgatgggagccctggagctggaaagccggaattcaactctggaccctgggaagcctgagatgatgaagtcccccacaaacaccaccccacatgtgccggctgagggacctgaggcaagtcgacccccgaagctgcaccctggcctcagagctgcaccaggccaggagcctcctgagcacatggcagagcttcagaggaatgagcaggagcagccgcttgggcagtggcacttgagcaagcgagacacaggggctgcattgctggctgagtccagggctgagaagaaccgcctctggggccctttggaggtcaggcgcgtgggccgcagctccaagcagctggtcgacatccctgagggccagctggaggcccgagctggacggggccgaggccagtggctgcaggtgctgggagggggcttctcttacctggacatcagcctctgtgtggggctctattccctgtccttcatgggcctgctggccatgtacacctacttccaggccaagataagggccctgaagggccatgctggccaccctgcagcctgaaccacctggggaggaggcgggagagggagctgccatctctaggcacctcaagccccctgaccccattccctcccctcccaccccttgctccttgtctggcctagaagtgtgggaaattcaggaaaacgagttgctccagtgaagcttcttggggttgctaggacagagagctcctttgacacaaaagacaggagcagggtccaggttcccctgctgtgcagggagggcagccccgggcagtgggcatagggcagctcagtccctggcctcttagcaccacattcctgtttttcagcttatttgaagtcctgcctcattctcactggagcctcagtctctcctgcttggtcttggccctcaactggggcaagtgaagccagaggagggtcccccagctgggtgggctggaatggaactcctcactagctgctggggctccgcccaccctgctcccttccggacaatgaagaagcctttgcaccctgggaggaaggaccaccccgggccctctatgcctggccagcctccagctcctcagacctcctgggtggggtttggcttcagggtggggtttggaagcttctggaagtcgtgctggtctcccaggtgaggcaagccatggttgctgggctgtagggtgagtggcttgcttggtgggacctgacgagttggtggcatgggaaggatgtgggtctctagtgccttgccctggcttagctgcaggagaagatggctgctttcacttccccccattgagctctgctccctctgagcctggtcttttgtccttttttattttggtctccaagatgaatgctcatctttggagggtgccaggtagaagctagggaggggagtgtcttctctctccaggtttcaccttccagtgtgcagaagttagaagggtctggcgggggcagtgccttacacatgcttgattcccacgctaccccctgccttgggaggtgtgtggaataaattatttttgttaaggcaaaggcaagcattggtgtgttctttaacttgctacttggagacctagtgtccagtctggacagaatgcacagagaccagcctcacctggaatgacgttcagctcggtacccctcctcagcagacgcagctcctggccacagactgcccatagaactgtctgcacccaaaccccatggccttttcatgcacggagacaggcctctggatgtgcagccttgccaccccctgccccaatcctccctgagagctcctgcctcagtgccctgggctggtgagggagaagcctgtctgcacctgcctaattccagctcctccaggaagcaagggcttgtttgtcagagctgcagggttggccactcggtggggaggagtcagccaggattagagagcctgcccctaatccggcctgctgggttttacaaggatcagagctgctgataatgaacctcattaagggggagcaggagcctcaatccgatttggttttctctttgacatcttcactctgctcagatggcctgggtgctatgtggagcaggtgggatgccaaggccactcctgctatggggcagctggggctggggagggatggcagtctccctgcatgtttccctcgacctctttagctgcagcgccttgctgggctcctgggttggactccctctctgtgcccctgctccaggcacccattggctccatcctcctggttgtgctctgcaccccctgctcccttgggctggccctggctgggggcctgagagacagacaggaacccacaatcaggaggcaaccctggcctgcaagaggaagacagaggctcccagggccggtgccctgtgtgcccactgcaccaaggccgctgaataagcctgcccttcaccccctaagggctccttgcccaatgccaagtgctggggatttctgtcagcaagccctgtggctccagtgacggtatttctaaagccaaacttagttacctagaattagcgccatgttggaaacactgtcgcagcagcccgggctgcacagtgtgtagcccagcctccaggtccacggagtggtgtggacctcccacctcacagctgcctctggcagccaagcctcttttcgcccggccccagcccctctggttgataaacgggtgggcctcctcagcagcgtggctgcctttcaccttgatttccccagggctctcggcaacatcgataaaccagcctcgcccaccagctgggccctcccccacccagtctgccaggctgggagctggagcttgctgagtcttgaatgcccttctagatggcttctctagaggctctcctggcaagagagggtcccaaggggagccctgcaaagcaaaggctccttgtctggggcgggatagagaatctcgcctctgtctggtgtgttacctactgggggcacagcctggaggaaagtcaggtgggctcagagagagccctcaaatctgggccctgggtcagggtggggtcaagtccagccttgaagagaatggactctggaatctgacgtctgggtttgaatccagcttccaacactcactggctgtgtgactttgggcaagataacttatcctcttgtccccatgtgtcattggagataaactacccacctaccagattgttgtaccatgctgggcaaacactaagtgcttaataatggtagcccactgctcatgtcgtgtcgtctcctgtcttgatacctgaaaactcaaggggccctgttgtgcttggaggggggtgccgttcccacaggatattctgtgaagggtgtccctggagctgggcctccaggtggcaagccccaagccaccccggcaggtgccactggccagagttgaactgaggtgttgagtggaaagtgcctccccacccccatctgccacagtagtatggatttccttcatgagatggggctcctaaaatgcctgaaatgtgtatgctgttggagaattgatgtgtatgatttattgaactttgcactcatttaaatctcatttaatcctccaacaacgcaagatgaagaagctgaggcttaaagagattaagaaacatcctatcccctttactcccaccaaaataaatacatttgccctattctccc

SEQ ID NO: 307372 - DNA, 5227 bp, Homo sapiens
ggaggcaggcggtgccgcggcgccgggacccgactcatccggtgcttgcgtgtggtggtgagcgcagcgccgaggatgaggaggtgcaacagcggctccgggccgccgccgtcgctgctgctgctgctgctgtggctgctcgcggttcccggcgctaacgcggccccgcggtcggcgctctattcgccttccgacccgctgacgctgctgcaggcggacacggtgcgcggcgcggtgctgggctcccgcagcgcctgggccgtggagttcttcgcctcctggtgcggccactgcatcgccttcgccccgacgtggaaggcgctggccgaagacgtcaaagcctggaggccggccctgtatctcgccgccctggactgtgctgaggagaccaacagtgcagtctgcagagacttcaacatccctggcttcccgactgtgaggttcttcaaggcctttaccaagaacggctcgggagcagtatttccagtggctggtgctgacgtgcagacgctgcgggagaggctcattgacgccctggagtcccatcatgacacgtggcccccagcctgtcccccactggagcctgccaagctggaggagattgatggattctttgcgagaaataacgaagagtacctggctctgatctttgaaaagggaggctcctacctgggtagagaggtggctctggacctgtcccagcacaaaggcgtggcggtgcgcagggtgctgaacacagaggccaatgtggtgagaaagtttggtgtcaccgacttcccctcttgctacctgctgttccggaatggctctgtctcccgagtccccgtgctcatggaatccaggtccttctataccgcttacctgcagagactctctgggctcaccagggaggctgcccagaccacagttgcaccaaccactgctaacaagatagctcccactgtttggaaattggcagatcgctccaagatctacatggctgacctggaatctgcactgcactacatcctgcggatagaagtgggcaggttcccggtcctggaagggcagcgcctggtggccctgaaaaagtttgtggcagtgctggccaagtatttccctggccggcccttagtccagaacttcctgcactccgtgaatgaatggctcaagaggcagaagagaaataaaattccctacagtttctttaaaactgccctggacgacaggaaagagggtgccgttcttgccaagaaggtgaactggattggctgccaggggagtgagccgcatttccggggctttccctgctccctgtgggtcctcttccacttcttgactgtgcaggcagctcggcaaaatgtagaccactcacaggaagcagccaaggccaaggaggtcctcccagccatccgaggctacgtgcactacttcttcggctgccgagactgcgctagccacttcgagcagatggctgctgcctccatgcaccgggtggggagtcccaacgccgctgtcctctggctctggtctagccacaacagggtcaatgctcgccttgcaggtgcccccagcgaggacccccagttccccaaggtgcagtggccaccccgtgaactttgttctgcctgccacaatgaacgcctggatgtgcccgtgtgggacgtggaagccaccctcaacttcctcaaggcccacttctccccaagcaacatcatcctggacttccctgcagctgggtcagctgcccggagggatgtgcagaatgtggcagccgccccagagctggcgatgggagccctggagctggaaagccggaattcaactctggaccctgggaagcctgagatgatgaagtcccccacaaacaccaccccacatgtgccggctgagggacctgaggcaagtcgacccccgaagctgcaccctggcctcagagctgcaccaggccaggagcctcctgagcacatggcagagcttcagaggaatgagcaggagcagccgcttgggcagtggcacttgagcaagcgagacacaggggctgcattgctggctgagtccagggctgagaagaaccgcctctggggccctttggaggtcaggcgcgtgggccgcagctccaagcagctggtcgacatccctgagggccagctggaggcccgagctggacggggccgaggccagtggctgcaggtgctgggagggggcttctcttacctggacatcagcctctgtgtggggctctattccctgtccttcatgggcctgctggccatgtacacctacttccaggccaagataagggccctgaagggccatgctggccaccctgcagcctgaaccacctggggaggaggcgggagagggagctgccatctctaggcacctcaagccccctgaccccattccctcccctcccaccccttgctccttgtctggcctagaagtgtgggaaattcaggaaaacgagttgctccagtgaagcttcttggggttgctaggacagagagctcctttgacacaaaagacaggagcagggtccaggttcccctgctgtgcagggagggcagccccgggcagtgggcatagggcagctcagtccctggcctcttagcaccacattcctgtttttcagcttatttgaagtcctgcctcattctcactggagcctcagtctctcctgcttggtcttggccctcaactggggcaagtgaagccagaggagggtcccccagctgggtgggctggaatggaactcctcactagctgctggggctccgcccaccctgctcccttccggacaatgaagaagcctttgcaccctgggaggaaggaccaccccgggccctctatgcctggccagcctccagctcctcagacctcctgggtggggtttggcttcagggtggggtttggaagcttctggaagtcgtgctggtctcccaggtgaggcaagccatggttgctgggctgtagggtgagtggcttgcttggtgggacctgacgagttggtggcatgggaaggatgtgggtctctagtgccttgccctggcttagctgcaggagaagatggctgctttcacttccccccattgagctctgctccctctgagcctggtcttttgtccttttttattttggtctccaagatgaatgctcatctttggagggtgccaggtagaagctagggaggggagtgtcttctctctccaggtttcaccttccagtgtgcagaagttagaagggtctggcgggggcagtgccttacacatgcttgattcccacgctaccccctgccttgggaggtgtgtggaataaattatttttgttaaggcaaaggcaagcattggtgtgttctttaacttgctacttggagacctagtgtccagtctggacagaatgcacagagaccagcctcacctggaatgacgttcagctcggtacccctcctcagcagacgcagctcctggccacagactgcccatagaactgtctgcacccaaaccccatggccttttcatgcacggagacaggcctctggatgtgcagccttgccaccccctgccccaatcctccctgagagctcctgcctcagtgccctgggctggtgagggagaagcctgtctgcacctgcctaattccagctcctccaggaagcaagggcttgtttgtcagagctgcagggttggccactcggtggggaggagtcagccaggattagagagcctgcccctaatccggcctgctgggttttacaaggatcagagctgctgataatgaacctcattaagggggagcaggagcctcaatccgatttggttttctctttgacatcttcactctgctcagatggcctgggtgctatgtggagcaggtgggatgccaaggccactcctgctatggggcagctggggctggggagggatggcagtctccctgcatgtttccctcgacctctttagctgcagcgccttgctgggctcctgggttggactccctctctgtgcccctgctccaggcacccattggctccatcctcctggttgtgctctgcaccccctgctcccttgggctggccctggctgggggcctgagagacagacaggaacccacaatcaggaggcaaccctggcctgcaagaggaagacagaggctcccagggccggtgccctgtgtgcccactgcaccaaggccgctgaataagcctgcccttcaccccctaagggctccttgcccaatgccaagtgctggggatttctgtcagcaagccctgtggctccagtgacggtatttctaaagccaaacttagttacctagaattagcgccatgttggaaacactgtcgcagcagcccgggctgcacagtgtgtagcccagcctccaggtccacggagtggtgtggacctcccacctcacagctgcctctggcagccaagcctcttttcgcccggccccagcccctctggttgataaacgggtgggcctcctcagcagcgtggctgcctttcaccttgatttccccagggctctcggcaacatcgataaaccagccctggaggaaagtcaggtgggctcagagagagccctcaaatctgggccctgggtcagggtggggtcaagtccagccttgaagagaatggactctggaatctgacgtctgggtttgaatccagcttccaacactcactggctgtgtgactttgggcaagataacttatcctcttgtccccatgtgtcattggagataaactacccacctaccagattgttgtaccatgctgggcaaacactaagtgcttaataatggtagcccactgctcatgtcgtgtcgtctcctgtcttgatacctgaaaactcaaggggccctgttgtgcttggaggggggtgccgttcccacaggatattctgtgaagggtgtccctggagctgggcctccaggtggcaagccccaagccaccccggcaggtgccactggccagagttgaactgaggtgttgagtggaaagtgcctccccacccccatctgccacagtagtatggatttccttcatgagatggggctcctaaaatgcctgaaatgtgtatgctgttggagaattgatgtgtatgatttattgaactttgcactcatttaaatctcatttaatcctccaacaacgcaagatgaagaagctgaggcttaaagagattaagaaacatcctatcccctttactcccaccaaaataaatacatttgccctattctccc

SEQ ID NO: 307373 - DNA, 3334 bp, Homo sapiens
ggaggcaggcggtgccgcggcgccgggacccgactcatccggtgcttgcgtgtggtggtgagcgcagcgccgaggatgaggaggtgcaacagcggctccgggccgccgccgtcgctgctgctgctgctgctgtggctgctcgcggttcccggcgctaacgcggccccgcggtcggcgctctattcgccttccgacccgctgacgctgctgcaggcggacacggtgcgcggcgcggtgctgggctcccgcagcgcctgggccgtggagttcttcgcctcctggtgcggccactgcatcgccttcgccccgacgtggaaggcgctggccgaagacgtcaaagcctggaggccggccctgtatctcgccgccctggactgtgctgaggagaccaacagtgcagtctgcagagacttcaacatccctggcttcccgactgtgaggttcttcaaggcctttaccaagaacggctcgggagcagtatttccagtggctggtgctgacgtgcagacgctgcgggagaggctcattgacgccctggagtcccatcatgacacgtggcccccagcctgtcccccactggagcctgccaagctggaggagattgatggattctttgcgagaaataacgaagagtacctggctctgatctttgaaaagggaggctcctacctgggtagagaggtggctctggacctgtcccagcacaaaggcgtggcggtgcgcagggtgctgaacacagaggccaatgtggtgagaaagtttggtgtcaccgacttcccctcttgctacctgctgttccggaatggctctgtctcccgagtccccgtgctcatggaatccaggtccttctataccgcttacctgcagagactctctgggctcaccagggaggctgcccagaccacagttgcaccaaccactgctaacaagatagctcccactgtttggaaattggcagatcgctccaagatctacatggctgacctggaatctgcactgcactacatcctgcggatagaagtgggcaggttcccggtcctggaagggcagcgcctggtggccctgaaaaagtttgtggcagtgctggccaagtatttccctggccggcccttagtccagaacttcctgcactccgtgaatgaatggctcaagaggcagaagagaaataaaattccctacagtttctttaaaactgccctggacgacaggaaagagggtgccgttcttgccaagaaggtgaactggattggctgccaggggagtgagccgcatttccggggctttccctgctccctgtgggtcctcttccacttcttgactgtgcaggcagctcggcaaaatgtagaccactcacaggaagcagccaaggccaaggaggtcctcccagccatccgaggctacgtgcactacttcttcggctgccgagactgcgctagccacttcgagcagatggctgctgcctccatgcaccgggtggggagtcccaacgccgctgtcctctggctctggtcctttgccacttgcggtttgctgctcgccttctgtctagtgtccgaccgtgcaggccctccagcttgcgcacgtgtgccgtggtcttaccacagctgtcacgaactttgttctgcctgccacaatgaacgcctggatgtgcccgtgtgggacgtggaagccaccctcaacttcctcaaggcccacttctccccaagcaacatcatcctggacttccctgcagctgggtcagctgcccggagggatgtgcagaatgtggcagccgccccagagctggcgatgggagccctggagctggaaagccggaattcaactctggaccctgggaagcctgagatgatgaagtcccccacaaacaccaccccacatgtgccggctgagggacctgaggcaagtcgacccccgaagctgcaccctggcctcagagctgcaccaggccaggagcctcctgagcacatggcagagcttcagaggaatgagcaggagcagccgcttgggcagtggcacttgagcaagcgagacacaggggctgcattgctggctgagtccagggctgagaagaaccgcctctggggccctttggaggtcaggcgcgtgggccgcagctccaagcagctggtcgacatccctgagggccagctggaggcccgagctggacggggccgaggccagtggctgcaggtgctgggagggggcttctcttacctggacatcagcctctgtgtggggctctattccctgtccttcatgggcctgctggccatgtacacctacttccaggccaagataagggccctgaagggccatgctggccaccctgcagcctgaaccacctggggaggaggcgggagagggagctgccatctctaggcacctcaagccccctgaccccattccctcccctcccaccccttgctccttgtctggcctagaagtgtgggaaattcaggaaaacgagttgctccagtgaagcttcttggggttgctaggacagagagctcctttgacacaaaagacaggagcagggtccaggttcccctgctgtgcagggagggcagccccgggcagtgggcatagggcagctcagtccctggcctcttagcaccacattcctgtttttcagcttatttgaagtcctgcctcattctcactggagcctcagtctctcctgcttggtcttggccctcaactggggcaagtgaagccagaggagggtcccccagctgggtgggctggaatggaactcctcactagctgctggggctccgcccaccctgctcccttccggacaatgaagaagcctttgcaccctgggaggaaggaccaccccgggccctctatgcctggccagcctccagctcctcagacctcctgggtggggtttggcttcagggtggggtttggaagcttctggaagtcgtgctggtctcccaggtgaggcaagccatggttgctgggctgtagggtgagtggcttgcttggtgggacctgacgagttggtggcatgggaaggatgtgggtctctagtgccttgccctggcttagctgcaggagaagatggctgctttcacttccccccattgagctctgctccctctgagcctggtcttttgtccttttttattttggtctccaagatgaatgctcatctttggagggtgccaggtagaagctagggaggggagtgtcttctctctccaggtttcaccttccagtgtgcagaagttagaagggtctggcgggggcagtgccttacacatgcttgattcccacgctaccccctgccttgggaggtgtgtggaataaattatttttgttaaggcaa

SEQ ID NO: 307374 - DNA, 3155 bp, Homo sapiens
caatgcggagagactgaggctcagtgagaatgaggcaggattcaaataagctgaaaaacaggaatgtggtgctaagaggccaggactgagctgccctatgcccactgcccggggctgccctccctgcacagcaggggaacctggaccctgctcctgtcttttgtgtcaaaggagctctctgtcctagcaaccccaagaagcttcagttgggggacaggctgaggagaccaacagtgcagtctgcagagacttcaacatccctggcttcccgactgtgaggttcttcaaggcctttaccaagaacggctcgggagcagtatttccagtggctggtgctgacgtgcagacgctgcgggagaggctcattgacgccctggagtcccatcatgacacgtggcccccagcctgtcccccactggagcctgccaagctggaggagattgatggattctttgcgagaaataacgaagagtacctggctctgatctttgaaaagggaggctcctacctgggtagagaggtggctctggacctgtcccagcacaaaggcgtggcggtgcgcagggtgctgaacacagaggccaatgtggtgagaaagtttggtgtcaccgacttcccctcttgctacctgctgttccggaatggctctgtctcccgagtccccgtgctcatggaatccaggtccttctataccgcttacctgcagagactctctgggctcaccagggaggctgcccagaccacagttgcaccaaccactgctaacaagatagctcccactgtttggaaattggcagatcgctccaagatctacatggctgacctggaatctgcactgcactacatcctgcggatagaagtgggcaggttcccggtcctggaagggcagcgcctggtggccctgaaaaagtttgtggcagtgctggccaagtatttccctggccggcccttagtccagaacttcctgcactccgtgaatgaatggctcaagaggcagaagagaaataaaattccctacagtttctttaaaactgccctggacgacaggaaagagggtgccgttcttgccaagaaggtgaactggattggctgccaggggagtgagccgcatttccggggctttccctgctccctgtgggtcctcttccacttcttgactgtgcaggcagctcggcaaaatgtagaccactcacaggaagcagccaaggccaaggaggtcctcccagccatccgaggctacgtgcactacttcttcggctgccgagactgcgctagccacttcgagcagatggctgctgcctccatgcaccgggtggggagtcccaacgccgctgtcctctggctctggtctagccacaacagggtcaatgctcgccttgcaggtgcccccagcgaggacccccagttccccaaggtgcagtggccaccccgtgaactttgttctgcctgccacaatgaacgcctggatgtgcccgtgtgggacgtggaagccaccctcaacttcctcaaggcccacttctccccaagcaacatcatcctggacttccctgcagctgggtcagctgcccggagggatgtgcagaatgtggcagccgccccagagctggcgatgggagccctggagctggaaagccggaattcaactctggaccctgggaagcctgagatgatgaagtcccccacaaacaccaccccacatgtgccggctgagggacctgaggcaagtcgacccccgaagctgcaccctggcctcagagctgcaccaggccaggagcctcctgagcacatggcagagcttcagaggaatgagcaggagcagccgcttgggcagtggcacttgagcaagcgagacacaggggctgcattgctggctgagtccagggctgagaagaaccgcctctggggccctttggaggtcaggcgcgtgggccgcagctccaagcagctggtcgacatccctgagggccagctggaggcccgagctggacggggccgaggccagtggctgcaggtgctgggagggggcttctcttacctggacatcagcctctgtgtggggctctattccctgtccttcatgggcctgctggccatgtacacctacttccaggccaagataagggccctgaagggccatgctggccaccctgcagcctgaaccacctggggaggaggcgggagagggagctgccatctctaggcacctcaagccccctgaccccattccctcccctcccaccccttgctccttgtctggcctagaagtgtgggaaattcaggaaaacgagttgctccagtgaagcttcttggggttgctaggacagagagctcctttgacacaaaagacaggagcagggtccaggttcccctgctgtgcagggagggcagccccgggcagtgggcatagggcagctcagtccctggcctcttagcaccacattcctgtttttcagcttatttgaagtcctgcctcattctcactggagcctcagtctctcctgcttggtcttggccctcaactggggcaagtgaagccagaggagggtcccccagctgggtgggctggaatggaactcctcactagctgctggggctccgcccaccctgctcccttccggacaatgaagaagcctttgcaccctgggaggaaggaccaccccgggccctctatgcctggccagcctccagctcctcagacctcctgggtggggtttggcttcagggtggggtttggaagcttctggaagtcgtgctggtctcccaggtgaggcaagccatggttgctgggctgtagggtgagtggcttgcttggtgggacctgacgagttggtggcatgggaaggatgtgggtctctagtgccttgccctggcttagctgcaggagaagatggctgctttcacttccccccattgagctctgctccctctgagcctggtcttttgtccttttttattttggtctccaagatgaatgctcatctttggagggtgccaggtagaagctagggaggggagtgtcttctctctccaggtttcaccttccagtgtgcagaagttagaagggtctggcgggggcagtgccttacacatgcttgattcccacgctaccccctgccttgggaggtgtgtggaataaattatttttgttaaggcaa

SEQ ID NO: 307375 - DNA, 3164 bp, Homo sapiens
  misc_feature (59)..(59): n is a, c, g, or t
  misc_feature (114)..(115): n is a, c, g, or t
tgctgaggtacttaagatcccggaggcaggtctcgtaaatgtaacatcacaggaagcangcaagcagaggtcctccagcccatcgaggctacgtgcactacttcttcggctgcnnagatgcgctagcacttcgagcagatgctgctgcctccatgcaccgggtggggagtcccaacgccgctgtcctctggctctggtctagccacaacagggtcaatgctcgccttgcaggtgcccccagcgaggacccccagttccccaaggtgcagtggccaccccgtgaactttgttcttcaaggcctttaccaagaacggctcgggagcagtatttccagtggctggtgctgacgtgcagacgctgcgggagaggctcattgacgccctggagtcccatcatgacacgtggcccccagcctgtcccccactggagcctgccaagctggaggagattgatggattctttgcgagaaataacgaagagtacctggctctgatctttgaaaagggaggctcctacctgggtagagaggtggctctggacctgtcccagcacaaaggcgtggcggtgcgcagggtgctgaacacagaggccaatgtggtgagaaagtttggtgtcaccgacttcccctcttgctacctgctgttccggaatggctctgtctcccgagtccccgtgctcatggaatccaggtccttctataccgcttacctgcagagactctctgggctcaccagggaggctgcccagaccacagttgcaccaaccactgctaacaagatagctcccactgtttggaaattggcagatcgctccaagatctacatggctgacctggaatctgcactgcactacatcctgcggatagaagtgggcaggttcccggtcctggaagggcagcgcctggtggccctgaaaaagtttgtggcagtgctggccaagtatttccctggccggcccttagtccagaacttcctgcactccgtgaatgaatggctcaagaggcagaagagaaataaaattccctacagtttctttaaaactgccctggacgacaggaaagagggtgccgttcttgccaagaaggtgaactggattggctgccaggggagtgagccgcatttccggggctttccctgctccctgtgggtcctcttccacttcttgactgtgcaggcagctcggcaaaatgtagaccactcacaggaagcagccaaggccaaggaggtcctcccagccatccgaggctacgtgcactacttcttcggctgccgagactgcgctagccacttcgagcagatggctgctgcctccatgcaccgggtggggagtcccaacgccgctgtcctctggctctggtctagccacaacagggtcaatgctcgccttgcaggtgcccccagcgaggacccccagttccccaaggtgcagtggccaccccgtgaactttgttctgcctgccacaatgaacgcctggatgtgcccgtgtgggacgtggaagccaccctcaacttcctcaaggcccacttctccccaagcaacatcatcctggacttccctgcagctgggtcagctgcccggagggatgtgcagaatgtggcagccgccccagagctggcgatgggagccctggagctggaaagccggaattcaactctggaccctgggaagcctgagatgatgaagtcccccacaaacaccaccccacatgtgccggctgagggacctgaggcaagtcgacccccgaagctgcaccctggcctcagagctgcaccaggccaggagcctcctgagcacatggcagagcttcagaggaatgagcaggagcagccgcttgggcagtggcacttgagcaagcgagacacaggggctgcattgctggctgagtccagggctgagaagaaccgcctctggggccctttggaggtcaggcgcgtgggccgcagctccaagcagctggtcgacatccctgagggccagctggaggcccgagctggacggggccgaggccagtggctgcaggtgctgggagggggcttctcttacctggacatcagcctctgtgtggggctctattccctgtccttcatgggcctgctggccatgtacacctacttccaggccaagataagggccctgaagggccatgctggccaccctgcagcctgaaccacctggggaggaggcgggagagggagctgccatctctaggcacctcaagccccctgaccccattccctcccctcccaccccttgctccttgtctggcctagaagtgtgggaaattcaggaaaacgagttgctccagtgaagcttcttggggttgctaggacagagagctcctttgacacaaaagacaggagcagggtccaggttcccctgctgtgcagggagggcagccccgggcagtgggcatagggcagctcagtccctggcctcttagcaccacattcctgtttttcagcttatttgaagtcctgcctcattctcactggagcctcagtctctcctgcttggtcttggccctcaactggggcaagtgaagccagaggagggtcccccagctgggtgggctggaatggaactcctcactagctgctggggctccgcccaccctgctcccttccggacaatgaagaagcctttgcaccctgggaggaaggaccaccccgggccctctatgcctggccagcctccagctcctcagacctcctgggtggggtttggcttcagggtggggtttggaagcttctggaagtcgtgctggtctcccaggtgaggcaagccatggttgctgggctgtagggtgagtggcttgcttggtgggacctgacgagttggtggcatgggaaggatgtgggtctctagtgccttgccctggcttagctgcaggagaagatggctgctttcacttccccccattgagctctgctccctctgagcctggtcttttgtccttttttattttggtctccaagatgaatgctcatctttggagggtgccaggtagaagctagggaggggagtgtcttctctctccaggtttcaccttccagtgtgcagaagttagaagggtctggcgggggcagtgccttacacatgcttgattcccacgctaccccctgccttgggaggtgtgtggaataaattatttttgttaaggcaa

SEQ ID NO: 307376 - DNA, 3213 bp, Homo sapiens
ggaggcaggcggtgccgcggcgccgggacccgactcatccggtgcttgcgtgtggtggtgagcgcagcgccgaggatgaggaggtgcaacagcggctccgggccgccgccgtcgctgctgctgctgctgctgtggctgctcgcggttcccggcgctaacgcggccccgcggtcggcgctctattcgccttccgacccgctgacgctgctgcaggcggacacggtgcgcggcgcggtgctgggctcccgcagcgcctgggccgtggagttcttcgcctcctggtgcggccactgcatcgccttcgccccgacgtggaaggcgctggccgaagacgtcaaagcctggaggccggccctgtatctcgccgccctggactgtgctgaggagaccaacagtgcagtctgcagagacttcaacatccctggcttcccgactgtgaggttcttcaaggcctttaccaagaacggctcgggagcagtatttccaggctggaggagattgatggattctttgcgagaaataacgaagagtacctggctctgatctttgaaaagggaggctcctacctgggtagagaggtggctctggacctgtcccagcacaaaggcgtggcggtgcgcagggtgctgaacacagaggccaatgtggtgagaaagtttggtgtcaccgacttcccctcttgctacctgctgttccggaatggctctgtctcccgagtccccgtgctcatggaatccaggtccttctataccgcttacctgcagagactctctgggctcaccagggaggctgcccagaccacagttgcaccaaccactgctaacaagatagctcccactgtttggaaattggcagatcgctccaagatctacatggctgacctggaatctgcactgcactacatcctgcggatagaagtgggcaggttcccggtcctggaagggcagcgcctggtggccctgaaaaagtttgtggcagtgctggccaagtatttccctggccggcccttagtccagaacttcctgcactccgtgaatgaatggctcaagaggcagaagagaaataaaattccctacagtttctttaaaactgccctggacgacaggaaagagggtgccgttcttgccaagaaggtgaactggattggctgccaggggagtgagccgcatttccggggctttccctgctccctgtgggtcctcttccacttcttgactgtgcaggcagctcggcaaaatgtagaccactcacaggaagcagccaaggccaaggaggtcctcccagccatccgaggctacgtgcactacttcttcggctgccgagactgcgctagccacttcgagcagatggctgctgcctccatgcaccgggtggggagtcccaacgccgctgtcctctggctctggtctagccacaacagggtcaatgctcgccttgcaggtgcccccagcgaggacccccagttccccaaggtgcagtggccaccccgtgaactttgttctgcctgccacaatgaacgcctggatgtgcccgtgtgggacgtggaagccaccctcaacttcctcaaggcccacttctccccaagcaacatcatcctggacttccctgcagctgggtcagctgcccggagggatgtgcagaatgtggcagccgccccagagctggcgatgggagccctggagctggaaagccggaattcaactctggaccctgggaagcctgagatgatgaagtcccccacaaacaccaccccacatgtgccggctgagggacctgaggcaagtcgacccccgaagctgcaccctggcctcagagctgcaccaggccaggagcctcctgagcacatggcagagcttcagaggaatgagcaggagcagccgcttgggcagtggcacttgagcaagcgagacacaggggctgcattgctggctgagtccagggctgagaagaaccgcctctggggccctttggaggtcaggcgcgtgggccgcagctccaagcagctggtcgacatccctgagggccagctggaggcccgagctggacggggccgaggccagtggctgcaggtgctgggagggggcttctcttacctggacatcagcctctgtgtggggctctattccctgtccttcatgggcctgctggccatgtacacctacttccaggccaagataagggccctgaagggccatgctggccaccctgcagcctgaaccacctggggaggaggcgggagagggagctgccatctctaggcacctcaagccccctgaccccattccctcccctcccaccccttgctccttgtctggcctagaagtgtgggaaattcaggaaaacgagttgctccagtgaagcttcttggggttgctaggacagagagctcctttgacacaaaagacaggagcagggtccaggttcccctgctgtgcagggagggcagccccgggcagtgggcatagggcagctcagtccctggcctcttagcaccacattcctgtttttcagcttatttgaagtcctgcctcattctcactggagcctcagtctctcctgcttggtcttggccctcaactggggcaagtgaagccagaggagggtcccccagctgggtgggctggaatggaactcctcactagctgctggggctccgcccaccctgctcccttccggacaatgaagaagcctttgcaccctgggaggaaggaccaccccgggccctctatgcctggccagcctccagctcctcagacctcctgggtggggtttggcttcagggtggggtttggaagcttctggaagtcgtgctggtctcccaggtgaggcaagccatggttgctgggctgtagggtgagtggcttgcttggtgggacctgacgagttggtggcatgggaaggatgtgggtctctagtgccttgccctggcttagctgcaggagaagatggctgctttcacttccccccattgagctctgctccctctgagcctggtcttttgtccttttttattttggtctccaagatgaatgctcatctttggagggtgccaggtagaagctagggaggggagtgtcttctctctccaggtttcaccttccagtgtgcagaagttagaagggtctggcgggggcagtgccttacacatgcttgattcccacgctaccccctgccttgggaggtgtgtggaataaattatttttgttaaggcaa

SEQ ID NO: 307377 - DNA, 3690 bp, Homo sapiens
ggaggcaggcggtgccgcggcgccgggacccgactcatccggtgcttgcgtgtggtggtgagcgcagcgccgaggatgaggaggtgcaacagcggctccgggccgccgccgtcgctgctgctgctgctgctgtggctgctcgcggttcccggcgctaacgcggccccgcggtcggcgctctattcgccttccgacccgctgacgctgctgcaggcggacacggtgcgcggcgcggtgctgggctcccgcagcgcctgggccgtggagttcttcgcctcctggtgcggccactgcatcgccttcgccccgacgtggaaggcgctggccgaagacgtcaaagcctggaggccggccctgtatctcgccgccctggactgtgctgaggagaccaacagtgcagtctgcagagacttcaacatccctggcttcccgactgtgaggttcttcaaggcctttaccaagaacggctcgggagcagtatttccagtggctggtgctgacgtgcagacgctgcgggagaggctcattgacgccctggagtcccatcatgacacgtggcccccagcctgtcccccactggagcctgccaagctggaggagattgatggattctttgcgagaaataacgaagagtacctggctctgatctttgaaaagggaggctcctacctgggtagagaggtggctctggacctgtcccagcacaaaggcgtggcggtgcgcagggtgctgaacacagaggccaatgtggtgagaaagtttggtgtcaccgacttcccctcttgctacctgctgttccggaatggctctgtctcccgagtccccgtgctcatggaatccaggtccttctataccgcttacctgcagagactctctgggctcaccagggaggctgcccagaccacagttgcaccaaccactgctaacaagatagctcccactgtttggaaattggcagatcgctccaagatctacatggctgacctggaatctgcactgcactacatcctgcggatagaagtgggcaggttcccggtcctggaagggcagcgcctggtggccctgaaaaagtttgtggcagtgctggccaagtatttccctggccggcccttagtccagaacttcctgcactccgtgaatgaatggctcaagaggcagaagagaaataaaattccctacagtttctttaaaactgccctggacgacaggaaagagggtgccgttcttgccaagaaggtgaactggattggctgccaggggagtgagccgcatttccggggctttccctgctccctgtgggtcctcttccacttcttgactgtgcaggcagctcggcaaaatgtagaccactcacaggaagcagccaaggccaaggaggtcctcccagccatccgaggctacgtgcactacttcttcggctgccgagactgcgctagccacttcgagcagatggctgctgcctccatgcaccgggtggggagtcccaacgccgctgtcctctggctctggtctagccacaacagggtcaatgctcgccttgcaggtgcccccagcgaggacccccagttccccaaggtgcagtggccaccccgtgaactttgttctgcctgccacaatgaacgcctggatgtgcccgtgtgggacgtggaagccaccctcaacttcctcaaggcccacttctccccaagcaacatcatcctggacttccctgcagctgggtcagctgcccggagggatgtgcagaatgtggcagccgccccagagctggcgatgggagccctggagctggaaagccggaattcaactctggaccctgggaagcctgagatgatgaagtcccccacaaacaccaccccacatgtgccggctgagggacctgaggcaagtcgacccccgaagctgcaccctggcctcagagctgcaccaggccaggagcctcctgagcacatggcagagcttcagaggaatgagcaggagcagccgcttgggcagtggcacttgagcaagcgagacacaggggctgcattgctggctgagtccagggctgagaagaaccgcctctggggccctttggaggtcaggcgcgtgggccgcagctccaagcagctggtcgacatccctgagggccagctggaggcccgagctggacggggccgaggccagtggctgcaggtgctgggagggggcttctcttacctggacatcagcctctgtgtggggctctattccctgtccttcatgggcctgctggccatgtacacctacttccaggccaagataagggccctgaagggccatgctggccaccctgcagcctgaaccacctggggaggaggcgggagagggagctgccatctctaggcacctcaagccccctgaccccattccctcccctcccaccccttgctccttgtctggcctagaagtgtgggaaattcaggaaaacgagttgctccagtgaagcttcttggggttgctaggacagagagctcctttgacacaaaagacaggagcagggtccaggttcccctgctgtgcagggagggcagccccgggcagtgggcatagggcagctcagtccctggcctcttagcaccacattcctgtttttcagcttatttgaagtcctgcctcattctcactggagcctcagtctctcctgcttggtcttggccctcaactggggcaagtgaagccagaggagggtcccccagctgggtgggctggaatggaactcctcactagctgctggggctccgcccaccctgctcccttccggacaatgaagaagcctttgcaccctgggaggaaggaccaccccgggccctctatgcctggccagcctccagctcctcagacctcctgggtggggtttggcttcagggtggggtttggaagcttctggaagtcgtgctggtctcccaggtgaggcaagccatggttgctgggctgtagggtgagtggcttgcttggtgggacctgacgagttggtggcatgggaaggatgtgggtctctagtgccttgccctggcttagctgcaggagaagatggctgctttcacttccccccattgagctctgctccctctgagcctggtcttttgtccttttttattttggtctccaagatgaatgctcatctttggagggtgccaggtagaagctagggaggggagtgtcttctctctccaggtttcaccttccagtgtgcagaagttagaagggtctggcgggggcagtgccttacacatgcttgattcccacgctaccccctgccttgggaggtgtgtggaataaattatttttgttaaggcaaaggcaagcattggtgtgttctttaacttgctacttggagacctagtgtccagtctggacagaatgcacagagaccagcctcacctggaatgacgttcagctcggtacccctcctcagcagacgcagctcctggccacagactgcccatagaactgtctgcacccaaaccccatggccttttcatgcacggagacaggcctctggatgtgcagccttgccaccccctgccccaatcctccctgagagctcctgcctcagtgccctgggctggtgagggagaagcctgtctgcacctgcctaattccagctcctccaggaagcaagggcttgtttgtcagagctgcgtctgctgaggaggggtacgagctgaacgc

SEQ ID NO: 307378 - DNA, 3414 bp, Homo sapiens
ggaggcaggcggtgccgcggcgccgggacccgactcatccggtgcttgcgtgtggtggtgagcgcagcgccgaggatgaggaggtgcaacagcggctccgggccgccgccgtcgctgctgctgctgctgctgtggctgctcgcggttcccggcgctaacgcggccccgcggtcggcgctctattcgccttccgacccgctgacgctgctgcaggcggacacggtgcgcggcgcggtgctgggctcccgcagcgcctgggccgtggagttcttcgcctcctggtgcggccactgcatcgccttcgccccgacgtggaaggcgctggccgaagacgtcaaagcctggaggccggccctgtatctcgccgccctggactgtgctgaggagaccaacagtgcagtctgcagagacttcaacatccctggcttcccgactgtgaggttcttcaaggcctttaccaagaacggctcgggagcagtatttccagtggctggtgctgacgtgcagacgctgcgggagaggctcattgacgccctggagtcccatcatgacacgtggcccccagcctgtcccccactggagcctgccaagctggaggagattgatggattctttgcgagaaataacgaagagtacctggctctgatctttgaaaagggaggctcctacctgggtagagaggtggctctggacctgtcccagcacaaaggcgtggcggtgcgcagggtgctgaacacagaggccaatgtggtgagaaagtttggtgtcaccgacttcccctcttgctacctgctgttccggaatggctctgtctcccgagtccccgtgctcatggaatccaggtccttctataccgcttacctgcagagactctctgggctcaccagggaggctgcccagaccacagttgcaccaaccactgctaacaagatagctcccactgtttggaaattggcagatcgctccaagatctacatggctgacctggaatctgcactgcactacatcctgcggatagaagtgggcaggttcccggtcctggaagggcagcgcctggtggccctgaaaaagtttgtggcagtgctggccaagtatttccctggccggcccttagtccagaacttcctgcactccgtgaatgaatggctcaagaggcagaagagaaataaaattccctacagtttctttaaaactgccctggacgacaggaaagagggtgccgttcttgccaagaaggtgaactggattggctgccaggggagtgagccgcatttccggggctttccctgctccctgtgggtcctcttccacttcttgactgtgcaggcagctcggcaaaatgtagaccactcacaggaagcagccaaggccaaggaggtcctcccagccatccgaggctacgtgcactacttcttcggctgccgagactgcgctagccacttcgagcagatggctgctgcctccatgcaccgggtggggagtcccaacgccgctgtcctctggctctggtctagccacaacagggtcaatgctcgccttgcaggtgcccccagcgaggacccccagttccccaaggtgcagtggccaccccgtgaactttgttctgcctgccacaatgaacgcctggatgtgcccgtgtgggacgtggaagccaccctcaacttcctcaaggcccacttctccccaagcaacatcatcctggacttccctgcagctgggtcagctgcccggagggatgtgcagaatgtggcagccgccccagagctggcgatgggagccctggagctggaaagccggaattcaactctggaccctgggaagcctgagatgatgaagtcccccacaaacaccaccccacatgtgccggctgagggacctgaggcaagtcgacccccgaagctgcaccctggcctcagagctgcaccaggccaggagcctcctgagcacatggcagagcttcagaggaatgagcaggagcagccgcttgggcagtggcacttgagcaagcgagacacaggggctgcattgctggctgagtccagggctgagaagaaccgcctctggggccctttggaggtcaggcgcgtgggccgcagctccaagcagctggtcgacatccctgagggccagctggaggcccgagctggacggggccgaggccagtggctgcaggtgctgggagggggcttctcttacctggacatcagcctctgtgtggggctctattccctgtccttcatgggcctgctggccatgtacacctacttccaggccaagataagggccctgaagggccatgctggccaccctgcagcctgaaccacctggggaggaggcgggagagggagctgccatctctaggcacctcaagccccctgaccccattccctcccctcccaccccttgctccttgtctggcctagaagtgtgggaaattcaggaaaacgagttgctccagtgaagcttcttggggttgctaggacagagagctcctttgacacaaaagacaggagcagggtccaggttcccctgctgtgcagggagggcagccccgggcagtgggcatagggcagctcagtccctggcctcttagcaccacattcctgtttttcagcttatttgaagtcctgcctcattctcactggagcctcagtctctcctgcttggtcttggccctcaactggggcaagtgaagccagaggagggtcccccagctgggtgggctggaatggaactcctcactagctgctggggctccgcccaccctgctcccttccggacaatgaagaagcctttgcaccctgggaggaaggaccaccccgggccctctatgcctggccagcctccagctcctcagacctcctgggtggggtttggcttcagggtggggtttggaagcttctggaagtcgtgctggtctcccaggtgaggcaagccatggttgctgggctgtagggtgagtggcttgcttggtgggacctgacgagttggtggcatgggaaggatgtgggtctctagtgccttgccctggcttagctgcaggagaagatggctgctttcacttccccccattgagctctgctccctctgagcctggtcttttgtccttttttattttggtctccaagatgaatgctcatctttggagggtgccaggtagaagctagggaggggagtgtcttctctctccaggtttcaccttccagtgtgcagaagttagaagggtctggcgggggcagtgccttacacatgcttgattcccacgctaccccctgccttgggaggtgtgtggaataaattatttttgttaaggcaaattctgggcaagattaatgcttcttggcctagggatatcggtttgtttaacttctggttggtgtcaatgtccttctggtgccccctatggtcttggag

SEQ ID NO: 307379 - DNA, 3346 bp, Homo sapiens
ggaggcaggcggtgccgcggcgccgggacccgactcatccggtgcttgcgtgtggtggtgagcgcagcgccgaggatgaggaggtgcaacagcggctccgggccgccgccgtcgctgctgctgctgctgctgtggctgctcgcggttcccggcgctaacgcggccccgcggtcggcgctctattcgccttccgacccgctgacgctgctgcaggcggacacggtgcgcggcgcggtgctgggctcccgcagcgcctgggccgtggagttcttcgcctcctggtgcggccactgcatcgccttcgccccgacgtggaaggcgctggccgaagacgtcaaagcctggaggccggccctgtatctcgccgccctggactgtgctgaggagaccaacagtgcagtctgcagagacttcaacatccctggcttcccgactgtgaggttcttcaaggcctttaccaagaacggctcgggagcagtatttccagtggctggtgctgacgtgcagacgctgcgggagaggctcattgacgccctggagtcccatcatgacacgtggcccccagcctgtcccccactggagcctgccaagctggaggagattgatggattctttgcgagaaataacgaagagtacctggctctgatctttgaaaagggaggctcctacctgggtagagaggtggctctggacctgtcccagcacaaaggcgtggcggtgcgcagggtgctgaacacagaggccaatgtggtgagaaagtttggtgtcaccgacttcccctcttgctacctgctgttccggaatggctctgtctcccgagtccccgtgctcatggaatccaggtccttctataccgcttacctgcagagactctctgggctcaccagggaggctgcccagaccacagttgcaccaaccactgctaacaagatagctcccactgtttggaaattggcagatcgctccaagatctacatggctgacctggaatctgcactgcactacatcctgcggatagaagtgggcaggttcccggtcctggaagggcagcgcctggtggccctgaaaaagtttgtggcagtgctggccaagtatttccctggccggcccttagtccagaacttcctgcactccgtgaatgaatggctcaagaggcagaagagaaataaaattccctacagtttctttaaaactgccctggacgacaggaaagagggtgccgttcttgccaagaaggtgaactggattggctgccaggggagtgagccgcatttccggggctttccctgctccctgtgggtcctcttccacttcttgactgtgcaggcagctcggcaaaatgtagaccactcacaggaagcagccaaggccaaggaggtcctcccagccatccgaggctacgtgcactacttcttcggctgccgagactgcgctagccacttcgagcagatggctgctgcctccatgcaccgggtggggagtcccaacgccgctgtcctctggctctggtctagccacaacagggtcaatgctcgccttgcaggtgcccccagcgaggacccccagttccccaaggtgcagtggccaccccgtgaactttgttctgcctgccacaatgaacgcctggatgtgcccgtgtgggacgtggaagccaccctcaacttcctcaaggcccacttctccccaagcaacatcatcctggacttccctgcagctgggtcagctgcccggagggatgtgcagaatgtggcagccgccccagagctggcgatgggagccctggagctggaaagccggaattcaactctggaccctgggaagcctgagatgatgaagtcccccacaaacaccaccccacatgtgccggctgagggacctgaggcaagtcgacccccgaagctgcaccctggcctcagagctgcaccaggccaggagcctcctgagcacatggcagagcttcagaggaatgagcaggagcagccgcttgggcagtggcacttgagcaagcgagacacaggggctgcattgctggctgagtccagggctgagaagaaccgcctctggggccctttggaggtcaggcgcgtgggccgcagctccaagcagctggtcgacatccctgagggccagctggaggcccgagctggacggggccgaggccagtggctgcaggtgctgggagggggcttctcttacctggacatcagcctctgtgtggggctctattccctgtccttcatgggcctgctggccatgtacacctacttccaggccaagataagggccctgaagggccatgctggccaccctgcagcctgaaccacctggggaggaggcgggagagggagctgccatctctaggcacctcaagccccctgaccccattccctcccctcccaccccttgctccttgtctggcctagaagtgtgggaaattcaggaaaacgagttgctccagtgaagcttcttggggttgctaggacagagagctcctttgacacaaaagacaggagcagggtccaggttcccctgctgtgcagggagggcagccccgggcagtgggcatagggcagctcagtccctggcctcttagcaccacattcctgtttttcagcttatttgaagtcctgcctcattctcactggagcctcagtctctcctgcttggtcttggccctcaactggggcaagtgaagccagaggagggtcccccagctgggtgggctggaatggaactcctcactagctgctggggctccgcccaccctgctcccttccggacaatgaagaagcctttgcaccctgggaggaaggaccaccccgggccctctatgcctggccagcctccagctcctcagacctcctgggtggggtttggcttcagggtggggtttggaagcttctggaagtcgtgctggtctcccaggtgaggcaagccatggttgctgggctgtagggtgagtggcttgcttggtgggacctgacgagttggtggcatgggaaggatgtgggtctctagtgccttgccctggcttagctgcaggagaagatggctgctttcacttccccccattgagctctgctccctctgagcctggtcttttgtccttttttattttggtctccaagatgaatgctcatctttggagggtgccaggtagaagctagggaggggagtgtcttctctctccaggtttcaccttccagtgtgcagaagttagaagggtctggcgggggcagtgccttacacatgcttgattcccacgctaccccctgccttgggaggtgtgtggaataaattatttttgttaaggcaaaagcactcccccgccacaaccggaccgcca

SEQ ID NO: 307380 - DNA, 3368 bp, Homo sapiens
  misc_feature (3317)..(3317): n is a, c, g, or t
  misc_feature (3320)..(3320): n is a, c, g, or t
  misc_feature (3323)..(3323): n is a, c, g, or t
  misc_feature (3325)..(3325): n is a, c, g, or t
  misc_feature (3328)..(3328): n is a, c, g, or t
  misc_feature (3335)..(3335): n is a, c, g, or t
  misc_feature (3349)..(3349): n is a, c, g, or t
ggaggcaggcggtgccgcggcgccgggacccgactcatccggtgcttgcgtgtggtggtgagcgcagcgccgaggatgaggaggtgcaacagcggctccgggccgccgccgtcgctgctgctgctgctgctgtggctgctcgcggttcccggcgctaacgcggccccgcggtcggcgctctattcgccttccgacccgctgacgctgctgcaggcggacacggtgcgcggcgcggtgctgggctcccgcagcgcctgggccgtggagttcttcgcctcctggtgcggccactgcatcgccttcgccccgacgtggaaggcgctggccgaagacgtcaaagcctggaggccggccctgtatctcgccgccctggactgtgctgaggagaccaacagtgcagtctgcagagacttcaacatccctggcttcccgactgtgaggttcttcaaggcctttaccaagaacggctcgggagcagtatttccagtggctggtgctgacgtgcagacgctgcgggagaggctcattgacgccctggagtcccatcatgacacgtggcccccagcctgtcccccactggagcctgccaagctggaggagattgatggattctttgcgagaaataacgaagagtacctggctctgatctttgaaaagggaggctcctacctgggtagagaggtggctctggacctgtcccagcacaaaggcgtggcggtgcgcagggtgctgaacacagaggccaatgtggtgagaaagtttggtgtcaccgacttcccctcttgctacctgctgttccggaatggctctgtctcccgagtccccgtgctcatggaatccaggtccttctataccgcttacctgcagagactctctgggctcaccagggaggctgcccagaccacagttgcaccaaccactgctaacaagatagctcccactgtttggaaattggcagatcgctccaagatctacatggctgacctggaatctgcactgcactacatcctgcggatagaagtgggcaggttcccggtcctggaagggcagcgcctggtggccctgaaaaagtttgtggcagtgctggccaagtatttccctggccggcccttagtccagaacttcctgcactccgtgaatgaatggctcaagaggcagaagagaaataaaattccctacagtttctttaaaactgccctggacgacaggaaagagggtgccgttcttgccaagaaggtgaactggattggctgccaggggagtgagccgcatttccggggctttccctgctccctgtgggtcctcttccacttcttgactgtgcaggcagctcggcaaaatgtagaccactcacaggaagcagccaaggccaaggaggtcctcccagccatccgaggctacgtgcactacttcttcggctgccgagactgcgctagccacttcgagcagatggctgctgcctccatgcaccgggtggggagtcccaacgccgctgtcctctggctctggtctagccacaacagggtcaatgctcgccttgcaggtgcccccagcgaggacccccagttccccaaggtgcagtggccaccccgtgaactttgttctgcctgccacaatgaacgcctggatgtgcccgtgtgggacgtggaagccaccctcaacttcctcaaggcccacttctccccaagcaacatcatcctggacttccctgcagctgggtcagctgcccggagggatgtgcagaatgtggcagccgccccagagctggcgatgggagccctggagctggaaagccggaattcaactctggaccctgggaagcctgagatgatgaagtcccccacaaacaccaccccacatgtgccggctgagggacctgaggcaagtcgacccccgaagctgcaccctggcctcagagctgcaccaggccaggagcctcctgagcacatggcagagcttcagaggaatgagcaggagcagccgcttgggcagtggcacttgagcaagcgagacacaggggctgcattgctggctgagtccagggctgagaagaaccgcctctggggccctttggaggtcaggcgcgtgggccgcagctccaagcagctggtcgacatccctgagggccagctggaggcccgagctggacggggccgaggccagtggctgcaggtgctgggagggggcttctcttacctggacatcagcctctgtgtggggctctattccctgtccttcatgggcctgctggccatgtacacctacttccaggccaagataagggccctgaagggccatgctggccaccctgcagcctgaaccacctggggaggaggcgggagagggagctgccatctctaggcacctcaagccccctgaccccattccctcccctcccaccccttgctccttgtctggcctagaagtgtgggaaattcaggaaaacgagttgctccagtgaagcttcttggggttgctaggacagagagctcctttgacacaaaagacaggagcagggtccaggttcccctgctgtgcagggagggcagccccgggcagtgggcatagggcagctcagtccctggcctcttagcaccacattcctgtttttcagcttatttgaagtcctgcctcattctcactggagcctcagtctctcctgcttggtcttggccctcaactggggcaagtgaagccagaggagggtcccccagctgggtgggctggaatggaactcctcactagctgctggggctccgcccaccctgctcccttccggacaatgaagaagcctttgcaccctgggaggaaggaccaccccgggccctctatgcctggccagcctccagctcctcagacctcctgggtggggtttggcttcagggtggggtttggaagcttctggaagtcgtgctggtctcccaggtgaggcaagccatggttgctgggctgtagggtgagtggcttgcttggtgggacctgacgagttggtggcatgggaaggatgtgggtctctagtgccttgccctggcttagctgcaggagaagatggctgctttcacttccccccattgagctctgctccctctgagcctggtcttttgtccttttttattttggtctccaagatgaatgctcatctttggagggtgccaggtagaagctagggaggggagtgtcttctctctccaggtttcaccttccagtgtgcagaagttagaagggtctggcgggggcagtgccttacacatgcttgattcccacgctaccccctgccttgggaggtgtgtggaataaattatttttgttaaggcaanaanaananaanaaacaanaaagaaaaaaaaanaaaaaaaaaaaaggggggg

SEQ ID NO: 307381 - DNA, 2319 bp, Homo sapiens
ggaggcaggcggtgccgcggcgccgggacccgactcatccggtgcttgcgtgtggtggtgagcgcagcgccgaggatgaggaggtgcaacagcggctccgggccgccgccgtcgctgctgctgctgctgctgtggctgctcgcggttcccggcgctaacgcggccccgcggtcggcgctctattcgccttccgacccgctgacgctgctgcaggcggacacggtgcgcggcgcggtgctgggctcccgcagcgcctgggccgtggagttcttcgcctcctggtgcggccactgcatcgccttcgccccgacgtggaaggcgctggccgaagacgtcaaagcctggaggccggccctgtatctcgccgccctggactgtgctgaggagaccaacagtgcagtctgcagagacttcaacatccctggcttcccgactgtgaggttcttcaaggcctttaccaagaacggctcgggagcagtatttccagtggctggtgctgacgtgcagacgctgcgggagaggctcattgacgccctggagtcccatcatgacacgtggcccccagcctgtcccccactggagcctgccaagctggaggagattgatggattctttgcgagaaataacgaagagtacctggctctgatctttgaaaagggaggctcctacctgggtagagaggtggctctggacctgtcccagcacaaaggcgtggcggtgcgcagggtgctgaacacagaggccaatgtggtgagaaagtttggtgtcaccgacttcccctcttgctacctgctgttccggaatggctctgtctcccgagtccccgtgctcatggaatccaggtccttctataccgcttacctgcagagactctctgggctcaccagggaggctgcccagaccacagttgcaccaaccactgctaacaagatagctcccactgtttggaaattggcagatcgctccaagatctacatggctgacctggaatctgcactgcactacatcctgcggatagaagtgggcaggttcccggtcctggaagggcagcgcctggtggccctgaaaaagtttgtggcagtgctggccaagtatttccctggccggcccttagtccagaacttcctgcactccgtgaatgaatggctcaagaggcagaagagaaataaaattccctacagtttctttaaaactgccctggacgacaggaaagagggtgccgttcttgccaagaaggtgaactggattggctgccaggggagtgagccgcatttccggggctttccctgctccctgtgggtcctcttccacttcttgactgtgcaggcagctcggcaaaatgtagaccactcacaggaagcagccaaggccaaggaggtcctcccagccatccgaggctacgtgcactacttcttcggctgccgagactgcgctagccacttcgagcagatggctgctgcctccatgcaccgggtggggagtcccaacgccgctgtcctctggctctggtctagccacaacagggtcaatgctcgccttgcaggtgcccccagcgaggacccccagttccccaaggtgcagtggccaccccgtgaactttgttctgcctgccacaatgaacgcctggatgtgcccgtgtgggacgtggaagccaccctcaacttcctcaaggcccacttctccccaagcaacatcatcctggacttccctgcagctgggtcagctgcccggagggatgtgcagaatgtggcagccgccccagagctggcgatgggagccctggagctggaaagccggaattcaactctggaccctgggaagcctgagatgatgaagtcccccacaaacaccaccccacatgtgccggctgagggacctggcttcagggtggggtttggaagcttctggaagtcgtgctggtctcccaggtgaggcaagccatggttgctgggctgtagggtgagtggcttgcttggtgggacctgacgagttggtggcatgggaaggatgtgggtctctagtgccttgccctggcttagctgcaggagaagatggctgctttcacttccccccattgagctctgctccctctgagcctggtcttttgtccttttttattttggtctccaagatgaatgctcatctttggagggtgccaggtagaagctagggaggggagtgtcttctctctccaggtttcaccttccagtgtgcagaagttagaagggtctggcgggggcagtgccttacacatgcttgattcccacgctaccccctgccttgggaggtgtgtggaataaattatttttgttaaggcaa

SEQ ID NO: 307382 - DNA, 3657 bp, Homo sapiens
ggaggcaggcggtgccgcggcgccgggacccgactcatccggtgcttgcgtgtggtggtgagcgcagcgccgaggatgaggaggtgcaacagcggctccgggccgccgccgtcgctgctgctgctgctgctgtggctgctcgcggttcccggcgctaacgcggccccgcggtcggcgctctattcgccttccgacccgctgacgctgctgcaggcggacacggtgcgcggcgcggtgctgggctcccgcagcgcctgggccgtggagttcttcgcctcctggtgcggccactgcatcgccttcgccccgacgtggaaggcgctggccgaagacgtcaaagcctggaggccggccctgtatctcgccgccctggactgtgctgaggagaccaacagtgcagtctgcagagacttcaacatccctggcttcccgactgtgaggttcttcaaggcctttaccaagaacggctcgggagcagtatttccagtggctggtgctgacgtgcagacgctgcgggagaggctcattgacgccctggagtcccatcatgacacgtggcccccagcctgtcccccactggagcctgccaagctggaggagattgatggattctttgcgagaaataacgaagagtacctggctctgatctttgaaaagggaggctcctacctgggtagagaggtggctctggacctgtcccagcacaaaggcgtggcggtgcgcagggtgctgaacacagaggccaatgtggtgagaaagtttggtgtcaccgacttcccctcttgctacctgctgttccggaatggctctgtctcccgagtccccgtgctcatggaatccaggtccttctataccgcttacctgcagagactctctgggctcaccagggaggctgcccagaccacagttgcaccaaccactgctaacaagatagctcccactgtttggaaattggcagatcgctccaagatctacatggctgacctggaatctgcactgcactacatcctgcggatagaagtgggcaggttcccggtcctggaagggcagcgcctggtggccctgaaaaagtttgtggcagtgctggccaagtatttccctggccggcccttagtccagaacttcctgcactccgtgaatgaatggctcaagaggcagaagagaaataaaattccctacagtttctttaaaactgccctggacgacaggaaagagggtgccgttcttgccaagaaggtgaactggattggctgccaggggagtgagccgcatttccggggctttccctgctccctgtgggtcctcttccacttcttgactgtgcaggcagctcggcaaaatgtagaccactcacaggaagcagccaaggccaaggaggtcctcccagccatccgaggctacgtgcactacttcttcggctgccgagactgcgctagccacttcgagcagatggctgctgcctccatgcaccgggtggggagtcccaacgccgctgtcctctggctctggtctagccacaacagggtcaatgctcgccttgcaggtgcccccagcgaggacccccagttccccaaggtgcagtggccaccccgtgaactttgttctgcctgccacaatgaacgcctggatgtgcccgtgtgggacgtggaagccaccctcaacttcctcaaggcccacttctccccaagcaacatcatcctggacttccctgcagctgggtcagctgcccggagggatgtgcagaatgtggcagccgccccagagctggcgatgggagccctggagctggaaagccggaattcaactctggaccctgggaagcctgagatgatgaagtcccccacaaacaccaccccacatgtgccggctgagggacctgaggcaagtcgacccccgaagctgcaccctggcctcagagctgcaccaggccaggagcctcctgagcacatggcagagcttcagaggaatgagcaggagcagccgcttgggcagtggcacttgagcaagcgagacacaggggctgcattgctggctgagtccagggctgagaagaaccgcctctggggccctttggaggtcaggcgcgtgggccgcagctccaagcagctggtcgacatccctgagggccagctggaggcccgagctggacggggccgaggccagtggctgcaggtgctgggagggggcttctcttacctggacatcagcctctgtgtggggctctattccctgtccttcatgggcctgctggccatgtacacctacttccaggccaagataagggccctgaagggccatgctggccaccctgcagcctgaaccacctggggaggaggcgggagagggagctgccatctctaggcacctcaagccccctgaccccattccctcccctcccaccccttgctccttgtctggcctagaagtgtgggaaattcaggaaaacgagttgctccagtgaagcttcttggggttgctaggacagagagctcctttgacacaaaagacaggagcagggtccaggttcccctgctgtgcagggagggcagccccgggcagtgggcatagggcagctcagtccctggcctcttagcaccacattcctgtttttcagcttatttgaagtcctgcctcattctcactggagcctcagtctctcctgcttggtcttggccctcaactggggcaagtgaagccagaggagggtcccccagctgggtgggctggaatggaactcctcactagctgctggggctccgcccaccctgctcccttccggacaatgaagaagcctttgcaccctgggaggaaggaccaccccgggccctctatgcctggccagcctccagctcctcagacctcctgggtggggttgtgggggtgggaagacccctgatgcagcctgtcctctgggtgtgggggtggaggagagggctccaggggacccagccagccttgaccctggaggaaagtcaggtgggctcagagagagccctcaaatctgggccctgggtcagggtggggtcaagtccagccttgaagagaatggactctggaatctgacgtctgggtttgaatccagcttccaacactcactggctgtgtgactttgggcaagataacttatcctcttgtccccatgtgtcattggagataaactacccacctaccagattgttgtaccatgctgggcaaacactaagtgcttaataatggtagcccactgctcatgtcgtgtcgtctcctgtcttgatacctgaaaactcaaggggccctgttgtgcttggaggggggtgccgttcccacaggatattctgtgaagggtgtccctggagctgggcctccaggtggcaagccccaagccaccccggcaggtgccactggccagagttgaactgaggtgttgagtggaaagtgcctccccacccccatctgccacagtagtatggatttccttcatgagatggggctcctaaaatgcctgaaatgtgtatgctgttggagaattgatgtgtatgatttattgaactttgcactcatttaaatctcatttaatcctccaacaacgcaagatgaagaagctgaggcttaaagagattaagaaacatcctatcccctttactcccaccaaaataaatacatttgccctattctccc

SEQ ID NO: 307383 - DNA, 2982 bp, Homo sapiens
ggaggcaggcggtgccgcggcgccgggacccgactcatccggtgcttgcgtgtggtggtgagcgcagcgccgaggatgaggaggtgcaacagcggctccgggccgccgccgtcgctgctgctgctgctgctgtggctgctcgcggttcccggcgctaacgcggccccgcggtcggcgctctattcgccttccgacccgctgacgctgctgcaggcggacacggtgcgcggcgcggtgctgggctcccgcagcgcctgggccgtggagttcttcgcctcctggtgcggccactgcatcgccttcgccccgacgtggaaggcgctggccgaagacgtcaaagcctggaggccggccctgtatctcgccgccctggactgtgctgaggagaccaacagtgcagtctgcagagacttcaacatccctggcttcccgactgtgaggttcttcaaggcctttaccaagaacggctcgggagcagtatttccagtggctggtgctgacgtgcagacgctgcgggagaggctcattgacgccctggagtcccatcatgacacgtggcccccagcctgtcccccactggagcctgccaagctggaggagattgatggattctttgcgagaaataacgaagagtacctggctctgatctttgaaaagggaggctcctacctgggtagagaggtggctctggacctgtcccagcacaaaggcgtggcggtgcgcagggtgctgaacacagaggccaatgtggtgagaaagtttggtgtcaccgacttcccctcttgctacctgctgttccggaatggctctgtctcccgagtccccgtgctcatggaatccaggtccttctataccgcttacctgcagagactctctgggctcaccagggaggctgcccagaccacagttgcaccaaccactgctaacaagatagctcccactgtttggaaattggcagatcgctccaagatctacatggctgacctggaatctgcactgcactacatcctgcggatagaagtgggcaggttcccggtcctggaagggcagcgcctggtggccctgaaaaagtttgtggcagtgctggccaagtatttccctggccggcccttagtccagaacttcctgcactccgtgaatgaatggctcaagaggcagaagagaaataaaattccctacagtttctttaaaactgccctggacgacaggaaagagggtgccgttcttgccaagaaggtgaactggattggctgccaggggagtgagccgcatttccggggctttccctgctccctgtgggtcctcttccacttcttgactgtgcaggcagctcggcaaaatgtagaccactcacaggaagcagccaaggccaaggaggtcctcccagccatccgaggctacgtgcactacttcttcggctgccgagactgcgctagccacttcgagcagatggctgctgcctccatgcaccgggtggggagtcccaacgccgctgtcctctggctctggtctagccacaacagggtcaatgctcgccttgcaggtgcccccagcgaggacccccagttccccaaggtgcagtggccaccccgtgaactttgttctgcctgccacaatgaacgcctggatgtgcccgtgtgggacgtggaagccaccctcaacttcctcaaggcccacttctccccaagcaacatcatcctggacttccctgcagctgggtcagctgcccggagggatgtgcagaatgtggcagccgccccagagctggcgatgggagccctggagctggaaagccggaattcaactctggaccctgggaagcctgagatgatgaagtcccccacaaacaccaccccacatgtgccggctgagggacctgaggcaagtcgacccccgaagctgcaccctggcctcagagctgcaccaggccaggagcctcctgagcacatggcagagcttcagaggaatgagcaggagcagccgcttgggcagtggcacttgagcaagcgagacacaggggctgcattgctggctgagtccagggctgagaagaaccgcctctggggccctttggaggtcaggcgcgtgggccgcagctccaagcagctggtcgacatccctgagggccagctggaggcccgagctggacggggccgaggccagtggctgcaggtgctgggagggggcttctcttacctggacatcagcctctgtgtggggctctattccctgtccttcatgggcctgctggccatgtacacctacttccaggccaagataagggccctgaagggccatgctggccaccctgcagcctgaaccacctggggaggaggcgggagagggagctgccatctctaggcacctcaagccccctgaccccattccctcccctcccaccccttgctccttgtctggcctagaagtgtgggaaattcaggaaaacgagttgctccagtgaagcttcttggggttgctaggacagagagctcctttgacacaaaagacaggagcagggtccaggttcccctgctgtgcagggagggcagccccgggcagtgggcatagggcagctcagtccctggcctcttagcaccacattcctgtttttcagcttatttgaagtcctgcctcattctcactggagcctcagtctctcctgcttggtcttggccctcaactggggcaagtgaagccagaggagggtcccccagctgggtgggctggaatggaactcctcactagctgctggggctccgcccaccctgctcccttttttattttggtctccaagatgaatgctcatctttggagggtgccaggtagaagctagggaggggagtgtcttctctctccaggtttcaccttccagtgtgcagaagttagaagggtctggcgggggcagtgccttacacatgcttgattcccacgctaccccctgccttgggaggtgtgtggaataaattatttttgttaaggcaa

SEQ ID NO: 307384 - DNA, 4884 bp, Homo sapiens
ggaggcaggcggtgccgcggcgccgggacccgactcatccggtgcttgcgtgtggtggtgagcgcagcgccgaggatgaggaggtgcaacagcggctccgggccgccgccgtcgctgctgctgctgctgctgtggctgctcgcggttcccggcgctaacgcggccccgcggtcggcgctctattcgccttccgacccgctgacgctgctgcaggcggacacggtgcgcggcgcggtgctgggctcccgcagcgcctgggccgtggagttcttcgcctcctggtgcggccactgcatcgccttcgccccgacgtggaaggcgctggccgaagacgtcaaagcctggaggccggccctgtatctcgccgccctggactgtgctgaggagaccaacagtgcagtctgcagagacttcaacatccctggcttcccgactgtgaggttcttcaaggcctttaccaagaacggctcgggagcagtatttccagtggctggtgctgacgtgcagacgctgcgggagaggctcattgacgccctggagtcccatcatgacacgtggcccccagcctgtcccccactggagcctgccaagctggaggagattgatggattctttgcgagaaataacgaagagtacctggctctgatctttgaaaagggaggctcctacctgggtagagaggtggctctggacctgtcccagcacaaaggcgtggcggtgcgcagggtgctgaacacagaggccaatgtggtgagaaagtttggtgtcaccgacttcccctcttgctacctgctgttccggaatggctctgtctcccgagtccccgtgctcatggaatccaggtccttctataccgcttacctgcagagactctctgggctcaccagggaggctgcccagaccacagttgcaccaaccactgctaacaagatagctcccactgtttggaaattggcagatcgctccaagatctacatggctgacctggaatctgcactgcactacatcctgcggatagaagtgggcaggttcccggtcctggaagggcagcgcctggtggccctgaaaaagtttgtggcagtgctggccaagtatttccctggccggcccttagtccagaacttcctgcactccgtgaatgaatggctcaagaggcagaagagaaataaaattccctacagtttctttaaaactgccctggacgacaggaaagagggtgccgttcttgccaagaaggtgaactggattggctgccaggggagtgagccgcatttccggggctttccctgctccctgtgggtcctcttccacttcttgactgtgcaggcagctcggcaaaatgtagaccactcacaggaagcagccaaggccaaggaggtcctcccagccatccgaggctacgtgcactacttcttcggctgccgagactgcgctagccacttcgagcagatggctgctgcctccatgcaccgggtggggagtcccaacgccgctgtcctctggctctggtctagccacaacagggtcaatgctcgccttgcaggtgcccccagcgaggacccccagttccccaaggtgcagtggccaccccgtgaactttgttctgcctgccacaatgaacgcctggatgtgcccgtgtgggacgtggaagccaccctcaacttcctcaaggcccacttctccccaagcaacatcatcctggacttccctgcagctgggtcagctgcccggagggatgtgcagaatgtggcagccgccccagagctggcgatgggagccctggagctggaaagccggaattcaactctggaccctgggaagcctgagatgatgaagtcccccacaaacaccaccccacatgtgccggctgagggacctgaggcaagtcgacccccgaagctgcaccctggcaggagaagatggctgctttcacttccccccattgagctctgctccctctgagcctggtcttttgtccttttttattttggtctccaagatgaatgctcatctttggagggtgccaggtagaagctagggaggggagtgtcttctctctccaggtttcaccttccagtgtgcagaagttagaagggtctggcgggggcagtgccttacacatgcttgattcccacgctaccccctgccttgggaggtgtgtggaataaattatttttgttaaggcaaaggcaagcattggtgtgttctttaacttgctacttggagacctagtgtccagtctggacagaatgcacagagaccagcctcacctggaatgacgttcagctcggtacccctcctcagcagacgcagctcctggccacagactgcccatagaactgtctgcacccaaaccccatggccttttcatgcacggagacaggcctctggatgtgcagccttgccaccccctgccccaatcctccctgagagctcctgcctcagtgccctgggctggtgagggagaagcctgtctgcacctgcctaattccagctcctccaggaagcaagggcttgtttgtcagagctgcagggttggccactcggtggggaggagtcagccaggattagagagcctgcccctaatccggcctgctgggttttacaaggatcagagctgctgataatgaacctcattaagggggagcaggagcctcaatccgatttggttttctctttgacatcttcactctgctcagatggcctgggtgctatgtggagcaggtgggatgccaaggccactcctgctatggggcagctggggctggggagggatggcagtctccctgcatgtttccctcgacctctttagctgcagcgccttgctgggctcctgggttggactccctctctgtgcccctgctccaggcacccattggctccatcctcctggttgtgctctgcaccccctgctcccttgggctggccctggctgggggcctgagagacagacaggaacccacaatcaggaggcaaccctggcctgcaagaggaagacagaggctcccagggccggtgccctgtgtgcccactgcaccaaggccgctgaataagcctgcccttcaccccctaagggctccttgcccaatgccaagtgctggggatttctgtcagcaagccctgtggctccagtgacggtatttctaaagccaaacttagttacctagaattagcgccatgttggaaacactgtcgcagcagcccgggctgcacagtgtgtagcccagcctccaggtccacggagtggtgtggacctcccacctcacagctgcctctggcagccaagcctcttttcgcccggccccagcccctctggttgataaacgggtgggcctcctcagcagcgtggctgcctttcaccttgatttccccagggctctcggcaacatcgataaaccagcctcgcccaccagctgggccctcccccacccagtctgccaggctgggagctggagcttgctgagtcttgaatgcccttctagatggcttctctagaggctctcctggcaagagagggtcccaaggggagccctgcaaagcaaaggctccttgtctggggcgggatagagaatctcgcctctgtctggtgtgttacctactgggggcacaggaacaatttcctcaaggagacagtggcatggagctttgaaagacgagtaggtgttagcaaggaaataaggaggaacgggggttacgggcagaggagaaagcacatgccaagtcagcaaagaaaagtagaattcgaaaactttttaaaaatattactaaggattttcacaatgctgcactgggctagaaactgaagctaaaacagatacgtggtccctgctgctatggggcttccgttctagaggcaaggacaggttgtgatgagggttctgaaggatagagaccaagcagggagggtgttgaggaggcttctgcgagacctgaaggatgggaagccaggaagtgggaggggtgggggtccaggctggaggggcccaatgtaggtgtagagggactacagccctgaggggctgctccatgcggcattcttggaggtccaagaggggcagcgccaccttgggccaggctcctctccagcagccttggtatggggtgggggtgggaagacccctgatgcagcctgtcctctgggtgtgggggtggaggagagggctccaggggacccagccagccttgaccctggaggaaagtcaggtgggctcagagagagccctcaaatctgggccctgggtcagggtggggtcaagtccagccttgaagagaatggactctggaatctgacgtctgggtttgaatccagcttccaacactcactggctgtgtgactttgggcaagataacttatcctcttgtccccatgtgtcattggagataaactacccacctaccagattgttgtaccatgctgggcaaacactaagtgcttaataatggtagcccactgctcatgtcgtgtcgtctcctgtcttgatacctgaaaactcaaggggccctgttgtgcttggaggggggtgccgttcccacaggatattctgtgaagggtgtccctggagctgggcctccaggtggcaagccccaagccaccccggcaggtgccactggccagagttgaactgaggtgttgagtggaaagtgcctccccacccccatctgccacagtagtatggatttccttcatgagatggggctcctaaaatgcctgaaatgtgtatgctgttggagaattgatgtgtatgatttattgaactttgcactcatttaaatctcatttaatcctccaacaacgcaagatgaagaagctgaggcttaaagagattaagaaacatcctatcccctttactcccaccaaaataaatacatttgccctattctccc

SEQ ID NO: 307385 - DNA, 1983 bp, Homo sapiens
tgcagtgatctagaggatcccttgcatatgccaaggccaaggaggtcctcccagccatccgaggctacgtgcactacttcttcggctgccgagactgcgctagccacttcgagcagatggctgctgcctccatgcaccgggtggggagtcccaacgccgctgtcctctggctctggtctagccacaacagggtcaatgctcgccttgcaggtgcccccagcgaggacccccagttccccaaggtgcagtggccaccccgtgaactttgttctgcctgccacaatgaacgcctggatgtgcccgtgtgggacgtggaagccaccctcaacttcctcaaggcccacttctccccaagcaacatcatcctggacttccctgcagctgggtcagctgcccggagggatgtgcagaatgtggcagccgccccagagctggcgatgggagccctggagctggaaagccggaattcaactctggaccctgggaagcctgagatgatgaagtcccccacaaacaccaccccacatgtgccggctgagggacctgaggcaagtcgacccccgaagctgcaccctggcctcagagctgcaccaggccaggagcctcctgagcacatggcagagcttcagaggaatgagcaggagcagccgcttgggcagtggcacttgagcaagcgagacacaggggctgcattgctggctgagtccagggctgagaagaaccgcctctggggccctttggaggtcaggcgcgtgggccgcagctccaagcagctggtcgacatccctgagggccagctggaggcccgagctggacggggccgaggccagtggctgcaggtgctgggagggggcttctcttacctggacatcagcctctgtgtggggctctattccctgtccttcatgggcctgctggccatgtacacctacttccaggccaagataagggccctgaagggccatgctggccaccctgcagcctgaaccacctggggaggaggcgggagagggagctgccatctctaggcacctcaagccccctgaccccattccctcccctcccaccccttgctccttgtctggcctagaagtgtgggaaattcaggaaaacgagttgctccagtgaagcttcttggggttgctaggacagagagctcctttgacacaaaagacaggagcagggtccaggttcccctgctgtgcagggagggcagccccgggcagtgggcatagggcagctcagtccctggcctcttagcaccacattcctgtttttcagcttatttgaagtcctgcctcattctcactggagcctcagtctctcctgcttggtcttggccctcaactggggcaagtgaagccagaggagggtcccccagctgggtgggctggaatggaactcctcactagctgctggggctccgcccaccctgctcccttccggacaatgaagaagcctttgcaccctgggaggaaggaccaccccgggccctctatgcctggccagcctccagctcctcagacctcctgggtggggtttggcttcagggtggggtttggaagcttctggaagtcgtgctggtctcccaggtgaggcaagccatggttgctgggctgtagggtgagtggcttgcttggtgggacctgacgagttggtggcatgggaaggatgtgggtctctagtgccttgccctggcttagctgcaggagaagatggctgctttcacttccccccattgagctctgctccctctgagcctggtcttttgtccttttttattttggtctccaagatgaatgctcatctttggagggtgccaggtagaagctagggaggggagtgtcttctctctccaggtttcaccttccagtgtgcagaagttagaagggtctggcgggggcagtgccttacacatgcttgattcccacgctaccccctgccttgggaggtgtgtggaataaattatttttgttaaggcaa

SEQ ID NO: 307386 - DNA, 2485 bp, Homo sapiens
ggaggcaggcggtgccgcggcgccgggacccgactcatccggtgcttgcgtgtggtggtgagcgcagcgccgaggatgaggaggtgcaacagcggctccgggccgccgccgtcgctgctgctgctgctgctgtggctgctcgcggttcccggcgctaacgcggccccgcggtcggcgctctattcgccttccgacccgctgacgctgctgcaggcggacacggtgcgcggcgcggtgctgggctcccgcagcgcctgggccgtggagttcttcgcctcctggtgcggccactgcatcgccttcgccccgacgtggaaggcgctggccgaagacgtcaaagcctggaggccggccctgtatctcgccgccctggactgtgctgaggagaccaacagtgcagtctgcagagacttcaacatccctggcttcccgactgtgaggttcttcaaggcctttaccaagaacggctcgggagcagtatttccagtggctggtgctgacgtgcagacgctgcgggagaggctcattgacgccctggagtcccatcatgacacgtggcccccagcctgtcccccactggagcctgccaagctggaggagattgatggattctttgcgagaaataacgaagagtacctggctctgatctttgaaaagggaggctcctacctgggtagagaggtggctctggacctgtcccagcacaaaggcgtggcggtgcgcagggtgctgaacacagaggccaatgtggtgagaaagtttggtgtcaccgacttcccctcttgctacctgctgttccggaatggctctgtctcccgagtccccgtgctcatggaatccaggtccttctataccgcttacctgcagagactctctgggctcaccagggaggctgcccagaccacagttgcaccaaccactgctaacaagatagctcccactgtttggaaattggcagatcgctccaagatctacatggctgacctggaatctgcactgcactacatcctgcggatagaagtgggcaggttcccggtcctggaagggcagcgcctggtggccctgaaaaagtttgtggcagtgctggccaagtatttccctggccggcccttagtccagaacttcctgcactccgtgaatgaatggctcaagaggcagaagagaaataaaattccctacagtttctttaaaactgccctggacgacaggaaagagggtgccgttcttgccaagaaggtgaactggattggctgccaggggagtgagccgcatttccggggctttccctgctccctgtgggtcctcttccacttcttgactgtgcaggcagctcggcaaaatgtagaccactcacaggaagcagccaaggccaaggaggtcctcccagccatccgaggctacgtgcactacttcttcggctgccgagactgcgctagccacttcgagcagatggctgctgcctccatgcaccgggtggggagtcccaacgccgctgtcctctggctctggtctagccacaacagggtcaatgctcgccttgcaggtgcccccagcgaggacccccagttccccaaggtgcagtggccaccccgtgaactttgttctgcctgccacaatgaacgcctggatgtgcccgtgtgggacgtggaagccaccctcaacttcctcaaggcccacttctccccaagcaacatcatcctggacttccctgcagctgggtcagctgcccggagggatgtgcagaatgtggcagccgccccagagctggcgatgggagccctggagctggaaagccggaattcaactctggaccctgggaagcctgagatgatgaagtcccccacaaacaccaccccacatgtgccggctgagggacctgaggcaagtcgacccccgaagctgcaccctggcctcagagctgcaccaggccaggagcctcctgagcacatggcagagcttcagaggaatgagcaggagcagccgcttgggcagtggcacttgagcaagcgagacacaggggctgcattgctggctgagtccagggctgagaagaaccgcctctggggccctttggaggtcaggcgcgtgggccgcagctccaagcagctggtcgacatccctgagggccagctggaggcccgagctggacggggccgaggccagtggctgcaggtgctgggagggggcttctcttacctggacatcagcctctgtgtggggctctattccctgtccttcatgggcctgctggccatgtacacctacttccaggccaagataagggccctgaagggccatgctggccaccctgcagcctgaaccacctggggaggaggcgggagagggagctgccatctctaggcaaataatgtctattctgtgacatctattttgtaacattatactatctgagcttgcttaaacatctacataaatgtatctatcaatatgtgcagcgtgaacctttaggttatctcttattttg

SEQ ID NO: 307387 - DNA, 1246 bp, Homo sapiens
tgcagtgatctagaggatcccttgcatatgccaaggccaaggaggtcctcccagccatccgaggctacgtgcactacttcttcggctgccgagactgcgctagccacttcgagcagatggctgctgcctccatgcaccgggtggggagtcccaacgccgctgtcctctggctctggtctagccacaacagggtcaatgctcgccttgcaggtgcccccagcgaggacccccagttccccaaggtgcagtggccaccccgtgaactttgttctgcctgccacaatgaacgcctggatgtgcccgtgtgggacgtggaagccaccctcaacttcctcaaggcccacttctccccaagcaacatcatcctggacttccctgcagctgggtcagctgcccggagggatgtgcagaatgtggcagccgccccagagctggcgatgggagccctggagctggaaagccggaattcaactctggaccctgggaagcctgagatgatgaagtcccccacaaacaccaccccacatgtgccggctgagggacccttatttgaagtcctgcctcattctcactggagcctcagtctctcctgcttggtcttggccctcaactggggcaagtgaagccagaggagggtcccccagctgggtgggctggaatggaactcctcactagctgctggggctccgcccaccctgctcccttccggacaatgaagaagcctttgcaccctgggaggaaggaccaccccgggccctctatgcctggccagcctccagctcctcagacctcctgggtggggtttggcttcagggtggggtttggaagcttctggaagtcgtgctggtctcccaggtgaggcaagccatggttgctgggctgtagggtgagtggcttgcttggtgggacctgacgagttggtggcatgggaaggatgtgggtctctagtgccttgccctggcttagctgcaggagaagatggctgctttcacttccccccattgagctctgctccctctgagcctggtcttttgtccttttttattttggtctccaagatgaatgctcatctttggagggtgccaggtagaagctagggaggggagtgtcttctctctccaggtttcaccttccagtgtgcagaagttagaagggtctggcgggggcagtgccttacacatgcttgattcccacgctaccccctgccttgggaggtgtgtggaataaattatttttgttaaggcaa

SEQ ID NO: 307388 - DNA, 2236 bp, Homo sapiens
ggaggcaggcggtgccgcggcgccgggacccgactcatccggtgcttgcgtgtggtggtgagcgcagcgccgaggatgaggaggtgcaacagcggctccgggccgccgccgtcgctgctgctgctgctgctgtggctgctcgcggttcccggcgctaacgcggccccgcggtcggcgctctattcgccttccgacccgctgacgctgctgcaggcggacacggtgcgcggcgcggtgctgggctcccgcagcgcctgggccgtggagttcttcgcctcctggtgcggccactgcatcgccttcgccccgacgtggaaggcgctggccgaagacgtcaaagcctggaggccggccctgtatctcgccgccctggactgtgctgaggagaccaacagtgcagtctgcagagacttcaacatccctggcttcccgactgtgaggttcttcaaggcctttaccaagaacggctcgggagcagtatttccagtggctggtgctgacgtgcagacgctgcgggagaggctcattgacgccctggagtcccatcatgacacgtggcccccagcctgtcccccactggagcctgccaagctggaggagattgatggattctttgcgagaaataacgaagagtacctggctctgatctttgaaaagggaggctcctacctgggtagagaggtggctctggacctgtcccagcacaaaggcgtggcggtgcgcagggtgctgaacacagaggccaatgtggtgagaaagtttggtgtcaccgacttcccctcttgctacctgctgttccggaatggctctgtctcccgagtccccgtgctcatggaatccaggtccttctataccgcttacctgcagagactctctgggctcaccagggaggctgcccagaccacagttgcaccaaccactgctaacaagatagctcccactgtttggaaattggcagatcgctccaagatctacatggctgacctggaatctgcactgcactacatcctgcggatagaagtgggcaggttcccggtcctggaagggcagcgcctggtggccctgaaaaagtttgtggcagtgctggccaagtatttccctggccggcccttagtccagaacttcctgcactccgtgaatgaatggctcaagaggcagaagagaaataaaattccctacagtttctttaaaactgccctggacgacaggaaagagggtgccgttcttgccaagaaggtgaactggattggctgccaggggagtgagccgcatttccggggctttccctgctccctgtgggtcctcttccacttcttgactgtgcaggcagctcggcaaaatgtagaccactcacaggaagcagccaaggccaaggaggtcctcccagccatccgaggctacgtgcactacttcttcggctgccgagactgcgctagccacttcgagcagatggctgctgcctccatgcaccgggtggggagtcccaacgccgctgtcctctggctctggtctagccacaacagggtcaatgctcgccttgcaggtgcccccagcgaggacccccagttccccaaggtgcagtggccaccccgtgaactttgttctgcctgccacaatgaacgcctggatgtgcccgtgtgggacgtggaagccaccctcaacttcctcaaggcccacttctccccaagcaacatcatcctggacttccctgcagctgggtcagctgcccggagggatgtgcagaatgtggcagccgccccagagctggcgatgggagccctggagctggaaagccggaattcaactctggaccctgggaagcctgagatgatgaagtcccccacaaacaccaccccacatgtgccggctgagggacctgaggcaagtcgacccccgaagctgcaccctggcctcagagctgcaccaggccaggagcctcctgagcacatggcagagcttcagaggaatgagcaggagcagccgcttgggcagtggcacttgagcaagcgagacacaggggctgcattgctggctgagtccagggctgagaagaaccgcctctggggccctttggaggtcaggcgcgtgggccgcagctccaagcagctggtcgacatcccctggccagtctctccacagtccccaccctccagccctgtctttggccacttgcctgtccctgagcattggtgaggatctgaatgctgatccctggcatgctgggaatggcgctggt

SEQ ID NO: 307389 - DNA, 1840 bp, Homo sapiens
ggaggcaggcggtgccgcggcgccgggacccgactcatccggtgcttgcgtgtggtggtgagcgcagcgccgaggatgaggaggtgcaacagcggctccgggccgccgccgtcgctgctgctgctgctgctgtggctgctcgcggttcccggcgctaacgcggccccgcggtcggcgctctattcgccttccgacccgctgacgctgctgcaggcggacacggtgcgcggcgcggtgctgggctcccgcagcgcctgggccgtggagttcttcgcctcctggtgcggccactgcatcgccttcgccccgacgtggaaggcgctggccgaagacgtcaaagcctggaggccggccctgtatctcgccgccctggactgtgctgaggagaccaacagtgcagtctgcagagacttcaacatccctggcttcccgactgtgaggttcttcaaggcctttaccaagaacggctcgggagcagtatttccagtggctggtgctgacgtgcagacgctgcgggagaggctcattgacgccctggagtcccatcatgacacgtggcccccagcctgtcccccactggagcctgccaagctggaggagattgatggattctttgcgagaaataacgaagagtacctggctctgatctttgaaaagggaggctcctacctgggtagagaggtggctctggacctgtcccagcacaaaggcgtggcggtgcgcagggtgctgaacacagaggccaatgtggtgagaaagtttggtgtcaccgacttcccctcttgctacctgctgttccggaatggctctgtctcccgagtccccgtgctcatggaatccaggtccttctataccgcttacctgcagagactctctgggctcaccagggaggctgcccagaccacagttgcaccaaccactgctaacaagatagctcccactgtttggaaattggcagatcgctccaagatctacatggctgacctggaatctgcactgcactacatcctgcggatagaagtgggcaggttcccggtcctggaagggcagcgcctggtggccctgaaaaagtttgtggcagtgctggccaagtatttccctggccggcccttagtccagaacttcctgcactccgtgaatgaatggctcaagaggcagaagagaaataaaattccctacagtttctttaaaactgccctggacgacaggaaagagggtgccgttcttgccaagaaggtgaactggattggctgccaggggagtgagccgcatttccggggctttccctgctccctgtgggtcctcttccacttcttgactgtgcaggcagctcggcaaaatgtagaccactcacaggaagcagccaaggccaaggaggtcctcccagccatccgaggctacgtgcactacttcttcggctgccgagactgcgctagccacttcgagcagatggctgctgcctccatgcaccgggtggggagtcccaacgccgctgtcctctggctctggtctagccacaacagggtcaatgctcgccttgcaggtgcccccagcgaggacccccagttccccaaggtgcagtggccaccccgtgaactttgttctgcctgccacaatgaacgcctggatgtgcccgtgtgggacgtggaagccaccctcaacttcctcaaggcccacttctccccaactagggaggggagtgtcttctctctccaggtttcaccttccagtgtgcagaagttagaagggtctggcgggggcagtgccttacacatgcttgattcccacgctaccccctgccttgggaggtgtgtggaataaattatttttgttaaggcaa

SEQ ID NO: 307390 - DNA, 2216 bp, Homo sapiens
ggaggcaggcggtgccgcggcgccgggacccgactcatccggtgcttgcgtgtggtggtgagcgcagcgccgaggatgaggaggtgcaacagcggctccgggccgccgccgtcgctgctgctgctgctgctgtggctgctcgcggttcccggcgctaacgcggccccgcggtcggcgctctattcgccttccgacccgctgacgctgctgcaggcggacacggtgcgcggcgcggtgctgggctcccgcagcgcctgggccgtggagttcttcgcctcctggtgcggccactgcatcgccttcgccccgacgtggaaggcgctggccgaagacgtcaaagcctggaggccggccctgtatctcgccgccctggactgtgctgaggagaccaacagtgcagtctgcagagacttcaacatccctggcttcccgactgtgaggttcttcaaggcctttaccaagaacggctcgggagcagtatttccagtggctggtgctgacgtgcagacgctgcgggagaggctcattgacgccctggagtcccatcatgacacgtggcccccagcctgtcccccactggagcctgccaagctggaggagattgatggattctttgcgagaaataacgaagagtacctggctctgatctttgaaaagggaggctcctacctgggtagagaggtggctctggacctgtcccagcacaaaggcgtggcggtgcgcagggtgctgaacacagaggccaatgtggtgagaaagtttggtgtcaccgacttcccctcttgctacctgctgttccggaatggctctgtctcccgagtccccgtgctcatggaatccaggtccttctataccgcttacctgcagagactctctgggctcaccagggaggctgcccagaccacagttgcaccaaccactgctaacaagatagctcccactgtttggaaattggcagatcgctccaagatctacatggctgacctggaatctgcactgcactacatcctgcggatagaagtgggcaggttcccggtcctggaagggcagcgcctggtggccctgaaaaagtttgtggcagtgctggccaagtatttccctggccggcccttagtccagaacttcctgcactccgtgaatgaatggctcaagaggcagaagagaaataaaattccctacagtttctttaaaactgccctggacgacaggaaagagggtgccgttcttgccaagaaggtgaactggattggctgccaggggagtgagccgcatttccggggctttccctgctccctgtgggtcctcttccacttcttgactgtgcaggcagctcggcaaaatgtagaccactcacaggaagcagccaaggccaaggaggtcctcccagccatccgaggctacgtgcactacttcttcggctgccgagactgcgctagccacttcgagcagatggctgctgcctccatgcaccgggtggggagtcccaacgccgctgtcctctggctctggtctagccacaacagggtcaatgctcgccttgcaggtgcccccagcgaggacccccagttccccaaggtgcagtggccaccccgtccttgaagagaatggactctggaatctgacgtctgggtttgaatccagcttccaacactcactggctgtgtgactttgggcaagataacttatcctcttgtccccatgtgtcattggagataaactacccacctaccagattgttgtaccatgctgggcaaacactaagtgcttaataatggtagcccactgctcatgtcgtgtcgtctcctgtcttgatacctgaaaactcaaggggccctgttgtgcttggaggggggtgccgttcccacaggatattctgtgaagggtgtccctggagctgggcctccaggtggcaagccccaagccaccccggcaggtgccactggccagagttgaactgaggtgttgagtggaaagtgcctccccacccccatctgccacagtagtatggatttccttcatgagatggggctcctaaaatgcctgaaatgtgtatgctgttggagaattgatgtgtatgatttattgaactttgcactcatttaaatctcatttaatcctccaacaacgcaagatgaagaagctgaggcttaaagagattaagaaacatcctatcccctttactcccaccaaaataaatacatttgccctattctccc

SEQ ID NO: 307391 - DNA, 1683 bp, Homo sapiens
ggaggcaggcggtgccgcggcgccgggacccgactcatccggtgcttgcgtgtggtggtgagcgcagcgccgaggatgaggaggtgcaacagcggctccgggccgccgccgtcgctgctgctgctgctgctgtggctgctcgcggttcccggcgctaacgcggccccgcggtcggcgctctattcgccttccgacccgctgacgctgctgcaggcggacacggtgcgcggcgcggtgctgggctcccgcagcgcctgggccgtggagttcttcgcctcctggtgcggccactgcatcgccttcgccccgacgtggaaggcgctggccgaagacgtcaaagcctggaggccggccctgtatctcgccgccctggactgtgctgaggagaccaacagtgcagtctgcagagacttcaacatccctggcttcccgactgtgaggttcttcaaggcctttaccaagaacggctcgggagcagtatttccagtggctggtgctgacgtgcagacgctgcgggagaggctcattgacgccctggagtcccatcatgacacgtggcccccagcctgtcccccactggagcctgccaagctggaggagattgatggattctttgcgagaaataacgaagagtacctggctctgatctttgaaaagggaggctcctacctgggtagagaggtggctctggacctgtcccagcacaaaggcgtggcggtgcgcagggtgctgaacacagaggccaatgtggtgagaaagtttggtgtcaccgacttcccctcttgctacctgctgttccggaatggctctgtctcccgagtccccgtgctcatggaatccaggtccttctataccgcttacctgcagagactctctgggctcaccagggaggctgcccagaccacagttgcaccaaccactgctaacaagatagctcccactgtttggaaattggcagatcgctccaagatctacatggctgacctggaatctgcactgcactacatcctgcggatagaagtgggcaggttcccggtcctggaagggcagcgcctggtggccctgaaaaagtttgtggcagtgctggccaagtatttccctggccggcccttagtccagaacttcctgcactccgtgaatgaatggctcaagaggcagaagagaaataaaattccctacagtttctttaaaactgccctggacgacaggaaagagggtgccgttcttgccaagaaggtgaactggattggctgccaggggagtgagccgcatttccggggctttccctgctccctgtgggtcctcttccacttcttgactgtgcaggcagctcggcaaaatgtagaccactcacaggaagcagccaaggccaaggaggtcctcccagccatccgaggctacgtgcactacttcttcggctgccgagactgcgctagccacttcgagcagatggctgctgcctccatgcaccgggtggggagtcccaacgccgctgtcctctggctctggtctagccacaacagggtcaatgctcgccttgcaggtgcgccaagaactaccaccaggactcagaggccgccatcaaccgcccagatcaacctggagctctacgcctcctacgtttacctgtccatgtcttactactgtgaccgcgatgagggatcctctagaacaccacaccag

SEQ ID NO: 307392 - DNA, 2850 bp, Homo sapiens
ctccttcaggtactgcgtgcttctctctctccggctcatccagggtaccgctgcttttccgttgggtgcagcttgctccactcggcgcccagcatcttggtgatctcgggaaagggcagatccgggtggcgcgtgctggatctgctcgcgccgctcgttcaggaagcgcacgtagcccgtgaccggtgccttgggcccattcggcaaaatcttcttccgcttcttgcccatgggccagccgcgtttcttcaccggctgcagcttcctcagcagacgcagctcctggccacagactgcccatagaactgtctgcacccaaaccccatggccttttcatgcacggagacaggcctctggatgtgcagccttgccaccccctgccccaatcctccctgagagctcctgcctcagtgccctgggctggtgagggagaagcctgtctgcacctgcctaattccagctcctccaggaagcaagggcttgtttgtcagagctgcagggttggccactcggtggggaggagtcagccaggattagagagcctgcccctaatccggcctgctgggttttacaaggatcagagctgctgataatgaacctcattaagggggagcaggagcctcaatccgatttggttttctctttgacatcttcactctgctcagatggcctgggtgctatgtggagcaggtgggatgccaaggccactcctgctatggggcagctggggctggggagggatggcagtctccctgcatgtttccctcgacctctttagctgcagcgccttgctgggctcctgggttggactccctctctgtgcccctgctccaggcacccattggctccatcctcctggttgtgctctgcaccccctgctcccttgggctggccctggctgggggcctgagagacagacaggaacccacaatcaggaggcaaccctggcctgcaagaggaagacagaggctcccagggccggtgccctgtgtgcccactgcaccaaggccgctgaataagcctgcccttcaccccctaagggctccttgcccaatgccaagtgctggggatttctgtcagcaagccctgtggctccagtgacggtatttctaaagccaaacttagttacctagaattagcgccatgttggaaacactgtcgcagcagcccgggctgcacagtgtgtagcccagcctccaggtccacggagtggtgtggacctcccacctcacagctgcctctggcagccaagcctcttttcgcccggccccagcccctctggttgataaacgggtgggcctcctcagcagcgtggctgcctttcaccttgatttccccagggctctcggcaacatcgataaaccagcctcgcccaccagctgggccctcccccacccagtctgccaggctgggagctggagcttgctgagtcttgaatgcccttctagatggcttctctagaggctctcctggcaagagagggtcccaaggggagccctgcaaagcaaaggctccttgtctggggcgggatagagaatctcgcctctgtctggtgtgttacctactgggggcacaggaacaatttcctcaaggagacagtggcatggagctttgaaagacgagtaggtgttagcaaggaaataaggaggaacgggggttacgggcagaggagaaagcacatgccaagtcagcaaagaaaagtagaattcgaaaactttttaaaaatattactaaggattttcacaatgctgcactgggctagaaactgaagctaaaacagatacgtggtccctgctgctatggggcttccgttctagaggcaaggacaggttgtgatgagggttctgaaggatagagaccaagcagggagggtgttgaggaggcttctgcgagacctgaaggatgggaagccaggaagtgggaggggtgggggtccaggctggaggggcccaatgtaggtgtagagggactacagccctgaggggctgctccatgcggcattcttggaggtccaagaggggcagcgccaccttgggccaggctcctctccagcagccttggtatggggtgggggtgggaagacccctgatgcagcctgtcctctgggtgtgggggtggaggagagggctccaggggacccagccagccttgaccctggaggaaagtcaggtgggctcagagagagccctcaaatctgggccctgggtcagggtggggtcaagtccagccttgaagagaatggactctggaatctgacgtctgggtttgaatccagcttccaacactcactggctgtgtgactttgggcaagataacttatcctcttgtccccatgtgtcattggagataaactacccacctaccagattgttgtaccatgctgggcaaacactaagtgcttaataatggtagcccactgctcatgtcgtgtcgtctcctgtcttgatacctgaaaactcaaggggccctgttgtgcttggaggggggtgccgttcccacaggatattctgtgaagggtgtccctggagctgggcctccaggtggcaagccccaagccaccccggcaggtgccactggccagagttgaactgaggtgttgagtggaaagtgcctccccacccccatctgccacagtagtatggatttccttcatgagatggggctcctaaaatgcctgaaatgtgtatgctgttggagaattgatgtgtatgatttattgaactttgcactcatttaaatctcatttaatcctccaacaacgcaagatgaagaagctgaggcttaaagagattaagaaacatcctatcccctttactcccaccaaaataaatacatttgccctattctccc

SEQ ID NO: 307393 - DNA, 910 bp, Homo sapiens
ggaggcaggcggtgccgcggcgccgggacccgactcatccggtgcttgcgtgtggtggtgagcgcagcgccgaggatgaggaggtgcaacagcggctccgggccgccgccgtcgctgctgctgctgctgctgtggctgctcgcggttcccggcgctaacgcggccccgcggtcggcgctctattcgccttccgacccgctgacgctgctgcaggcggacacggtgcgcggcgcggtgctgggctcccgcagcgcctgggccgtggagttcttcgcctcctggtgcggccactgcatcgccttcgccccgacgtggaaggcgctggccgaagacgtcaaagcctggaggccggccctgtatctcgccgccctggactgtgctgaggagaccaacagtgcagtctgcagagacttcaacatccctggcttcccgactgtgaggttcttcaaggcctttaccaagaacggctcgggagcagtatttccagtggctggtgctgacgtgcagacgctgcgggagaggctcattgacgccctggagtcccatcatgacacgtggcccccagcctgtcccccactggagcctgccaagctggaggagattgatggattctttgcgagaaataacgaagagtacctggctctgatctttgaaaagggaggctcctacctgggtagagaggtggctctggacctgtcccagcacaaaggcgtggcggtgcgcagggtgctgaacacagaggccaatgtggtgagaaagtttggtgtcaccgacttcccctcttgctacctgctgttccggaatggctctgtctcccgagtccccgtgctcatggaatccaggtccttctataccgcttatatgagttggggatgcctctagagtcacctcgcaatcagcgtgcactccc

SEQ ID NO: 307394 - DNA, 1643 bp, Homo sapiens
accccgtccggacacctacattgggcccctccagcctggacccccaccccctcccacttcctggcttcccatccttcaggtctcgcagaagcctcctcagcagcgtggctgcctttcaccttgatttccccagggctctcggcaacatcgataaaccagcctcgcccaccagctgggccctcccccacccagtctgccaggctgggagctggagcttgctgagtcttgaatgcccttctagatggcttctctagaggctctcctggcaagagagggtcccaaggggagccctgcaaagcaaaggctccttgtctggggcgggatagagaatctcgcctctgtctggtgtgttacctactgggggcacaggaacaatttcctcaaggagacagtggcatggagctttgaaagacgagtaggtgttagcaaggaaataaggaggaacgggggttacgggcagaggagaaagcacatgccaagtcagcaaagaaaagtagaattcgaaaactttttaaaaatattactaaggattttcacaatgctgcactgggctagaaactgaagctaaaacagatacgtggtccctgctgctatggggcttccgttctagaggcaaggacaggttgtgatgagggttctgaaggatagagaccaagcagggagggtgttgaggaggcttctgcgagacctgaaggatgggaagccaggaagtgggaggggtgggggtccaggctggaggggcccaatgtaggtgtagagggactacagccctgaggggctgctccatgcggcattcttggaggtccaagaggggcagcgccaccttgggccaggctcctctccagcagccttggtatggggtgggggtgggaagacccctgatgcagcctgtcctctgggtgtgggggtggaggagagggctccaggggacccagccagccttgaccctggaggaaagtcaggtgggctcagagagagccctcaaatctgggccctgggtcagggtggggtcaagtccagccttgaagagaatggactctggaatctgacgtctgggtttgaatccagcttccaacactcactggctgtgtgactttgggcaagataacttatcctcttgtccccatgtgtcattggagataaactacccacctaccagattgttgtaccatgctgggcaaacactaagtgcttaataatggtagcccactgctcatgtcgtgtcgtctcctgtcttgatacctgaaaactcaaggggccctgttgtgcttggaggggggtgccgttcccacaggatattctgtgaagggtgtccctggagctgggcctccaggtggcaagccccaagccaccccggcaggtgccactggccagagttgaactgaggtgttgagtggaaagtgcctccccacccccatctgccacagtagtatggatttccttcatgagatggggctcctaaaatgcctgaaatgtgtatgctgttggagaattgatgtgtatgatttattgaactttgcactcatttaaatctcatttaatcctccaacaacgcaagatgaagaagctgaggcttaaagagattaagaaacatcctatcccctttactcccaccaaaataaatacatttgccctattctccc

SEQ ID NO: 307395 - DNA, 391 bp, Homo sapiens
gtctggtactggggtaaaggctggttgtaaagtccacatagcaggacagtgggtctggccaacaccgggaaatgactgagatggcgctcttcacgcttccctggaaaaccacggagggccggggctgaggggtaggtggatctgcctcctcctccatgctgccatctgttgagctcccactgtgggctagtgtttgtaatctgtattttctaattacccatcctctggaagggcagtggcgagccctttctgcagacaaggaagctggcgttctgagtggaggagtgtggtctgggtttttgggtgggactgatgtcaccaccagcctgtgtatgcttccctctgtaggtgcccccagcgaggacccccagttccccaaggtgcagtggcc

SEQ ID NO: 307396 - DNA, 231 bp, Homo sapiens
gcagaagagaaataaaattccctacagtttctttaaaactgccctggacgacaggaaagaggtgagtctgggaagcaaataaagatctctccatcctccgtatttatgagagtgcaaggggttaaccctgtcatttctgaccttcttcgccagtttgcaccagggagtcagtgatcttcgttgggtcctaacaataatcaataaatgactattgattgagctctctatgcg

SEQ ID NO: 307397 - DNA, 603 bp, Homo sapiens
gatcaagaggaccccttcagtgcttagctcaattagtgtggctaaccaagagataactgtaaatgtgacattgatttgctcttactacagcttcagtgattgggggaggaaaagtcccaacccaatgggctcaaacttctaaggggtactcctctcatccccttatccttctccctcgacattttctccctctttcttcccatgaccccaaagccaagggcaacagatcagtaaagaacgtggtcagagtagaacccctgaagtattttttaatcctacctcaaaatttaacagttacctgagagatttaacattatctagttcattgaatcattgtatgtggtcatggataaattgcacaccttggaattcgctttctaaaggaaatcaaatgaatggaggaactttccaaacaccactttacttgtgttatatagccaatataactatctctactgaaaaaggtgcggaatcagcacatttagtgggagtgggggggaggtcaggactatgatcggataagggatttaataccttagagcaaaatctatagagtctcgctcagtttatcagtttaaatggcttgaggctaatggggggtgt

SEQ ID NO: 307398 - DNA, 833 bp, Homo sapiens
  misc_feature (24)..(24): n is a, c, g, or t
aaacagtgtatcaacgcagagtgnccattacggccgggattgatttgctcttactacagcttcagtgattgggggaggaaaagtcccaacccaatgggctcaaacttctaaggggtactcctctcatccccttatccttctccctcgacattttctccctctttcttcccatgaccccaaagccaagggcaacagatcagtaaagaacgtggtcagagtagaacccctgaagtattttttaatcctacctcaaaatttaacagttacctgagagatttaacattatctagttcattgaatcattgtatgtggtcatggataaattgcacaccttggaattcgctttctaaaggaaatcaaatgaatggaggaactttccaaacaccactttacttgtgttatatagccaatataactatctctactgaatgtcattgaaaaactaaaaaattaaacttatttacaaataggtaaccacacacacaccaacaccacacacaccaccacacccacccccccccccccccccctcccacacacccaccccccacccccaccaccactccccccccccccccccccacaaacaccttcccacacccacccccgagcgccggcggcccccaaccgcgaaacgccaccagcgcacacacggcacgccagcagaacaccaccctgcccacacacccccggcggggctagtcccccccacaaaaaaaagacccgcgggcgggcaacacaggggccgcacaacacaccacccgagggacgcccacgcgccaccccccgcgcacccaacacgagggccccaccaacggcgcctaataaaaccc

SEQ ID NO: 307399 - DNA, 879 bp, Homo sapiens
gttagcatctttggaaaaattcctaaacttatttgggaacaaattgttattatatgaggctaatggtacctagaaataactagaataattcccaagaagttatgcctttataaaatattcatctttggcaatgaccagaaatgtctacctttacataaattagtgtgtccactctttttggggctggtggggtgtcttctgactggccttcatgtgtgggaatagccccattccaagtgctgcttgattgtaaaattggaccaagcctgtcatcacactgcccagtctttgggtagggggagctgagagattctgtgaatattgtcagaagggacatgtttttggatagggagggaaaaaaagcaagatccccaggtcccctgattttaaccatgacgtagaaaactccacacagaccctcctcccttccgccctggcacagagtcccgttgtcctttcataggcggtgtcagaaaccctgtggtgaaattcagcctgtggattccagaaatttggagtgttcttggggggaaaaatccgcacacacaaagcaacatttggaaatccctgtggtgagttgggaggtggggaggggatgcagtatgggaaggctggaagggaaagcgccggtgtacatccctccctcttctttccagggctctgagtgtcagggctgagatgaagatgacaccctggcagaggaggaggcagggtgctgggggcagggcatggacattgaggtctgtgctgagctttacagtttgcaagcactttcatgttatcttgtgggggtagatcagtgactccatagccattttataggcatagacactgaatttcacagtggttaaataaatttcccaagaccacatggttgga

SEQ ID NO: 307400 - DNA, 694 bp, Homo sapiens
ttttgattctgctgtggtgataaagatactctgccttgcccattaagcatttgttggtggaaaacattacctttaaataaatgtctggttctatgtgagcaaagctagggctcccataaaattgggcaatgatactctgaattcagctgaactgtttgggcaactttgtcacttctggggccatcattttcaggatagttcccacagtgtgagaaaatgactgcttcctatagtactgtcaagagtgtgaaaagagagctctttagcaaacacattatttatccatccttaaaaagcttgtcacctccagggtgcttgttcagaagtaatctcattacttaaatcatatcctagcatgtggaaaagctccctgacttccccgcctgccccacctgctgatttctcaggaccgctgataacagctttcatgtggaacttgggattaatatcaagcaagccatggattttgtctccactgaacttgggcatcatggacagtttccattccagcagttaagggcttcctgactttcaacagtggtgctgatcccagttctgaagagtggaacatcagagagcctcccctcctcagccacttgtaagcataacaaactgaaaatgtaatctgctttcaaatattctgttgagtaaagattccttttaattactttaactgggtttttgtagagacaag

SEQ ID NO: 307401 - DNA, 496 bp, Homo sapiens
aggaaacaagtttcactaaagaagcctacaagaagtacatcaaagattacatgaaatcaatccaaggggtaggtattccaagaattcaagaatggacattagtaaagaataaaacatttatttgagcttggaattatttggatcatctatatggcctaaaaatatatggactatgcctgtgtacctgaatacgtatgtagtcaggtcaagacaatcatccaaataacttagacccctaaaagcaaggccaggatttgcaatttaatgtgtcccaattaattcacttgaaaattagtaacactctgtttacgttgcctctggctggagctgcatggtggaagaagcccaactttggatccatgtacttcacccatccaatactcttgggacatttatgtgtattttatctgtatatatgaagccaatgtctatgtctacacagtcaaagtgaaatgcatgtttgatatagctgtacatagatatctattttgcaggt

SEQ ID NO: 307402 - DNA, 563 bp, Homo sapiens
ctgtgaaagttccagaagaaagctgtatggtcagcttggggaaatatgtggttcatgctggaatgctggacataccacattattggaaagatgcacattgaatgaccgacaaaatgaaactcaactttccaaatgctggtaatgagagaagattctgttctaatgaccagttgtttcctgaaagaatgtcagctcgattcataatgaatgcattctaaccatgacagccacagtcaggacacaaaaaacaaagtgtccttgatcccaggaaacagccctctggaatctgtgaaatctagaaactagattgggaaaactctgacacccctgccccatgaccaaccaagactaagagtcccaggaagattgaggtcacagaaggcagaggcctgccccctctccaggagatccctgacccatgtggggtcatgggcggggcatgagtgatgtgatgggaaactggctcctggctccaagtagaacgtgaccaactggagcctgacaggaggtccctggcactggtcagcccatcaaaccaggtaagtccttggagtctgagtagg

SEQ ID NO: 307403 - DNA, 3021 bp, Homo sapiens
  misc_feature (24)..(24): n is a, c, g, or t
aaacagtgtatcaacgcagagtgnccattacggccgggggagtttctggagggctgaacacgtggaggcaaacaggaaggtgaagaagaacttatcctatcaggacggaaggtcctgtgctcgggatcttccagacgtcgcgactctaaattgccccctctgaggtcaaggaacacaagatggttttggaaatgctgaacccgatacattataacatcaccagcatcgtgcctgaagccatgcctgctgccaccatgccagtcctgctcctcactggcctttttctcttggtgtggaattatgagggcacatcctcaataccaggtcctggctactgcatgggaattggacccctcatctcccacggcagattcctgtggatggggatcggcagtgcctgcaactactacaaccgggtatatggagaattcatgcgagtctggatctctggagaggaaacactcattatcagcaagtcctcaagtatgttccacataatgaagcacaatcattacagctctcgattcggcagcaaacttgggctgcagtgcatcggtatgcatgagaaaggcatcatatttaacaacaatccagagctctggaaaacaactcgacccttctttatgaaagctctgtcaggccccggccttgttcgtatggtcacagtctgtgctgaatccctcaaaacacatctggacaggttggaggaggtgaccaatgaatcgggctatgtggacgtgttgacccttctgcgtcgtgtcatgctggacacctctaacacgctcttcttgaggatccctttggacgaaagtgctatcgtggttaaaatccaaggttattttgatgcatggcaagctctcctcatcaaaccagacatcttctttaagatttcttggctatacaaaaagtatgagaagtctgtcaaggatttgaaagatgccatagaagttctgatagcagaaaaaagacgcaggatttccacagaagagaaactggaagaatgtatggactttgccactgagttgattttagcagagaaacgtggtgacctgacaagagagaatgtgaaccagtgcatattggaaatgctgatcgcagctcctgacaccatgtctgtctctttgttcttcatgctatttctcattgcaaagcaccctaatgttgaagaggcaataataaaggaaatccagactgttattggtgagagagacataaagattgatgatatacaaaaattaaaagtgatggaaaacttcatttatgagagcatgcggtaccagcctgtcgtggacttggtcatgcgcaaagccttagaagatgatgtaatcgatggctacccagtgaaaaaggggacaaacattatcctgaatattggaaggatgcacagactcgagtttttccccaaacccaatgaatttactcttgaaaattttgcaaagaatgttccttataggtactttcagccatttggctttgggccccgtggctgtgcaggaaagtacatcgccatggtgatgatgaaagccatcctcgttacacttctgagacgattccacgtgaagacattgcaaggacagtgtgttgagagcatacagaagatacacgacttgtccttgcacccagatgagactaaaaacatgctggaaatgatctttaccccaagaaactcagacaggtgtctggaacactagagaaggctggtcagtacccactctggagcatttctcatcagtagttcacatacaaatcatccatccttgccaatagtgtcatcctcacagtgaacactcagtggcccatggcattttataggcatacctcctatgggttgtcaccaagctaggtgctattggtcatctgctcctgttcacaccagagaaccaggctacaagagaaaaagcagaggccaagagtttgagggagaaatagtcggtgaagaaaccgtatccataaagacccgattccaccaaatgtgctttgagaaggataggccttcattaacaaaatgtatgtctggttccccagtagagctctactgcctcaacccaaggggatttttatgtctggggcagaaacactcaagttgattagaaagaccaggccaatgtcagggtacctggggccaaacccacctgctagtgtgaattaaagtactttaattttgttttctgtggaggtggaaaagcaacattcatagtctttggagaaatgcttagaaattcagcatttgacccttgctgtgaattaagcccaattaattcctgtttgtctacatatgatctgtctgtggcaaaagtttaatcagaggaaattctttcccagtctgtcgatttatgcctcagccacttgcctgtgctacaattcattgtgttacctgtagattcaggtaatacaaactatatataatcatcaagtaatacaaactaatttagtaatagcctgggttaagtattattagggccctgtgtctgctgtagaaaaaaaaattcacatgatgcacttcaaattcaaataaaaatccttttggcatgttcccatttttgcttagctcaattagtgtggctaaccaagagataactgtaaatgtgacattgatttgctcttactacagcttcagtgattgggggaggaaaagtcccaacccaatgggctcaaacttctaaggggtactcctctcatccccttatccttctccctcgacattttctccctctttcttcccatgaccccaaagccaagggcaacagatcagtaaagaacgtggtcagagtagaacccctgaagtattttttaatcctacctcaaaatttaacagttacctgagagatttaacattatctagttcattgaatcattgtatgtggtcatggataaattgcacaccttggaattcgctttctaaaggaaatcaaatgaatggaggaactttccaaacaccactttacttgtgttatatagccaatataactatctctactgaatgtcattgaaaaactaaaaaattaaacttatttacaaata

SEQ ID NO: 307404 - DNA, 3130 bp, Homo sapiens
  misc_feature (24)..(24): n is a, c, g, or t
aaacagtgtatcaacgcagagtgnccattacggccgggggagtttctggagggctgaacacgtggaggcaaacaggaaggtgaagaagaacttatcctatcaggacggaaggtcctgtgctcgggatcttccagacgtcgcgcggtgtcagaaaccctgtggtgaaattcagcctgtggattccagaaatttggagtgttcttggggggaaaaatccgcacacacaaagcaacatttggaaatccctgtggactctaaattgccccctctgaggtcaaggaacacaagatggttttggaaatgctgaacccgatacattataacatcaccagcatcgtgcctgaagccatgcctgctgccaccatgccagtcctgctcctcactggcctttttctcttggtgtggaattatgagggcacatcctcaataccaggtcctggctactgcatgggaattggacccctcatctcccacggcagattcctgtggatggggatcggcagtgcctgcaactactacaaccgggtatatggagaattcatgcgagtctggatctctggagaggaaacactcattatcagcaagtcctcaagtatgttccacataatgaagcacaatcattacagctctcgattcggcagcaaacttgggctgcagtgcatcggtatgcatgagaaaggcatcatatttaacaacaatccagagctctggaaaacaactcgacccttctttatgaaagctctgtcaggccccggccttgttcgtatggtcacagtctgtgctgaatccctcaaaacacatctggacaggttggaggaggtgaccaatgaatcgggctatgtggacgtgttgacccttctgcgtcgtgtcatgctggacacctctaacacgctcttcttgaggatccctttggacgaaagtgctatcgtggttaaaatccaaggttattttgatgcatggcaagctctcctcatcaaaccagacatcttctttaagatttcttggctatacaaaaagtatgagaagtctgtcaaggatttgaaagatgccatagaagttctgatagcagaaaaaagacgcaggatttccacagaagagaaactggaagaatgtatggactttgccactgagttgattttagcagagaaacgtggtgacctgacaagagagaatgtgaaccagtgcatattggaaatgctgatcgcagctcctgacaccatgtctgtctctttgttcttcatgctatttctcattgcaaagcaccctaatgttgaagaggcaataataaaggaaatccagactgttattggtgagagagacataaagattgatgatatacaaaaattaaaagtgatggaaaacttcatttatgagagcatgcggtaccagcctgtcgtggacttggtcatgcgcaaagccttagaagatgatgtaatcgatggctacccagtgaaaaaggggacaaacattatcctgaatattggaaggatgcacagactcgagtttttccccaaacccaatgaatttactcttgaaaattttgcaaagaatgttccttataggtactttcagccatttggctttgggccccgtggctgtgcaggaaagtacatcgccatggtgatgatgaaagccatcctcgttacacttctgagacgattccacgtgaagacattgcaaggacagtgtgttgagagcatacagaagatacacgacttgtccttgcacccagatgagactaaaaacatgctggaaatgatctttaccccaagaaactcagacaggtgtctggaacactagagaaggctggtcagtacccactctggagcatttctcatcagtagttcacatacaaatcatccatccttgccaatagtgtcatcctcacagtgaacactcagtggcccatggcattttataggcatacctcctatgggttgtcaccaagctaggtgctattggtcatctgctcctgttcacaccagagaaccaggctacaagagaaaaagcagaggccaagagtttgagggagaaatagtcggtgaagaaaccgtatccataaagacccgattccaccaaatgtgctttgagaaggataggccttcattaacaaaatgtatgtctggttccccagtagagctctactgcctcaacccaaggggatttttatgtctggggcagaaacactcaagttgattagaaagaccaggccaatgtcagggtacctggggccaaacccacctgctagtgtgaattaaagtactttaattttgttttctgtggaggtggaaaagcaacattcatagtctttggagaaatgcttagaaattcagcatttgacccttgctgtgaattaagcccaattaattcctgtttgtctacatatgatctgtctgtggcaaaagtttaatcagaggaaattctttcccagtctgtcgatttatgcctcagccacttgcctgtgctacaattcattgtgttacctgtagattcaggtaatacaaactatatataatcatcaagtaatacaaactaatttagtaatagcctgggttaagtattattagggccctgtgtctgctgtagaaaaaaaaattcacatgatgcacttcaaattcaaataaaaatccttttggcatgttcccatttttgcttagctcaattagtgtggctaaccaagagataactgtaaatgtgacattgatttgctcttactacagcttcagtgattgggggaggaaaagtcccaacccaatgggctcaaacttctaaggggtactcctctcatccccttatccttctccctcgacattttctccctctttcttcccatgaccccaaagccaagggcaacagatcagtaaagaacgtggtcagagtagaacccctgaagtattttttaatcctacctcaaaatttaacagttacctgagagatttaacattatctagttcattgaatcattgtatgtggtcatggataaattgcacaccttggaattcgctttctaaaggaaatcaaatgaatggaggaactttccaaacaccactttacttgtgttatatagccaatataactatctctactgaatgtcattgaaaaactaaaaaattaaacttatttacaaata

SEQ ID NO: 307405 - DNA, 3088 bp, Homo sapiens
  misc_feature (24)..(24): n is a, c, g, or t
  misc_feature (3057)..(3059): n is a, c, g, or t
  misc_feature (3071)..(3072): n is a, c, g, or t
  misc_feature (3078)..(3078): n is a, c, g, or t
aaacagtgtatcaacgcagagtgnccattacggccgggggagtttctggagggctgaacacgtggaggcaaacaggaaggtgaagaagaacttatcctatcaggacggaaggtcctgtgctcgggatcttccagacgtcgcgactctaaattgccccctctgaggtcaaggaacacaagatggttttggaaatgctgaacccgatacattataacatcaccagcatcgtgcctgaagccatgcctgctgccaccatgccagtcctgctcctcactggcctttttctcttggtgtggaattatgagggcacatcctcaataccaggtcctggctactgcatgggaattggacccctcatctcccacggcagattcctgtggatggggatcggcagtgcctgcaactactacaaccgggtatatggagaattcatgcgagtctggatctctggagaggaaacactcattatcagcaagtcctcaagtatgttccacataatgaagcacaatcattacagctctcgattcggcagcaaacttgggctgcagtgcatcggtatgcatgagaaaggcatcatatttaacaacaatccagagctctggaaaacaactcgacccttctttatgaaagctctgtcaggccccggccttgttcgtatggtcacagtctgtgctgaatccctcaaaacacatctggacaggttggaggaggtgaccaatgaatcgggctatgtggacgtgttgacccttctgcgtcgtgtcatgctggacacctctaacacgctcttcttgaggatccctttggacgaaagtgctatcgtggttaaaatccaaggttattttgatgcatggcaagctctcctcatcaaaccagacatcttctttaagatttcttggctatacaaaaagtatgagaagtctgtcaaggatttgaaagatgccatagaagttctgatagcagaaaaaagacgcaggatttccacagaagagaaactggaagaatgtatggactttgccactgagttgattttagcagagaaacgtggtgacctgacaagagagaatgtgaaccagtgcatattggaaatgctgatcgcagctcctgacaccatgtctgtctctttgttcttcatgctatttctcattgcaaagcaccctaatgttgaagaggcaataataaaggaaatccagactgttattggtgagagagacataaagattgatgatatacaaaaattaaaagtgatggaaaacttcatttatgagagcatgcggtaccagcctgtcgtggacttggtcatgcgcaaagccttagaagatgatgtaatcgatggctacccagtgaaaaaggggacaaacattatcctgaatattggaaggatgcacagactcgagtttttccccaaacccaatgaatttactcttgaaaattttgcaaagaatgttccttataggtactttcagccatttggctttgggccccgtggctgtgcaggaaagtacatcgccatggtgatgatgaaagccatcctcgttacacttctgagacgattccacgtgaagacattgcaaggacagtgtgttgagagcatacagaagatacacgacttgtccttgcacccagatgagactaaaaacatgctggaaatgatctttaccccaagaaactcagacaggtgtctggaacactagagaaggctggtcagtacccactctggagcatttctcatcagtagttcacatacaaatcatccatccttgccaatagtgtcatcctcacagtgaacactcagtggcccatggcattttataggcatacctcctatgggttgtcaccaagctaggtgctattggtcatctgctcctgttcacaccagagaaccaggctacaagagaaaaagcagaggccaagagtttgagggagaaatagtcggtgaagaaaccgtatccataaagacccgattccaccaaatgtgctttgagaaggataggccttcattaacaaaatgtatgtctggttccccagtagagctctactgcctcaacccaaggggatttttatgtctggggcagaaacactcaagttgattagaaagaccaggccaatgtcagggtacctggggccaaacccacctgctagtgtgaattaaagtactttaattttgttttctgtggaggtggaaaagcaacattcatagtctttggagaaatgcttagaaattcagcatttgacccttgctgtgaattaagcccaattaattcctgtttgtctacatatgatctgtctgtggcaaaagtttaatcagaggaaattctttcccagtctgtcgatttatgcctcagccacttgcctgtgctacaattcattgtgttacctgtagattcaggtaatacaaactatatataatcatcaagtaatacaaactaatttagtaatagcctgggttaagtattattagggccctgtgtctgctgtagaaaaaaaaattcacatgatgcacttcaaattcaaataaaaatccttttggcatgttcccatttttgcttagctcaattagtgtggctaaccaagagataactgtaaatgtgacattgatttgctcttactacagcttcagtgattgggggaggaaaagtcccaacccaatgggctcaaacttctaaggggtactcctctcatccccttatccttctccctcgacattttctccctctttcttcccatgaccccaaagccaagggcaacagatcagtaaagaacgtggtcagagtagaacccctgaagtattttttaatcctacctcaaaatttaacagttacctgagagatttaacattatctagttcattgaatcattgtatgtggtcatggataaattgcacaccttggaattcgctttctaaaggaaatcaaatgaatggaggaactttccaaacaccactttacttgtgttatatagccaatataactatctctactgaatgtcattgaaaaactaaaaaattaaacttatttacaaataggtaaaaaaaaaaaaaaaaacaaacacaaaaaaacnnntggggggcgccnngggccncggaaaaacc

SEQ ID NO: 307406 - DNA, 3698 bp, Homo sapiens
  misc_feature (24)..(24): n is a, c, g, or t
aaacagtgtatcaacgcagagtgnccattacggccgggggagtttctggagggctgaacacgtggaggcaaacaggaaggtgaagaagaacttatcctatcaggacggaaggtcctgtgctcgggatcttccagacgtcgcgactctaaattgccccctctgaggtcaaggaacacaagatggttttggaaatgctgaacccgatacattataacatcaccagcatcgtgcctgaagccatgcctgctgccaccatgccagtcctgctcctcactggcctttttctcttggtgtggaattatgagggcacatcctcaataccaggtcctggctactgcatgggaattggacccctcatctcccacggcagattcctgtggatggggatcggcagtgcctgcaactactacaaccgggtatatggagaattcatgcgagtctggatctctggagaggaaacactcattatcagcaagtcctcaagtatgttccacataatgaagcacaatcattacagctctcgattcggcagcaaacttgggctgcagtgcatcggtatgcatgagaaaggcatcatatttaacaacaatccagagctctggaaaacaactcgacccttctttatgaaagctctgtcaggccccggccttgttcgtatggtcacagtctgtgctgaatccctcaaaacacatctggacaggttggaggaggtgaccaatgaatcgggctatgtggacgtgttgacccttctgcgtcgtgtcatgctggacacctctaacacgctcttcttgaggatccctttggacgaaagtgctatcgtggttaaaatccaaggttattttgatgcatggcaagctctcctcatcaaaccagacatcttctttaagatttcttggctatacaaaaagtatgagaagtctgtcaaggatttgaaagatgccatagaagttctgatagcagaaaaaagacgcaggatttccacagaagagaaactggaagaatgtatggactttgccactgagttgattttagcagagaaacgtggtgacctgacaagagagaatgtgaaccagtgcatattggaaatgctgatcgcagctcctgacaccatgtctgtctctttgttcttcatgctatttctcattgcaaagcaccctaatgttgaagaggcaataataaaggaaatccagactgttattggtgagagagacataaagattgatgatatacaaaaattaaaagtgatggaaaacttcatttatgagagcatgcggtaccagcctgtcgtggacttggtcatgcgcaaagccttagaagatgatgtaatcgatggctacccagtgaaaaaggggacaaacattatcctgaatattggaaggatgcacagactcgagtttttccccaaacccaatgaatttactcttgaaaattttgcaaagaatgttccttataggtactttcagccatttggctttgggccccgtggctgtgcaggaaagtacatcgccatggtgatgatgaaagccatcctcgttacacttctgagacgattccacgtgaagacattgcaaggacagtgtgttgagagcatacagaagatacacgacttgtccttgcacccagatgagactaaaaacatgctggaaatgatctttaccccaagaaactcagacaggtgtctggaacactagagaaggctggtcagtacccactctggagcatttctcatcagtagttcacatacaaatcatccatccttgccaatagtgtcatcctcacagtgaacactcagtggcccatggcattttataggcatacctcctatgggttgtcaccaagctaggtgctattggtcatctgctcctgttcacaccagagaaccaggctacaagagaaaaagcagaggccaagagtttgagggagaaatagtcggtgaagaaaccgtatccataaagacccgattccaccaaatgtgctttgagaaggataggccttcattaacaaaatgtatgtctggttccccagtagagctctactgcctcaacccaaggggatttttatgtctggggcagaaacactcaagttgattagaaagaccaggccaatgtcagggtacctggggccaaacccacctgctagtgtgaattaaagtactttaattttgttttctgtggaggtggaaaagcaacattcatagtctttggagaaatgcttagaaattcagcatttgacccttgctgtgaattaagcccaattaattcctgtttgtctacatatgatctgtctgtggcaaaagtttaatcagaggaaattctttcccagtctgtcgatttatgcctcagccacttgcctgtgctacaattcattgtgttacctgtagattcaggtaatacaaactatatataatcatcaagtaatacaaactaatttagtaatagcctgggttaagtattattagggccctgtgtctgctgtagaaaaaaaaattcacatgatgcacttcaaattcaaataaaaatccttttggcatgttcccatttttgcttagctcaattagtgtggctaaccaagagataactgtaaatgtgacattgatttgctcttactacagcttcagtgattgggggaggaaaagtcccaacccaatgggctcaaacttctaaggggtactcctctcatccccttatccttctccctcgacattttctccctctttcttcccatgaccccaaagccaagggcaacagatcagtaaagaacgtggtcagagtagaacccctgaagtattttttaatcctacctcaaaatttaacagttacctgagagatttaacattatctagttcattgaatcattgtatgtggtcatggataaattgcacaccttggaattcgctttctaaaggaaatcaaatgaatggaggaactttccaaacaccactttacttgtgttatatagccaatataactatctctactgaatgtcattgaaaaactaaaaaattaaacttatttacaaataggtaaatatttgtcattgaatccattgccatcccatttgactgttcttttcatcctactgtctagtaataagctgagtataagatgacagtgtaatctccctgaaagcaggagctactttctttcttttgtaatctatttccatccccatttccctgtcctgtctccctgtattcactcccaagctcagttctgaatagacattcctgctcagagatactcccaactgatgcagaaaccaaataaagaggtaggtattccaagaattcaagaatggacattagtaaagaataaaacatttatttgagcttggaattatttggatcatctatatggcctaaaaatatatggactatgcctgtgtacctgaatacgtatgtagtcaggtcaagacaatcatccaaataacttagacccctaaaagcaaggccaggatttgcaatttaatgtgtcccaattaattcacttgaaaattagtaacactctgtttacgttgcctctggctggagctgcatggtggaagaagcccaactttggatccatgtacttcacccatccaatactcttgggacatttatgtgtattttatctgtatatatgaagccaatgtctatgtctacacagtcaaagtgaaatgcatgtttgatatagctgtacatagatatctattttgcaggt

SEQ ID NO: 307407 - DNA, 3648 bp, Homo sapiens
  misc_feature (24)..(24): n is a, c, g, or t
aaacagtgtatcaacgcagagtgnccattacggccgggggagtttctggagggctgaacacgtggaggcaaacaggaaggtgaagaagaacttatcctatcaggacggaaggtcctgtgctcgggatcttccagacgtcgcgactctaaattgccccctctgaggtcaaggaacacaagatggttttggaaatgctgaacccgatacattataacatcaccagcatcgtgcctgaagccatgcctgctgccaccatgccagtcctgctcctcactggcctttttctcttggtgtggaattatgagggcacatcctcaataccaggtcctggctactgcatgggaattggacccctcatctcccacggcagattcctgtggatggggatcggcagtgcctgcaactactacaaccgggtatatggagaattcatgcgagtctggatctctggagaggaaacactcattatcagcaagtcctcaagtatgttccacataatgaagcacaatcattacagctctcgattcggcagcaaacttgggctgcagtgcatcggtatgcatgagaaaggcatcatatttaacaacaatccagagctctggaaaacaactcgacccttctttatgaaagctctgtcaggccccggccttgttcgtatggtcacagtctgtgctgaatccctcaaaacacatctggacaggttggaggaggtgaccaatgaatcgggctatgtggacgtgttgacccttctgcgtcgtgtcatgctggacacctctaacacgctcttcttgaggatccctttggacgaaagtgctatcgtggttaaaatccaaggttattttgatgcatggcaagctctcctcatcaaaccagacatcttctttaagatttcttggctatacaaaaagtatgagaagtctgtcaaggatttgaaagatgccatagaagttctgatagcagaaaaaagacgcaggatttccacagaagagaaactggaagaatgtatggactttgccactgagttgattttagcagagaaacgtggtgacctgacaagagagaatgtgaaccagtgcatattggaaatgctgatcgcagctcctgacaccatgtctgtctctttgttcttcatgctatttctcattgcaaagcaccctaatgttgaagaggcaataataaaggaaatccagactgttattggtgagagagacataaagattgatgatatacaaaaattaaaagtgatggaaaacttcatttatgagagcatgcggtaccagcctgtcgtggacttggtcatgcgcaaagccttagaagatgatgtaatcgatggctacccagtgaaaaaggggacaaacattatcctgaatattggaaggatgcacagactcgagtttttccccaaacccaatgaatttactcttgaaaattttgcaaagaatgttccttataggtactttcagccatttggctttgggccccgtggctgtgcaggaaagtacatcgccatggtgatgatgaaagccatcctcgttacacttctgagacgattccacgtgaagacattgcaaggacagtgtgttgagagcatacagaagatacacgacttgtccttgcacccagatgagactaaaaacatgctggaaatgatctttaccccaagaaactcagacaggtgtctggaacactagagaaggctggtcagtacccactctggagcatttctcatcagtagttcacatacaaatcatccatccttgccaatagtgtcatcctcacagtgaacactcagtggcccatggcattttataggcatacctcctatgggttgtcaccaagctaggtgctattggtcatctgctcctgttcacaccagagaaccaggctacaagagaaaaagcagaggccaagagtttgagggagaaatagtcggtgaagaaaccgtatccataaagacccgattccaccaaatgtgctttgagaaggataggccttcattaacaaaatgtatgtctggttccccagtagagctctactgcctcaacccaaggggatttttatgtctggggcagaaacactcaagttgattagaaagaccaggccaatgtcagggtacctggggccaaacccacctgctagtgtgaattaaagtactttaattttgttttctgtggaggtggaaaagcaacattcatagtctttggagaaatgcttagaaattcagcatttgacccttgctgtgaattaagcccaattaattcctgtttgtctacatatgatctgtctgtggcaaaagtttaatcagaggaaattctttcccagtctgtcgatttatgcctcagccacttgcctgtgctacaattcattgtgttacctgtagattcaggtaatacaaactatatataatcatcaagtaatacaaactaatttagtaatagcctgggttaagtattattagggccctgtgtctgctgtagaaaaaaaaattcacatgatgcacttcaaattcaaataaaaatccttttggcatgttcccatttttgcttagctcaattagtgtggctaaccaagagataactgtaaatgtgacattgatttgctcttactacagcttcagtgattgggggaggaaaagtcccaacccaatgggctcaaacttctaaggggtactcctctcatccccttatccttctccctcgacattttctccctctttcttcccatgaccccaaagccaagggcaacagatcagtaaagaacgtggtcagagtagaacccctgaagtattttttaatcctacctcaaaatttaacagttacctgagagatttaacattatctagttcattgaatcattgtatgtggtcatggataaattgcacaccttggaattcgctttctaaaggaaatcaaatgaatggaggaactttccaaacaccactttacttgtgttatatagccaatataactatctctactgaatgtcattgaaaaactaaaaaattaaacttatttacaaatacatcctactgtctagtaataagctgagtataagatgacagtgtaatctccctgaaagcaggagctactttctttcttttgtaatctatttccatccccatttccctgtcctgtctccctgtattcactcccaagctcagttctgaatagacattcctgctcagagatactcccaactgatgcagaaaccaaataaagaggtaggtattccaagaattcaagaatggacattagtaaagaataaaacatttatttgagcttggaattatttggatcatctatatggcctaaaaatatatggactatgcctgtgtacctgaatacgtatgtagtcaggtcaagacaatcatccaaataacttagacccctaaaagcaaggccaggatttgcaatttaatgtgtcccaattaattcacttgaaaattagtaacactctgtttacgttgcctctggctggagctgcatggtggaagaagcccaactttggatccatgtacttcacccatccaatactcttgggacatttatgtgtattttatctgtatatatgaagccaatgtctatgtctacacagtcaaagtgaaatgcatgtttgatatagctgtacatagatatctattttgcaggt

SEQ ID NO: 307408 - DNA, 3127 bp, Homo sapiens
  misc_feature (24)..(24): n is a, c, g, or t
  misc_feature (3089)..(3089): n is a, c, g, or t
  misc_feature (3124)..(3124): n is a, c, g, or t
aaacagtgtatcaacgcagagtgnccattacggccgggggagtttctggagggctgaacacgtggaggcaaacaggaaggtgaagaagaacttatcctatcaggacggaaggtcctgtgctcgggatcttccagacgtcgcgactctaaattgccccctctgaggtcaaggaacacaagatggttttggaaatgctgaacccgatacattataacatcaccagcatcgtgcctgaagccatgcctgctgccaccatgccagtcctgctcctcactggcctttttctcttggtgtggaattatgagggcacatcctcaataccaggtcctggctactgcatgggaattggacccctcatctcccacggcagattcctgtggatggggatcggcagtgcctgcaactactacaaccgggtatatggagaattcatgcgagtctggatctctggagaggaaacactcattatcagcaagtcctcaagtatgttccacataatgaagcacaatcattacagctctcgattcggcagcaaacttgggctgcagtgcatcggtatgcatgagaaaggcatcatatttaacaacaatccagagctctggaaaacaactcgacccttctttatgaaagctctgtcaggccccggccttgttcgtatggtcacagtctgtgctgaatccctcaaaacacatctggacaggttggaggaggtgaccaatgaatcgggctatgtggacgtgttgacccttctgcgtcgtgtcatgctggacacctctaacacgctcttcttgaggatccctttggacgaaagtgctatcgtggttaaaatccaaggttattttgatgcatggcaagctctcctcatcaaaccagacatcttctttaagatttcttggctatacaaaaagtatgagaagtctgtcaaggatttgaaagatgccatagaagttctgatagcagaaaaaagacgcaggatttccacagaagagaaactggaagaatgtatggactttgccactgagttgattttagcagagaaacgtggtgacctgacaagagagaatgtgaaccagtgcatattggaaatgctgatcgcagctcctgacaccatgtctgtctctttgttcttcatgctatttctcattgcaaagcaccctaatgttgaagaggcaataataaaggaaatccagactgttattggtgagagagacataaagattgatgatatacaaaaattaaaagtgatggaaaacttcatttatgagagcatgcggtaccagcctgtcgtggacttggtcatgcgcaaagccttagaagatgatgtaatcgatggctacccagtgaaaaaggggacaaacattatcctgaatattggaaggatgcacagactcgagtttttccccaaacccaatgaatttactcttgaaaattttgcaaagaatgttccttataggtactttcagccatttggctttgggccccgtggctgtgcaggaaagtacatcgccatggtgatgatgaaagccatcctcgttacacttctgagacgattccacgtgaagacattgcaaggacagtgtgttgagagcatacagaagatacacgacttgtccttgcacccagatgagactaaaaacatgctggaaatgatctttaccccaagaaactcagacaggtgtctggaacactagagaaggctggtcagtacccactctggagcatttctcatcagtagttcacatacaaatcatccatccttgccaatagtgtcatcctcacagtgaacactcagtggcccatggcattttataggcatacctcctatgggttgtcaccaagctaggtgctattggtcatctgctcctgttcacaccagagaaccaggctacaagagaaaaagcagaggccaagagtttgagggagaaatagtcggtgaagaaaccgtatccataaagacccgattccaccaaatgtgctttgagaaggataggccttcattaacaaaatgtatgtctggttccccagtagagctctactgcctcaacccaaggggatttttatgtctggggcagaaacactcaagttgattagaaagaccaggccaatgtcagggtacctggggccaaacccacctgctagtgtgaattaaagtactttaattttgttttctgtggaggtggaaaagcaacattcatagtctttggagaaatgcttagaaattcagcatttgacccttgctgtgaattaagcccaattaattcctgtttgtctacatatgatctgtctgtggcaaaagtttaatcagaggaaattctttcccagtctgtcgatttatgcctcagccacttgcctgtgctacaattcattgtgttacctgtagattcaggtaatacaaactatatataatcatcaagtaatacaaactaatttagtaatagcctgggttaagtattattagggccctgtgtctgctgtagaaaaaaaaattcacatgatgcacttcaaattcaaataaaaatccttttggcatgttcccatttttgcttagctcaattagtgtggctaaccaagagataactgtaaatgtgacattgatttgctcttactacagcttcagtgattgggggaggaaaagtcccaacccaatgggctcaaacttctaaggggtactcctctcatccccttatccttctccctcgacattttctccctctttcttcccatgaccccaaagccaagggcaacagatcagtaaagaacgtggtcagagtagaacccctgaagtattttttaatcctacctcaaaatttaacagttacctgagagatttaacattatctagttcattgaatcattgtatgtggtcatggataaattgcacaccttggaattcgctttctaaaggaaatcaaatgaatggaggaactttccaaacaccactttacttgtgttatatagccaatataactatctctactgaatgtcattgaaaaactaaaaaattaaacttatttacaaataaaaaaaaaaaaaaaaaaaaaaaaaaaaaaaaaaaaaaaaaaaataaaaaaaaaaaaaaaaaaaaaaanaaaaaaaaaaaaaaaaaaaaaaaaaaaaaaaaaanaag

SEQ ID NO: 307409 - DNA, 3158 bp, Homo sapiens
  misc_feature (24)..(24): n is a, c, g, or t
  misc_feature (3120)..(3120): n is a, c, g, or t
  misc_feature (3155)..(3155): n is a, c, g, or t
aaacagtgtatcaacgcagagtgnccattacggccgggggagtttctggagggctgaacacgtggaggcaaacaggaaggtgaagaagaacttatcctatcaggacggaaggtcctgtgctcgggatcttccagacgtcgcgactctaaattgccccctctgaggtcaaggaacacaagatggttttggaaatgctgaacccgatacattataacatcaccagcatcgtgcctgaagccatgcctgctgccaccatgccagtcctgctcctcactggcctttttctcttggtgtggaattatgagggcacatcctcaataccaggtcctggctactgcatgggaattggacccctcatctcccacggcagattcctgtggatggggatcggcagtgcctgcaactactacaaccgggtatatggagaattcatgcgagtctggatctctggagaggaaacactcattatcagcaagtcctcaagtatgttccacataatgaagcacaatcattacagctctcgattcggcagcaaacttgggctgcagtgcatcggtatgcatgagaaaggcatcatatttaacaacaatccagagctctggaaaacaactcgacccttctttatgaaagctctgtcaggccccggccttgttcgtatggtcacagtctgtgctgaatccctcaaaacacatctggacaggttggaggaggtgaccaatgaatcgggctatgtggacgtgttgacccttctgcgtcgtgtcatgctggacacctctaacacgctcttcttgaggatccctttggacgaaagtgctatcgtggttaaaatccaaggttattttgatgcatggcaagctctcctcatcaaaccagacatcttctttaagatttcttggctatacaaaaagtatgagaagtctgtcaaggatttgaaagatgccatagaagttctgatagcagaaaaaagacgcaggatttccacagaagagaaactggaagaatgtatggactttgccactgagttgattttagcagagaaacgtggtgacctgacaagagagaatgtgaaccagtgcatattggaaatgctgatcgcagctcctgacaccatgtctgtctctttgttcttcatgctatttctcattgcaaagcaccctaatgttgaagaggcaataataaaggaaatccagactgttattggtgagagagacataaagattgatgatatacaaaaattaaaagtgatggaaaacttcatttatgagagcatgcggtaccagcctgtcgtggacttggtcatgcgcaaagccttagaagatgatgtaatcgatggctacccagtgaaaaaggggacaaacattatcctgaatattggaaggatgcacagactcgagtttttccccaaacccaatgaatttactcttgaaaattttgcaaagaatgttccttataggtactttcagccatttggctttgggccccgtggctgtgcaggaaagtacatcgccatggtgatgatgaaagccatcctcgttacacttctgagacgattccacgtgaagacattgcaaggacagtgtgttgagagcatacagaagatacacgacttgtccttgcacccagatgagactaaaaacatgctggaaatgatctttaccccaagaaactcagacaggtgtctggaacactagagaaggctggtcagtacccactctggagcatttctcatcagtagttcacatacaaatcatccatccttgccaatagtgtcatcctcacagtgaacactcagtggcccatggcattttataggcatacctcctatgggttgtcaccaagctaggtgctattggtcatctgctcctgttcacaccagagaaccaggctacaagagaaaaagcagaggccaagagtttgagggagaaatagtcggtgaagaaaccgtatccataaagacccgattccaccaaatgtgctttgagaaggataggccttcattaacaaaatgtatgtctggttccccagtagagctctactgcctcaacccaaggggatttttatgtctggggcagaaacactcaagttgattagaaagaccaggccaatgtcagggtacctggggccaaacccacctgctagtgtgaattaaagtactttaattttgttttctgtggaggtggaaaagcaacattcatagtctttggagaaatgcttagaaattcagcatttgacccttgctgtgaattaagcccaattaattcctgtttgtctacatatgatctgtctgtggcaaaagtttaatcagaggaaattctttcccagtctgtcgatttatgcctcagccacttgcctgtgctacaattcattgtgttacctgtagattcaggtaatacaaactatatataatcatcaagtaatacaaactaatttagtaatagcctgggttaagtattattagggccctgtgtctgctgtagaaaaaaaaattcacatgatgcacttcaaattcaaataaaaatccttttggcatgttcccatttttgcttagctcaattagtgtggctaaccaagagataactgtaaatgtgacattgatttgctcttactacagcttcagtgattgggggaggaaaagtcccaacccaatgggctcaaacttctaaggggtactcctctcatccccttatccttctccctcgacattttctccctctttcttcccatgaccccaaagccaagggcaacagatcagtaaagaacgtggtcagagtagaacccctgaagtattttttaatcctacctcaaaatttaacagttacctgagagatttaacattatctagttcattgaatcattgtatgtggtcatggataaattgcacaccttggaattcgctttctaaaggaaatcaaatgaatggaggaactttccaaacaccactttacttgtgttatatagccaatataactatctctactgaatgtcattgaaaaactaaaaaattaaacttatttacaaataaaaaaaaaaaaaaaaaaaaaaaaaaaaaaaaaaaaaaaaaaaataaaaaaaaaaaaaaaaaaaaaaaaaaaaaaaaaaaaaaaaaaaaaaaaaaaaaanaaaaaaaaaaaaaaaaaaaaaaaaaaaaaaaaaanaag

SEQ ID NO: 307410 - DNA, 3109 bp, Homo sapiens
  misc_feature (24)..(24): n is a, c, g, or t
  misc_feature (3071)..(3071): n is a, c, g, or t
  misc_feature (3106)..(3106): n is a, c, g, or t
aaacagtgtatcaacgcagagtgnccattacggccgggggagtttctggagggctgaacacgtggaggcaaacaggaaggtgaagaagaacttatcctatcaggacggaaggtcctgtgctcgggatcttccagacgtcgcgactctaaattgccccctctgaggtcaaggaacacaagatggttttggaaatgctgaacccgatacattataacatcaccagcatcgtgcctgaagccatgcctgctgccaccatgccagtcctgctcctcactggcctttttctcttggtgtggaattatgagggcacatcctcaataccaggtcctggctactgcatgggaattggacccctcatctcccacggcagattcctgtggatggggatcggcagtgcctgcaactactacaaccgggtatatggagaattcatgcgagtctggatctctggagaggaaacactcattatcagcaagtcctcaagtatgttccacataatgaagcacaatcattacagctctcgattcggcagcaaacttgggctgcagtgcatcggtatgcatgagaaaggcatcatatttaacaacaatccagagctctggaaaacaactcgacccttctttatgaaagctctgtcaggccccggccttgttcgtatggtcacagtctgtgctgaatccctcaaaacacatctggacaggttggaggaggtgaccaatgaatcgggctatgtggacgtgttgacccttctgcgtcgtgtcatgctggacacctctaacacgctcttcttgaggatccctttggacgaaagtgctatcgtggttaaaatccaaggttattttgatgcatggcaagctctcctcatcaaaccagacatcttctttaagatttcttggctatacaaaaagtatgagaagtctgtcaaggatttgaaagatgccatagaagttctgatagcagaaaaaagacgcaggatttccacagaagagaaactggaagaatgtatggactttgccactgagttgattttagcagagaaacgtggtgacctgacaagagagaatgtgaaccagtgcatattggaaatgctgatcgcagctcctgacaccatgtctgtctctttgttcttcatgctatttctcattgcaaagcaccctaatgttgaagaggcaataataaaggaaatccagactgttattggtgagagagacataaagattgatgatatacaaaaattaaaagtgatggaaaacttcatttatgagagcatgcggtaccagcctgtcgtggacttggtcatgcgcaaagccttagaagatgatgtaatcgatggctacccagtgaaaaaggggacaaacattatcctgaatattggaaggatgcacagactcgagtttttccccaaacccaatgaatttactcttgaaaattttgcaaagaatgttccttataggtactttcagccatttggctttgggccccgtggctgtgcaggaaagtacatcgccatggtgatgatgaaagccatcctcgttacacttctgagacgattccacgtgaagacattgcaaggacagtgtgttgagagcatacagaagatacacgacttgtccttgcacccagatgagactaaaaacatgctggaaatgatctttaccccaagaaactcagacaggtgtctggaacactagagaaggctggtcagtacccactctggagcatttctcatcagtagttcacatacaaatcatccatccttgccaatagtgtcatcctcacagtgaacactcagtggcccatggcattttataggcatacctcctatgggttgtcaccaagctaggtgctattggtcatctgctcctgttcacaccagagaaccaggctacaagagaaaaagcagaggccaagagtttgagggagaaatagtcggtgaagaaaccgtatccataaagacccgattccaccaaatgtgctttgagaaggataggccttcattaacaaaatgtatgtctggttccccagtagagctctactgcctcaacccaaggggatttttatgtctggggcagaaacactcaagttgattagaaagaccaggccaatgtcagggtacctggggccaaacccacctgctagtgtgaattaaagtactttaattttgttttctgtggaggtggaaaagcaacattcatagtctttggagaaatgcttagaaattcagcatttgacccttgctgtgaattaagcccaattaattcctgtttgtctacatatgatctgtctgtggcaaaagtttaatcagaggaaattctttcccagtctgtcgatttatgcctcagccacttgcctgtgctacaattcattgtgttacctgtagattcaggtaatacaaactatatataatcatcaagtaatacaaactaatttagtaatagcctgggttaagtattattagggccctgtgtctgctgtagaaaaaaaaattcacatgatgcacttcaaattcaaataaaaatccttttggcatgttcccatttttgcttagctcaattagtgtggctaaccaagagataactgtaaatgtgacattgatttgctcttactacagcttcagtgattgggggaggaaaagtcccaacccaatgggctcaaacttctaaggggtactcctctcatccccttatccttctccctcgacattttctccctctttcttcccatgaccccaaagccaagggcaacagatcagtaaagaacgtggtcagagtagaacccctgaagtattttttaatcctacctcaaaatttaacagttacctgagagatttaacattatctagttcattgaatcattgtatgtggtcatggataaattgcacaccttggaattcgctttctaaaggaaatcaaatgaatggaggaactttccaaacaccactttacttgtgttatatagccaatataactatctctactgaatgtcattgaaaaactaaaaaattaaacttatttacaaataggtaaaaaaaaaaaaaaaaaaaaaaaaaaaaaaaaaaaaaaaaaaaaaanaaaaaaaaaaaaaaaaaaaaaaaaaaaaaaaaaanaag

SEQ ID NO: 307411 - DNA, 3124 bp, Homo sapiens
  misc_feature (24)..(24): n is a, c, g, or t
aaacagtgtatcaacgcagagtgnccattacggccgggggagtttctggagggctgaacacgtggaggcaaacaggaaggtgaagaagaacttatcctatcaggacggaaggtcctgtgctcgggatcttccagacgtcgcgactctaaattgccccctctgaggtcaaggaacacaagatggttttggaaatgctgaacccgatacattataacatcaccagcatcgtgcctgaagccatgcctgctgccaccatgccagtcctgctcctcactggcctttttctcttggtgtggaattatgagggcacatcctcaataccaggtcctggctactgcatgggaattggacccctcatctcccacggcagattcctgtggatggggatcggcagtgcctgcaactactacaaccgggtatatggagaattcatgcgagtctggatctctggagaggaaacactcattatcagcaagtcctcaagtatgttccacataatgaagcacaatcattacagctctcgattcggcagcaaacttgggctgcagtgcatcggtatgcatgagaaaggcatcatatttaacaacaatccagagctctggaaaacaactcgacccttctttatgaaagctctgtcaggccccggccttgttcgtatggtcacagtctgtgctgaatccctcaaaacacatctggacaggttggaggaggtgaccaatgaatcgggctatgtggacgtgttgacccttctgcgtcgtgtcatgctggacacctctaacacgctcttcttgaggatccctttggacgaaagtgctatcgtggttaaaatccaaggttattttgatgcatggcaagctctcctcatcaaaccagacatcttctttaagatttcttggctatacaaaaagtatgagaagtctgtcaaggatttgaaagatgccatagaagttctgatagcagaaaaaagacgcaggatttccacagaagagaaactggaagaatgtatggactttgccactgagttgattttagcagagaaacgtggtgacctgacaagagagaatgtgaaccagtgcatattggaaatgctgatcgcagctcctgacaccatgtctgtctctttgttcttcatgctatttctcattgcaaagcaccctaatgttgaagaggcaataataaaggaaatccagactgttattggtgagagagacataaagattgatgatatacaaaaattaaaagtgatggaaaacttcatttatgagagcatgcggtaccagcctgtcgtggacttggtcatgcgcaaagccttagaagatgatgtaatcgatggctacccagtgaaaaaggggacaaacattatcctgaatattggaaggatgcacagactcgagtttttccccaaacccaatgaatttactcttgaaaattttgcaaagaatgttccttataggtactttcagccatttggctttgggccccgtggctgtgcaggaaagtacatcgccatggtgatgatgaaagccatcctcgttacacttctgagacgattccacgtgaagacattgcaaggacagtgtgttgagagcatacagaagatacacgacttgtccttgcacccagatgagactaaaaacatgctggaaatgatctttaccccaagaaactcagacaggtgtctggaacactagagaaggctggtcagtacccactctggagcatttctcatcagtagttcacatacaaatcatccatccttgccaatagtgtcatcctcacagtgaacactcagtggcccatggcattttataggcatacctcctatgggttgtcaccaagctaggtgctattggtcatctgctcctgttcacaccagagaaccaggctacaagagaaaaagcagaggccaagagtttgagggagaaatagtcggtgaagaaaccgtatccataaagacccgattccaccaaatgtgctttgagaaggataggccttcattaacaaaatgtatgtctggttccccagtagagctctactgcctcaacccaaggggatttttatgtctggggcagaaacactcaagttgattagaaagaccaggccaatgtcagggtacctggggccaaacccacctgctagtgtgaattaaagtactttaattttgttttctgtggaggtggaaaagcaacattcatagtctttggagaaatgcttagaaattcagcatttgacccttgctgtgaattaagcccaattaattcctgtttgtctacatatgatctgtctgtggcaaaagtttaatcagaggaaattctttcccagtctgtcgatttatgcctcagccacttgcctgtgctacaattcattgtgttacctgtagattcaggtaatacaaactatatataatcatcaagtaatacaaactaatttagtaatagcctgggttaagtattattagggccctgtgtctgctgtagaaaaaaaaattcacatgatgcacttcaaattcaaataaaaatccttttggcatgttcccatttttgcttagctcaattagtgtggctaaccaagagataactgtaaatgtgacattgatttgctcttactacagcttcagtgattgggggaggaaaagtcccaacccaatgggctcaaacttctaaggggtactcctctcatccccttatccttctccctcgacattttctccctctttcttcccatgaccccaaagccaagggcaacagatcagtaaagaacgtggtcagagtagaacccctgaagtattttttaatcctacctcaaaatttaacagttacctgagagatttaacattatctagttcattgaatcattgtatgtggtcatggataaattgcacaccttggaattcgctttctaaaggaaatcaaatgaatggaggaactttccaaacaccactttacttgtgttatatagccaatataactatctctactgaaaaaggtgcggaatcagcacatttagtgggagtgggggggaggtcaggactatgatcggataagggatttaataccttagagcaaaatctatagagtctcgctcagtttatcagtttaaatggcttgaggctaatggggggtgt

SEQ ID NO: 307412 - DNA, 3366 bp, Homo sapiens
  misc_feature (24)..(24): n is a, c, g, or t
aaacagtgtatcaacgcagagtgnccattacggccgggggagtttctggagggctgaacacgtggaggcaaacaggaaggtgaagaagaacttatcctatcaggacggaaggtcctgtgctcgggatcttccagacgtcgcgactctaaattgccccctctgaggtcaaggaacacaagatggttttggaaatgctgaacccgatacattataacatcaccagcatcgtgcctgaagccatgcctgctgccaccatgccagtcctgctcctcactggcctttttctcttggtgtggaattatgagggcacatcctcaataccaggtcctggctactgcatgggaattggacccctcatctcccacggcagattcctgtggatggggatcggcagtgcctgcaactactacaaccgggtatatggagaattcatgcgagtctggatctctggagaggaaacactcattatcagcaagtcctcaagtatgttccacataatgaagcacaatcattacagctctcgattcggcagcaaacttgggctgcagtgcatcggtatgcatgagaaaggcatcatatttaacaacaatccagagctctggaaaacaactcgacccttctttatgaaagctctgtcaggccccggccttgttcgtatggtcacagtctgtgctgaatccctcaaaacacatctggacaggttggaggaggtgaccaatgaatcgggctatgtggacgtgttgacccttctgcgtcgtgtcatgctggacacctctaacacgctcttcttgaggatccctttggacgaaagtgctatcgtggttaaaatccaaggttattttgatgcatggcaagctctcctcatcaaaccagacatcttctttaagatttcttggctatacaaaaagtatgagaagtctgtcaaggatttgaaagatgccatagaagttctgatagcagaaaaaagacgcaggatttccacagaagagaaactggaagaatgtatggactttgccactgagttgattttagcagagaaacgtggtgacctgacaagagagaatgtgaaccagtgcatattggaaatgctgatcgcagctcctgacaccatgtctgtctctttgttcttcatgctatttctcattgcaaagcaccctaatgttgaagaggcaataataaaggaaatccagactgttattggtgagagagacataaagattgatgatatacaaaaattaaaagtgatggaaaacttcatttatgagagcatgcggtaccagcctgtcgtggacttggtcatgcgcaaagccttagaagatgatgtaatcgatggctacccagtgaaaaaggggacaaacattatcctgaatattggaaggatgcacagactcgagtttttccccaaacccaatgaatttactcttgaaaattttgcaaagaatgttccttataggtactttcagccatttggctttgggccccgtggctgtgcaggaaagtacatcgccatggtgatgatgaaagccatcctcgttacacttctgagacgattccacgtgaagacattgcaaggacagtgtgttgagagcatacagaagatacacgacttgtccttgcacccagatgagactaaaaacatgctggaaatgatctttaccccaagaaactcagacaggtgtctggaacactagagaaggctggtcagtacccactctggagcatttctcatcagtagttcacatacaaatcatccatccttgccaatagtgtcatcctcacagtgaacactcagtggcccatggcattttataggcatacctcctatgggttgtcaccaagctaggtgctattggtcatctgctcctgttcacaccagagaaccaggctacaagagaaaaagcagaggccaagagtttgagggagaaatagtcggtgaagaaaccgtatccataaagacccgattccaccaaatgtgctttgagaaggataggccttcattaacaaaatgtatgtctggttccccagtagagctctactgcctcaacccaaggggatttttatgtctggggcagaaacactcaagttgattagaaagaccaggccaatgtcagggtacctggggccaaacccacctgctagtgtgaattaaagtactttaattttgttttctgtggaggtggaaaagcaacattcatagtctttggagaaatgcttagaaattcagcatttgacccttgctgtgaattaagcccaattaattcctgtttgtctacatatgatctgtctgtggcaaaagtttaatcagaggaaattctttcccagtctgtcgatttatgcctcagccacttgcctgtgctacaattcattgtgttacctgtagattcaggtaatacaaactatatataatcatcaagtaatacaaactaatttagtaatagcctgggttaagtattattagggccctgtgtctgctgtagaaaaaaaaattcacatgatgcacttcaaattcaaataaaaatccttttggcatgttcccatttttgcttagctcaattagtgtggctaaccaagagataactgtaaatgtgacattgatttgctcttactacagcttcagtgattgggggaggaaaagtcccaacccaatgggctcaaacttctaaggggtactcctctcatccccttatccttctccctcgacattttctccctctttcttcccatgaccccaaagccaagggcaacagatcagtaaagaacgtggtcagagtagaacccctgaagtattttttaatcctacctcaaaatttaacagttacctgagagatttaacattatctagttcattgaatcattgtatgtggtcatggataaattgcacaccttggaattcgctttctaaaggaaatcaaatgaatggaggaactttccaaacaccactttacttgtgttatatagccaatataactatctctactgaagcggaatacagcacattaagtcaagctaggtgctattggtcatctgctcctgttcacaccagagaaccaggctacaagagaaaaagcagaggccaagagtttgagggagaaatagtcggtgaagaaaccgtatccataaagacccgattccaccaaatgtgctttgagaaggataggccttcatcaacaaaatgtatgtctggttccccagtagagctatactgcctcaacccaaggggatattttaatgtctggggcagaaacactcaagttgattagaaagaccagccaatgtcagtgtatctgggtccttaacccacttggctagtgtgaattatagtacaatgatatttttttttgtggagataggtcagaacatagaggg

SEQ ID NO: 307413 - DNA, 3265 bp, Homo sapiens
  misc_feature (24)..(24): n is a, c, g, or t
aaacagtgtatcaacgcagagtgnccattacggccgggggagtttctggagggctgaacacgtggaggcaaacaggaaggtgaagaagaacttatcctatcaggacggaaggtcctgtgctcgggatcttccagacgtcgccatgtggaaaagctccctgacttccccgcctgccccacctgctgatttctcaggaccgctgataacagctttcatgtggaacttgggattaatatcaagcaagccatggattttgtctccactgaacttgggcatcatggacagtttccattccagcagttaagggcttcctgactttcaacagtggtgctgatcccagttctgaagagtggaacatcagagagcctcccctcctcagccacttgactctaaattgccccctctgaggtcaaggaacacaagatggttttggaaatgctgaacccgatacattataacatcaccagcatcgtgcctgaagccatgcctgctgccaccatgccagtcctgctcctcactggcctttttctcttggtgtggaattatgagggcacatcctcaataccaggtcctggctactgcatgggaattggacccctcatctcccacggcagattcctgtggatggggatcggcagtgcctgcaactactacaaccgggtatatggagaattcatgcgagtctggatctctggagaggaaacactcattatcagcaagtcctcaagtatgttccacataatgaagcacaatcattacagctctcgattcggcagcaaacttgggctgcagtgcatcggtatgcatgagaaaggcatcatatttaacaacaatccagagctctggaaaacaactcgacccttctttatgaaagctctgtcaggccccggccttgttcgtatggtcacagtctgtgctgaatccctcaaaacacatctggacaggttggaggaggtgaccaatgaatcgggctatgtggacgtgttgacccttctgcgtcgtgtcatgctggacacctctaacacgctcttcttgaggatccctttggacgaaagtgctatcgtggttaaaatccaaggttattttgatgcatggcaagctctcctcatcaaaccagacatcttctttaagatttcttggctatacaaaaagtatgagaagtctgtcaaggatttgaaagatgccatagaagttctgatagcagaaaaaagacgcaggatttccacagaagagaaactggaagaatgtatggactttgccactgagttgattttagcagagaaacgtggtgacctgacaagagagaatgtgaaccagtgcatattggaaatgctgatcgcagctcctgacaccatgtctgtctctttgttcttcatgctatttctcattgcaaagcaccctaatgttgaagaggcaataataaaggaaatccagactgttattggtgagagagacataaagattgatgatatacaaaaattaaaagtgatggaaaacttcatttatgagagcatgcggtaccagcctgtcgtggacttggtcatgcgcaaagccttagaagatgatgtaatcgatggctacccagtgaaaaaggggacaaacattatcctgaatattggaaggatgcacagactcgagtttttccccaaacccaatgaatttactcttgaaaattttgcaaagaatgttccttataggtactttcagccatttggctttgggccccgtggctgtgcaggaaagtacatcgccatggtgatgatgaaagccatcctcgttacacttctgagacgattccacgtgaagacattgcaaggacagtgtgttgagagcatacagaagatacacgacttgtccttgcacccagatgagactaaaaacatgctggaaatgatctttaccccaagaaactcagacaggtgtctggaacactagagaaggctggtcagtacccactctggagcatttctcatcagtagttcacatacaaatcatccatccttgccaatagtgtcatcctcacagtgaacactcagtggcccatggcattttataggcatacctcctatgggttgtcaccaagctaggtgctattggtcatctgctcctgttcacaccagagaaccaggctacaagagaaaaagcagaggccaagagtttgagggagaaatagtcggtgaagaaaccgtatccataaagacccgattccaccaaatgtgctttgagaaggataggccttcattaacaaaatgtatgtctggttccccagtagagctctactgcctcaacccaaggggatttttatgtctggggcagaaacactcaagttgattagaaagaccaggccaatgtcagggtacctggggccaaacccacctgctagtgtgaattaaagtactttaattttgttttctgtggaggtggaaaagcaacattcatagtctttggagaaatgcttagaaattcagcatttgacccttgctgtgaattaagcccaattaattcctgtttgtctacatatgatctgtctgtggcaaaagtttaatcagaggaaattctttcccagtctgtcgatttatgcctcagccacttgcctgtgctacaattcattgtgttacctgtagattcaggtaatacaaactatatataatcatcaagtaatacaaactaatttagtaatagcctgggttaagtattattagggccctgtgtctgctgtagaaaaaaaaattcacatgatgcacttcaaattcaaataaaaatccttttggcatgttcccatttttgcttagctcaattagtgtggctaaccaagagataactgtaaatgtgacattgatttgctcttactacagcttcagtgattgggggaggaaaagtcccaacccaatgggctcaaacttctaaggggtactcctctcatccccttatccttctccctcgacattttctccctctttcttcccatgaccccaaagccaagggcaacagatcagtaaagaacgtggtcagagtagaacccctgaagtattttttaatcctacctcaaaatttaacagttacctgagagatttaacattatctagttcattgaatcattgtatgtggtcatggataaattgcacaccttggaattcgctttctaaaggaaatcaaatgaatggaggaactttccaaacaccactttacttgtgttatatagccaatataactatctctactgaatgtcattgaaaaactaaaaaattaaacttatttacaaata

SEQ ID NO: 307414 - DNA, 3452 bp, Homo sapiens
gttagcatctttggaaaaattcctaaacttatttgggaacaaattgttattatatgaggctaatggtacctagaaataactagaataattcccaagaagttatgcctttataaaatattcatctttggcaatgaccagaaatgtctacctttacataaattagtgtgtccactctttttggggctggtggggtgtcttctgactggccttcatgtgtgggaatagccccattccaagtgctgcttgattgtaaaattggaccaagcctgtcatcacactgcccagtctttgggtagggggagctgagagattctgtgaatattgtcagaagggacatgtttttggatagggagggaaaaaaagcaagatccccaggtcccctgattttaaccatgacgtagaaaactccacacagaccctcctcccttccgccctggcacagagtcccgttgtcctttcataggcggtgtcagaaaccctgtggtgaaattcagcctgtggattccagaaatttggagtgttcttggggggaaaaatccgcacacacaaagcaacatttggaaatccctgtggactctaaattgccccctctgaggtcaaggaacacaagatggttttggaaatgctgaacccgatacattataacatcaccagcatcgtgcctgaagccatgcctgctgccaccatgccagtcctgctcctcactggcctttttctcttggtgtggaattatgagggcacatcctcaataccaggtcctggctactgcatgggaattggacccctcatctcccacggcagattcctgtggatggggatcggcagtgcctgcaactactacaaccgggtatatggagaattcatgcgagtctggatctctggagaggaaacactcattatcagcaagtcctcaagtatgttccacataatgaagcacaatcattacagctctcgattcggcagcaaacttgggctgcagtgcatcggtatgcatgagaaaggcatcatatttaacaacaatccagagctctggaaaacaactcgacccttctttatgaaagctctgtcaggccccggccttgttcgtatggtcacagtctgtgctgaatccctcaaaacacatctggacaggttggaggaggtgaccaatgaatcgggctatgtggacgtgttgacccttctgcgtcgtgtcatgctggacacctctaacacgctcttcttgaggatccctttggacgaaagtgctatcgtggttaaaatccaaggttattttgatgcatggcaagctctcctcatcaaaccagacatcttctttaagatttcttggctatacaaaaagtatgagaagtctgtcaaggatttgaaagatgccatagaagttctgatagcagaaaaaagacgcaggatttccacagaagagaaactggaagaatgtatggactttgccactgagttgattttagcagagaaacgtggtgacctgacaagagagaatgtgaaccagtgcatattggaaatgctgatcgcagctcctgacaccatgtctgtctctttgttcttcatgctatttctcattgcaaagcaccctaatgttgaagaggcaataataaaggaaatccagactgttattggtgagagagacataaagattgatgatatacaaaaattaaaagtgatggaaaacttcatttatgagagcatgcggtaccagcctgtcgtggacttggtcatgcgcaaagccttagaagatgatgtaatcgatggctacccagtgaaaaaggggacaaacattatcctgaatattggaaggatgcacagactcgagtttttccccaaacccaatgaatttactcttgaaaattttgcaaagaatgttccttataggtactttcagccatttggctttgggccccgtggctgtgcaggaaagtacatcgccatggtgatgatgaaagccatcctcgttacacttctgagacgattccacgtgaagacattgcaaggacagtgtgttgagagcatacagaagatacacgacttgtccttgcacccagatgagactaaaaacatgctggaaatgatctttaccccaagaaactcagacaggtgtctggaacactagagaaggctggtcagtacccactctggagcatttctcatcagtagttcacatacaaatcatccatccttgccaatagtgtcatcctcacagtgaacactcagtggcccatggcattttataggcatacctcctatgggttgtcaccaagctaggtgctattggtcatctgctcctgttcacaccagagaaccaggctacaagagaaaaagcagaggccaagagtttgagggagaaatagtcggtgaagaaaccgtatccataaagacccgattccaccaaatgtgctttgagaaggataggccttcattaacaaaatgtatgtctggttccccagtagagctctactgcctcaacccaaggggatttttatgtctggggcagaaacactcaagttgattagaaagaccaggccaatgtcagggtacctggggccaaacccacctgctagtgtgaattaaagtactttaattttgttttctgtggaggtggaaaagcaacattcatagtctttggagaaatgcttagaaattcagcatttgacccttgctgtgaattaagcccaattaattcctgtttgtctacatatgatctgtctgtggcaaaagtttaatcagaggaaattctttcccagtctgtcgatttatgcctcagccacttgcctgtgctacaattcattgtgttacctgtagattcaggtaatacaaactatatataatcatcaagtaatacaaactaatttagtaatagcctgggttaagtattattagggccctgtgtctgctgtagaaaaaaaaattcacatgatgcacttcaaattcaaataaaaatccttttggcatgttcccatttttgcttagctcaattagtgtggctaaccaagagataactgtaaatgtgacattgatttgctcttactacagcttcagtgattgggggaggaaaagtcccaacccaatgggctcaaacttctaaggggtactcctctcatccccttatccttctccctcgacattttctccctctttcttcccatgaccccaaagccaagggcaacagatcagtaaagaacgtggtcagagtagaacccctgaagtattttttaatcctacctcaaaatttaacagttacctgagagatttaacattatctagttcattgaatcattgtatgtggtcatggataaattgcacaccttggaattcgctttctaaaggaaatcaaatgaatggaggaactttccaaacaccactttacttgtgttatatagccaatataactatctctactgaatgtcattgaaaaactaaaaaattaaacttatttacaaata

SEQ ID NO: 307415 - DNA, 3082 bp, Homo sapiens
atctcggaaccactgtgaaagtcaggaagccttaactgctggaatggaaactgtccatgatgcccaagttcagtggagacaaaatccatggcttgcttgatattaatcccaagttccacatgaaagctgttatcagcggtcctgagaaatcagcaggtggggcaggcggggaagtcagggagcctcccctcctcagccacttgactctaaattgccccctctgaggtcaaggaacacaagatggttttggaaatgctgaacccgatacattataacatcaccagcatcgtgcctgaagccatgcctgctgccaccatgccagtcctgctcctcactggcctttttctcttggtgtggaattatgagggcacatcctcaataccaggtcctggctactgcatgggaattggacccctcatctcccacggcagattcctgtggatggggatcggcagtgcctgcaactactacaaccgggtatatggagaattcatgcgagtctggatctctggagaggaaacactcattatcagcaagtcctcaagtatgttccacataatgaagcacaatcattacagctctcgattcggcagcaaacttgggctgcagtgcatcggtatgcatgagaaaggcatcatatttaacaacaatccagagctctggaaaacaactcgacccttctttatgaaagctctgtcaggccccggccttgttcgtatggtcacagtctgtgctgaatccctcaaaacacatctggacaggttggaggaggtgaccaatgaatcgggctatgtggacgtgttgacccttctgcgtcgtgtcatgctggacacctctaacacgctcttcttgaggatccctttggacgaaagtgctatcgtggttaaaatccaaggttattttgatgcatggcaagctctcctcatcaaaccagacatcttctttaagatttcttggctatacaaaaagtatgagaagtctgtcaaggatttgaaagatgccatagaagttctgatagcagaaaaaagacgcaggatttccacagaagagaaactggaagaatgtatggactttgccactgagttgattttagcagagaaacgtggtgacctgacaagagagaatgtgaaccagtgcatattggaaatgctgatcgcagctcctgacaccatgtctgtctctttgttcttcatgctatttctcattgcaaagcaccctaatgttgaagaggcaataataaaggaaatccagactgttattggtgagagagacataaagattgatgatatacaaaaattaaaagtgatggaaaacttcatttatgagagcatgcggtaccagcctgtcgtggacttggtcatgcgcaaagccttagaagatgatgtaatcgatggctacccagtgaaaaaggggacaaacattatcctgaatattggaaggatgcacagactcgagtttttccccaaacccaatgaatttactcttgaaaattttgcaaagaatgttccttataggtactttcagccatttggctttgggccccgtggctgtgcaggaaagtacatcgccatggtgatgatgaaagccatcctcgttacacttctgagacgattccacgtgaagacattgcaaggacagtgtgttgagagcatacagaagatacacgacttgtccttgcacccagatgagactaaaaacatgctggaaatgatctttaccccaagaaactcagacaggtgtctggaacactagagaaggctggtcagtacccactctggagcatttctcatcagtagttcacatacaaatcatccatccttgccaatagtgtcatcctcacagtgaacactcagtggcccatggcattttataggcatacctcctatgggttgtcaccaagctaggtgctattggtcatctgctcctgttcacaccagagaaccaggctacaagagaaaaagcagaggccaagagtttgagggagaaatagtcggtgaagaaaccgtatccataaagacccgattccaccaaatgtgctttgagaaggataggccttcattaacaaaatgtatgtctggttccccagtagagctctactgcctcaacccaaggggatttttatgtctggggcagaaacactcaagttgattagaaagaccaggccaatgtcagggtacctggggccaaacccacctgctagtgtgaattaaagtactttaattttgttttctgtggaggtggaaaagcaacattcatagtctttggagaaatgcttagaaattcagcatttgacccttgctgtgaattaagcccaattaattcctgtttgtctacatatgatctgtctgtggcaaaagtttaatcagaggaaattctttcccagtctgtcgatttatgcctcagccacttgcctgtgctacaattcattgtgttacctgtagattcaggtaatacaaactatatataatcatcaagtaatacaaactaatttagtaatagcctgggttaagtattattagggccctgtgtctgctgtagaaaaaaaaattcacatgatgcacttcaaattcaaataaaaatccttttggcatgttcccatttttgcttagctcaattagtgtggctaaccaagagataactgtaaatgtgacattgatttgctcttactacagcttcagtgattgggggaggaaaagtcccaacccaatgggctcaaacttctaaggggtactcctctcatccccttatccttctccctcgacattttctccctctttcttcccatgaccccaaagccaagggcaacagatcagtaaagaacgtggtcagagtagaacccctgaagtattttttaatcctacctcaaaatttaacagttacctgagagatttaacattatctagttcattgaatcattgtatgtggtcatggataaattgcacaccttggaattcgctttctaaaggaaatcaaatgaatggaggaactttccaaacaccactttacttgtgttatatagccaatataactatctctactgaatgtcattgaaaaactaaaaaattaaacttatttacaaata

SEQ ID NO: 307416 - DNA, 2959 bp, Homo sapiens
gcaccctctgaagcaacaggagctatagatgaaccttttaggggattctgtaatttttctgtccctttgatttccacaggactctaaattgccccctctgaggtcaaggaacacaagatggttttggaaatgctgaacccgatacattataacatcaccagcatcgtgcctgaagccatgcctgctgccaccatgccagtcctgctcctcactggcctttttctcttggtgtggaattatgagggcacatcctcaataccaggtcctggctactgcatgggaattggacccctcatctcccacggcagattcctgtggatggggatcggcagtgcctgcaactactacaaccgggtatatggagaattcatgcgagtctggatctctggagaggaaacactcattatcagcaagtcctcaagtatgttccacataatgaagcacaatcattacagctctcgattcggcagcaaacttgggctgcagtgcatcggtatgcatgagaaaggcatcatatttaacaacaatccagagctctggaaaacaactcgacccttctttatgaaagctctgtcaggccccggccttgttcgtatggtcacagtctgtgctgaatccctcaaaacacatctggacaggttggaggaggtgaccaatgaatcgggctatgtggacgtgttgacccttctgcgtcgtgtcatgctggacacctctaacacgctcttcttgaggatccctttggacgaaagtgctatcgtggttaaaatccaaggttattttgatgcatggcaagctctcctcatcaaaccagacatcttctttaagatttcttggctatacaaaaagtatgagaagtctgtcaaggatttgaaagatgccatagaagttctgatagcagaaaaaagacgcaggatttccacagaagagaaactggaagaatgtatggactttgccactgagttgattttagcagagaaacgtggtgacctgacaagagagaatgtgaaccagtgcatattggaaatgctgatcgcagctcctgacaccatgtctgtctctttgttcttcatgctatttctcattgcaaagcaccctaatgttgaagaggcaataataaaggaaatccagactgttattggtgagagagacataaagattgatgatatacaaaaattaaaagtgatggaaaacttcatttatgagagcatgcggtaccagcctgtcgtggacttggtcatgcgcaaagccttagaagatgatgtaatcgatggctacccagtgaaaaaggggacaaacattatcctgaatattggaaggatgcacagactcgagtttttccccaaacccaatgaatttactcttgaaaattttgcaaagaatgttccttataggtactttcagccatttggctttgggccccgtggctgtgcaggaaagtacatcgccatggtgatgatgaaagccatcctcgttacacttctgagacgattccacgtgaagacattgcaaggacagtgtgttgagagcatacagaagatacacgacttgtccttgcacccagatgagactaaaaacatgctggaaatgatctttaccccaagaaactcagacaggtgtctggaacactagagaaggctggtcagtacccactctggagcatttctcatcagtagttcacatacaaatcatccatccttgccaatagtgtcatcctcacagtgaacactcagtggcccatggcattttataggcatacctcctatgggttgtcaccaagctaggtgctattggtcatctgctcctgttcacaccagagaaccaggctacaagagaaaaagcagaggccaagagtttgagggagaaatagtcggtgaagaaaccgtatccataaagacccgattccaccaaatgtgctttgagaaggataggccttcattaacaaaatgtatgtctggttccccagtagagctctactgcctcaacccaaggggatttttatgtctggggcagaaacactcaagttgattagaaagaccaggccaatgtcagggtacctggggccaaacccacctgctagtgtgaattaaagtactttaattttgttttctgtggaggtggaaaagcaacattcatagtctttggagaaatgcttagaaattcagcatttgacccttgctgtgaattaagcccaattaattcctgtttgtctacatatgatctgtctgtggcaaaagtttaatcagaggaaattctttcccagtctgtcgatttatgcctcagccacttgcctgtgctacaattcattgtgttacctgtagattcaggtaatacaaactatatataatcatcaagtaatacaaactaatttagtaatagcctgggttaagtattattagggccctgtgtctgctgtagaaaaaaaaattcacatgatgcacttcaaattcaaataaaaatccttttggcatgttcccatttttgcttagctcaattagtgtggctaaccaagagataactgtaaatgtgacattgatttgctcttactacagcttcagtgattgggggaggaaaagtcccaacccaatgggctcaaacttctaaggggtactcctctcatccccttatccttctccctcgacattttctccctctttcttcccatgaccccaaagccaagggcaacagatcagtaaagaacgtggtcagagtagaacccctgaagtattttttaatcctacctcaaaatttaacagttacctgagagatttaacattatctagttcattgaatcattgtatgtggtcatggataaattgcacaccttggaattcgctttctaaaggaaatcaaatgaatggaggaactttccaaacaccactttacttgtgttatatagccaatataactatctctactgaatgtcattgaaaaactaaaaaattaaacttatttacaaata

SEQ ID NO: 307417 - DNA, 3478 bp, Homo sapiens
ttttgattctgctgtggtgataaagatactctgccttgcccattaagcatttgttggtggaaaacattacctttaaataaatgtctggttctatgtgagcaaagctagggctcccataaaattgggcaatgatactctgaattcagctgaactgtttgggcaactttgtcacttctggggccatcattttcaggatagttcccacagtgtgagaaaatgactgcttcctatagtactgtcaagagtgtgaaaagagagctctttagcaaacacattatttatccatccttaaaaagcttgtcacctccagggtgcttgttcagaagtaatctcattacttaaatcatatcctagcatgtggaaaagctccctgacttccccgcctgccccacctgctgatttctcaggaccgctgataacagctttcatgtggaacttgggattaatatcaagcaagccatggattttgtctccactgaacttgggcatcatggacagtttccattccagcagttaagggcttcctgactttcaacagtggtgctgatcccagttctgaagagtggaacatcagagagcctcccctcctcagccacttgactctaaattgccccctctgaggtcaaggaacacaagatggttttggaaatgctgaacccgatacattataacatcaccagcatcgtgcctgaagccatgcctgctgccaccatgccagtcctgctcctcactggcctttttctcttggtgtggaattatgagggcacatcctcaataccaggtcctggctactgcatgggaattggacccctcatctcccacggcagattcctgtggatggggatcggcagtgcctgcaactactacaaccgggtatatggagaattcatgcgagtctggatctctggagaggaaacactcattatcagcaagtcctcaagtatgttccacataatgaagcacaatcattacagctctcgattcggcagcaaacttgggctgcagtgcatcggtatgcatgagaaaggcatcatatttaacaacaatccagagctctggaaaacaactcgacccttctttatgaaagctctgtcaggccccggccttgttcgtatggtcacagtctgtgctgaatccctcaaaacacatctggacaggttggaggaggtgaccaatgaatcgggctatgtggacgtgttgacccttctgcgtcgtgtcatgctggacacctctaacacgctcttcttgaggatccctttggacgaaagtgctatcgtggttaaaatccaaggttattttgatgcatggcaagctctcctcatcaaaccagacatcttctttaagatttcttggctatacaaaaagtatgagaagtctgtcaaggatttgaaagatgccatagaagttctgatagcagaaaaaagacgcaggatttccacagaagagaaactggaagaatgtatggactttgccactgagttgattttagcagagaaacgtggtgacctgacaagagagaatgtgaaccagtgcatattggaaatgctgatcgcagctcctgacaccatgtctgtctctttgttcttcatgctatttctcattgcaaagcaccctaatgttgaagaggcaataataaaggaaatccagactgttattggtgagagagacataaagattgatgatatacaaaaattaaaagtgatggaaaacttcatttatgagagcatgcggtaccagcctgtcgtggacttggtcatgcgcaaagccttagaagatgatgtaatcgatggctacccagtgaaaaaggggacaaacattatcctgaatattggaaggatgcacagactcgagtttttccccaaacccaatgaatttactcttgaaaattttgcaaagaatgttccttataggtactttcagccatttggctttgggccccgtggctgtgcaggaaagtacatcgccatggtgatgatgaaagccatcctcgttacacttctgagacgattccacgtgaagacattgcaaggacagtgtgttgagagcatacagaagatacacgacttgtccttgcacccagatgagactaaaaacatgctggaaatgatctttaccccaagaaactcagacaggtgtctggaacactagagaaggctggtcagtacccactctggagcatttctcatcagtagttcacatacaaatcatccatccttgccaatagtgtcatcctcacagtgaacactcagtggcccatggcattttataggcatacctcctatgggttgtcaccaagctaggtgctattggtcatctgctcctgttcacaccagagaaccaggctacaagagaaaaagcagaggccaagagtttgagggagaaatagtcggtgaagaaaccgtatccataaagacccgattccaccaaatgtgctttgagaaggataggccttcattaacaaaatgtatgtctggttccccagtagagctctactgcctcaacccaaggggatttttatgtctggggcagaaacactcaagttgattagaaagaccaggccaatgtcagggtacctggggccaaacccacctgctagtgtgaattaaagtactttaattttgttttctgtggaggtggaaaagcaacattcatagtctttggagaaatgcttagaaattcagcatttgacccttgctgtgaattaagcccaattaattcctgtttgtctacatatgatctgtctgtggcaaaagtttaatcagaggaaattctttcccagtctgtcgatttatgcctcagccacttgcctgtgctacaattcattgtgttacctgtagattcaggtaatacaaactatatataatcatcaagtaatacaaactaatttagtaatagcctgggttaagtattattagggccctgtgtctgctgtagaaaaaaaaattcacatgatgcacttcaaattcaaataaaaatccttttggcatgttcccatttttgcttagctcaattagtgtggctaaccaagagataactgtaaatgtgacattgatttgctcttactacagcttcagtgattgggggaggaaaagtcccaacccaatgggctcaaacttctaaggggtactcctctcatccccttatccttctccctcgacattttctccctctttcttcccatgaccccaaagccaagggcaacagatcagtaaagaacgtggtcagagtagaacccctgaagtattttttaatcctacctcaaaatttaacagttacctgagagatttaacattatctagttcattgaatcattgtatgtggtcatggataaattgcacaccttggaattcgctttctaaaggaaatcaaatgaatggaggaactttccaaacaccactttacttgtgttatatagccaatataactatctctactgaatgtcattgaaaaactaaaaaattaaacttatttacaaata

SEQ ID NO: 307418 - DNA, 3076 bp, Homo sapiens
  misc_feature (185)..(185): n is a, c, g, or t
  misc_feature (187)..(187): n is a, c, g, or t
  misc_feature (196)..(196): n is a, c, g, or t
ccctagagagcctcatggattgtaactaaagaagaaacggttcctttttgtttttttaaaaatgatttttaaataccgttttttacaccgttctctcggtactttttttaagctaagtcagcattgtcttccagtgttaaaggcatccctcacctctgcaaggaacccacgcgcgtgggttcctngnagacgtcgngactctaaattgccccctctgaggtcaaggaacacaagatggttttggaaatgctgaacccgatacattataacatcaccagcatcgtgcctgaagccatgcctgctgccaccatgccagtcctgctcctcactggcctttttctcttggtgtggaattatgagggcacatcctcaataccaggtcctggctactgcatgggaattggacccctcatctcccacggcagattcctgtggatggggatcggcagtgcctgcaactactacaaccgggtatatggagaattcatgcgagtctggatctctggagaggaaacactcattatcagcaagtcctcaagtatgttccacataatgaagcacaatcattacagctctcgattcggcagcaaacttgggctgcagtgcatcggtatgcatgagaaaggcatcatatttaacaacaatccagagctctggaaaacaactcgacccttctttatgaaagctctgtcaggccccggccttgttcgtatggtcacagtctgtgctgaatccctcaaaacacatctggacaggttggaggaggtgaccaatgaatcgggctatgtggacgtgttgacccttctgcgtcgtgtcatgctggacacctctaacacgctcttcttgaggatccctttggacgaaagtgctatcgtggttaaaatccaaggttattttgatgcatggcaagctctcctcatcaaaccagacatcttctttaagatttcttggctatacaaaaagtatgagaagtctgtcaaggatttgaaagatgccatagaagttctgatagcagaaaaaagacgcaggatttccacagaagagaaactggaagaatgtatggactttgccactgagttgattttagcagagaaacgtggtgacctgacaagagagaatgtgaaccagtgcatattggaaatgctgatcgcagctcctgacaccatgtctgtctctttgttcttcatgctatttctcattgcaaagcaccctaatgttgaagaggcaataataaaggaaatccagactgttattggtgagagagacataaagattgatgatatacaaaaattaaaagtgatggaaaacttcatttatgagagcatgcggtaccagcctgtcgtggacttggtcatgcgcaaagccttagaagatgatgtaatcgatggctacccagtgaaaaaggggacaaacattatcctgaatattggaaggatgcacagactcgagtttttccccaaacccaatgaatttactcttgaaaattttgcaaagaatgttccttataggtactttcagccatttggctttgggccccgtggctgtgcaggaaagtacatcgccatggtgatgatgaaagccatcctcgttacacttctgagacgattccacgtgaagacattgcaaggacagtgtgttgagagcatacagaagatacacgacttgtccttgcacccagatgagactaaaaacatgctggaaatgatctttaccccaagaaactcagacaggtgtctggaacactagagaaggctggtcagtacccactctggagcatttctcatcagtagttcacatacaaatcatccatccttgccaatagtgtcatcctcacagtgaacactcagtggcccatggcattttataggcatacctcctatgggttgtcaccaagctaggtgctattggtcatctgctcctgttcacaccagagaaccaggctacaagagaaaaagcagaggccaagagtttgagggagaaatagtcggtgaagaaaccgtatccataaagacccgattccaccaaatgtgctttgagaaggataggccttcattaacaaaatgtatgtctggttccccagtagagctctactgcctcaacccaaggggatttttatgtctggggcagaaacactcaagttgattagaaagaccaggccaatgtcagggtacctggggccaaacccacctgctagtgtgaattaaagtactttaattttgttttctgtggaggtggaaaagcaacattcatagtctttggagaaatgcttagaaattcagcatttgacccttgctgtgaattaagcccaattaattcctgtttgtctacatatgatctgtctgtggcaaaagtttaatcagaggaaattctttcccagtctgtcgatttatgcctcagccacttgcctgtgctacaattcattgtgttacctgtagattcaggtaatacaaactatatataatcatcaagtaatacaaactaatttagtaatagcctgggttaagtattattagggccctgtgtctgctgtagaaaaaaaaattcacatgatgcacttcaaattcaaataaaaatccttttggcatgttcccatttttgcttagctcaattagtgtggctaaccaagagataactgtaaatgtgacattgatttgctcttactacagcttcagtgattgggggaggaaaagtcccaacccaatgggctcaaacttctaaggggtactcctctcatccccttatccttctccctcgacattttctccctctttcttcccatgaccccaaagccaagggcaacagatcagtaaagaacgtggtcagagtagaacccctgaagtattttttaatcctacctcaaaatttaacagttacctgagagatttaacattatctagttcattgaatcattgtatgtggtcatggataaattgcacaccttggaattcgctttctaaaggaaatcaaatgaatggaggaactttccaaacaccactttacttgtgttatatagccaatataactatctctactgaatgtcattgaaaaactaaaaaattaaacttatttacaaata

SEQ ID NO: 307419 - DNA, 3070 bp, Homo sapiens
  misc_feature (179)..(179): n is a, c, g, or t
  misc_feature (181)..(181): n is a, c, g, or t
  misc_feature (190)..(190): n is a, c, g, or t
gagctgttgggaggcacagagtcccaacacagctggtaaagcacttagcccaggacccggccctagcaaggcaattagagggtgtctgtctttattttaagtcgccctccagctaatgggaaacacaagggcaggatcccacctggacgtcttctctgcaaggaacgcgtgggttcctngnagacgtcgngactctaaattgccccctctgaggtcaaggaacacaagatggttttggaaatgctgaacccgatacattataacatcaccagcatcgtgcctgaagccatgcctgctgccaccatgccagtcctgctcctcactggcctttttctcttggtgtggaattatgagggcacatcctcaataccaggtcctggctactgcatgggaattggacccctcatctcccacggcagattcctgtggatggggatcggcagtgcctgcaactactacaaccgggtatatggagaattcatgcgagtctggatctctggagaggaaacactcattatcagcaagtcctcaagtatgttccacataatgaagcacaatcattacagctctcgattcggcagcaaacttgggctgcagtgcatcggtatgcatgagaaaggcatcatatttaacaacaatccagagctctggaaaacaactcgacccttctttatgaaagctctgtcaggccccggccttgttcgtatggtcacagtctgtgctgaatccctcaaaacacatctggacaggttggaggaggtgaccaatgaatcgggctatgtggacgtgttgacccttctgcgtcgtgtcatgctggacacctctaacacgctcttcttgaggatccctttggacgaaagtgctatcgtggttaaaatccaaggttattttgatgcatggcaagctctcctcatcaaaccagacatcttctttaagatttcttggctatacaaaaagtatgagaagtctgtcaaggatttgaaagatgccatagaagttctgatagcagaaaaaagacgcaggatttccacagaagagaaactggaagaatgtatggactttgccactgagttgattttagcagagaaacgtggtgacctgacaagagagaatgtgaaccagtgcatattggaaatgctgatcgcagctcctgacaccatgtctgtctctttgttcttcatgctatttctcattgcaaagcaccctaatgttgaagaggcaataataaaggaaatccagactgttattggtgagagagacataaagattgatgatatacaaaaattaaaagtgatggaaaacttcatttatgagagcatgcggtaccagcctgtcgtggacttggtcatgcgcaaagccttagaagatgatgtaatcgatggctacccagtgaaaaaggggacaaacattatcctgaatattggaaggatgcacagactcgagtttttccccaaacccaatgaatttactcttgaaaattttgcaaagaatgttccttataggtactttcagccatttggctttgggccccgtggctgtgcaggaaagtacatcgccatggtgatgatgaaagccatcctcgttacacttctgagacgattccacgtgaagacattgcaaggacagtgtgttgagagcatacagaagatacacgacttgtccttgcacccagatgagactaaaaacatgctggaaatgatctttaccccaagaaactcagacaggtgtctggaacactagagaaggctggtcagtacccactctggagcatttctcatcagtagttcacatacaaatcatccatccttgccaatagtgtcatcctcacagtgaacactcagtggcccatggcattttataggcatacctcctatgggttgtcaccaagctaggtgctattggtcatctgctcctgttcacaccagagaaccaggctacaagagaaaaagcagaggccaagagtttgagggagaaatagtcggtgaagaaaccgtatccataaagacccgattccaccaaatgtgctttgagaaggataggccttcattaacaaaatgtatgtctggttccccagtagagctctactgcctcaacccaaggggatttttatgtctggggcagaaacactcaagttgattagaaagaccaggccaatgtcagggtacctggggccaaacccacctgctagtgtgaattaaagtactttaattttgttttctgtggaggtggaaaagcaacattcatagtctttggagaaatgcttagaaattcagcatttgacccttgctgtgaattaagcccaattaattcctgtttgtctacatatgatctgtctgtggcaaaagtttaatcagaggaaattctttcccagtctgtcgatttatgcctcagccacttgcctgtgctacaattcattgtgttacctgtagattcaggtaatacaaactatatataatcatcaagtaatacaaactaatttagtaatagcctgggttaagtattattagggccctgtgtctgctgtagaaaaaaaaattcacatgatgcacttcaaattcaaataaaaatccttttggcatgttcccatttttgcttagctcaattagtgtggctaaccaagagataactgtaaatgtgacattgatttgctcttactacagcttcagtgattgggggaggaaaagtcccaacccaatgggctcaaacttctaaggggtactcctctcatccccttatccttctccctcgacattttctccctctttcttcccatgaccccaaagccaagggcaacagatcagtaaagaacgtggtcagagtagaacccctgaagtattttttaatcctacctcaaaatttaacagttacctgagagatttaacattatctagttcattgaatcattgtatgtggtcatggataaattgcacaccttggaattcgctttctaaaggaaatcaaatgaatggaggaactttccaaacaccactttacttgtgttatatagccaatataactatctctactgaatgtcattgaaaaactaaaaaattaaacttatttacaaata

SEQ ID NO: 307420 - DNA, 3419 bp, Homo sapiens
ctgtgaaagttccagaagaaagctgtatggtcagcttggggaaatatgtggttcatgctggaatgctggacataccacattattggaaagatgcacattgaatgaccgacaaaatgaaactcaactttccaaatgctggtaatgagagaagattctgttctaatgaccagttgtttcctgaaagaatgtcagctcgattcataatgaatgcattctaaccatgacagccacagtcaggacacaaaaaacaaagtgtccttgatcccaggaaacagccctctggaatctgtgaaatctagaaactagattgggaaaactctgacacccctgccccatgaccaaccaagactaagagtcccaggaagattgaggtcacagaaggcagaggcctgccccctctccaggagatccctgacccatgtggggtcatgggcggggcatgagtgatgtgatgggaaactggctcctggctccaagtagaacgtgaccaactggagcctgacaggaggtccctggcactggtcagcccatcaaaccaggactctaaattgccccctctgaggtcaaggaacacaagatggttttggaaatgctgaacccgatacattataacatcaccagcatcgtgcctgaagccatgcctgctgccaccatgccagtcctgctcctcactggcctttttctcttggtgtggaattatgagggcacatcctcaataccaggtcctggctactgcatgggaattggacccctcatctcccacggcagattcctgtggatggggatcggcagtgcctgcaactactacaaccgggtatatggagaattcatgcgagtctggatctctggagaggaaacactcattatcagcaagtcctcaagtatgttccacataatgaagcacaatcattacagctctcgattcggcagcaaacttgggctgcagtgcatcggtatgcatgagaaaggcatcatatttaacaacaatccagagctctggaaaacaactcgacccttctttatgaaagctctgtcaggccccggccttgttcgtatggtcacagtctgtgctgaatccctcaaaacacatctggacaggttggaggaggtgaccaatgaatcgggctatgtggacgtgttgacccttctgcgtcgtgtcatgctggacacctctaacacgctcttcttgaggatccctttggacgaaagtgctatcgtggttaaaatccaaggttattttgatgcatggcaagctctcctcatcaaaccagacatcttctttaagatttcttggctatacaaaaagtatgagaagtctgtcaaggatttgaaagatgccatagaagttctgatagcagaaaaaagacgcaggatttccacagaagagaaactggaagaatgtatggactttgccactgagttgattttagcagagaaacgtggtgacctgacaagagagaatgtgaaccagtgcatattggaaatgctgatcgcagctcctgacaccatgtctgtctctttgttcttcatgctatttctcattgcaaagcaccctaatgttgaagaggcaataataaaggaaatccagactgttattggtgagagagacataaagattgatgatatacaaaaattaaaagtgatggaaaacttcatttatgagagcatgcggtaccagcctgtcgtggacttggtcatgcgcaaagccttagaagatgatgtaatcgatggctacccagtgaaaaaggggacaaacattatcctgaatattggaaggatgcacagactcgagtttttccccaaacccaatgaatttactcttgaaaattttgcaaagaatgttccttataggtactttcagccatttggctttgggccccgtggctgtgcaggaaagtacatcgccatggtgatgatgaaagccatcctcgttacacttctgagacgattccacgtgaagacattgcaaggacagtgtgttgagagcatacagaagatacacgacttgtccttgcacccagatgagactaaaaacatgctggaaatgatctttaccccaagaaactcagacaggtgtctggaacactagagaaggctggtcagtacccactctggagcatttctcatcagtagttcacatacaaatcatccatccttgccaatagtgtcatcctcacagtgaacactcagtggcccatggcattttataggcatacctcctatgggttgtcaccaagctaggtgctattggtcatctgctcctgttcacaccagagaaccaggctacaagagaaaaagcagaggccaagagtttgagggagaaatagtcggtgaagaaaccgtatccataaagacccgattccaccaaatgtgctttgagaaggataggccttcattaacaaaatgtatgtctggttccccagtagagctctactgcctcaacccaaggggatttttatgtctggggcagaaacactcaagttgattagaaagaccaggccaatgtcagggtacctggggccaaacccacctgctagtgtgaattaaagtactttaattttgttttctgtggaggtggaaaagcaacattcatagtctttggagaaatgcttagaaattcagcatttgacccttgctgtgaattaagcccaattaattcctgtttgtctacatatgatctgtctgtggcaaaagtttaatcagaggaaattctttcccagtctgtcgatttatgcctcagccacttgcctgtgctacaattcattgtgttacctgtagattcaggtaatacaaactatatataatcatcaagtaatacaaactaatttagtaatagcctgggttaagtattattagggccctgtgtctgctgtagaaaaaaaaattcacatgatgcacttcaaattcaaataaaaatccttttggcatgttcccatttttgcttagctcaattagtgtggctaaccaagagataactgtaaatgtgacattgatttgctcttactacagcttcagtgattgggggaggaaaagtcccaacccaatgggctcaaacttctaaggggtactcctctcatccccttatccttctccctcgacattttctccctctttcttcccatgaccccaaagccaagggcaacagatcagtaaagaacgtggtcagagtagaacccctgaagtattttttaatcctacctcaaaatttaacagttacctgagagatttaacattatctagttcattgaatcattgtatgtggtcatggataaattgcacaccttggaattcgctttctaaaggaaatcaaatgaatggaggaactttccaaacaccactttacttgtgttatatagccaatataactatctctactgaatgtcattgaaaaactaaaaaattaaacttatttacaaata

SEQ ID NO: 307421 - DNA, 3108 bp, Homo sapiens
  misc_feature (24)..(24): n is a, c, g, or t
aaacagtgtatcaacgcagagtgnccattacggccgggggagtttctggagggctgaacacgtggaggcaaacaggaaggtgaagaagaacttatcctatcaggacggaaggtcctgtgctcgggatcttccagacgtcgcgactctaaattgccccctctgaggtcaaggaacacaagatggttttggaaatgctgaacccgatacattataacatcaccagcatcgtgcctgaagccatgcctgctgccaccatgccagtcctgctcctcactggcctttttctcttggtgtggaattatgagggcacatcctcaataccaggtcctggctactgcatgggaattggacccctcatctcccacggcagattcctgtggatggggatcggcagtgcctgcaactactacaaccgggtatatggagaattcatgcgagtctggatctctggagaggaaacactcattatcagcaagtcctcaagtatgttccacataatgaagcacaatcattacagctctcgattcggcagcaaacttgggctgcagtgcatcggtatgcatgagaaaggcatcatatttaacaacaatccagagctctggaaaacaactcgacccttctttatgaaagctctgtcaggccccggccttgttcgtatggtcacagtctgtgctgaatccctcaaaacacatctggacaggttggaggaggtgaccaatgaatcgggctatgtggacgtgttgacccttctgcgtcgtgtcatgctggacacctctaacacgctcttcttgaggatccctttggacgaaagtgctatcgtggttaaaatccaaggttattttgatgcatggcaagctctcctcatcaaaccagacatcttctttaagatttcttggctatacaaaaagtatgagaagtctgtgcaagtaatacaactttggaagatttatgagtacaattggattggtttttttcccttgtgtctttgctgtttttcttggcctctcagcaaggatttgaaagatgccatagaagttctgatagcagaaaaaagacgcaggatttccacagaagagaaactggaagaatgtatggactttgccactgagttgattttagcagagaaacgtggtgacctgacaagagagaatgtgaaccagtgcatattggaaatgctgatcgcagctcctgacaccatgtctgtctctttgttcttcatgctatttctcattgcaaagcaccctaatgttgaagaggcaataataaaggaaatccagactgttattggtgagagagacataaagattgatgatatacaaaaattaaaagtgatggaaaacttcatttatgagagcatgcggtaccagcctgtcgtggacttggtcatgcgcaaagccttagaagatgatgtaatcgatggctacccagtgaaaaaggggacaaacattatcctgaatattggaaggatgcacagactcgagtttttccccaaacccaatgaatttactcttgaaaattttgcaaagaatgttccttataggtactttcagccatttggctttgggccccgtggctgtgcaggaaagtacatcgccatggtgatgatgaaagccatcctcgttacacttctgagacgattccacgtgaagacattgcaaggacagtgtgttgagagcatacagaagatacacgacttgtccttgcacccagatgagactaaaaacatgctggaaatgatctttaccccaagaaactcagacaggtgtctggaacactagagaaggctggtcagtacccactctggagcatttctcatcagtagttcacatacaaatcatccatccttgccaatagtgtcatcctcacagtgaacactcagtggcccatggcattttataggcatacctcctatgggttgtcaccaagctaggtgctattggtcatctgctcctgttcacaccagagaaccaggctacaagagaaaaagcagaggccaagagtttgagggagaaatagtcggtgaagaaaccgtatccataaagacccgattccaccaaatgtgctttgagaaggataggccttcattaacaaaatgtatgtctggttccccagtagagctctactgcctcaacccaaggggatttttatgtctggggcagaaacactcaagttgattagaaagaccaggccaatgtcagggtacctggggccaaacccacctgctagtgtgaattaaagtactttaattttgttttctgtggaggtggaaaagcaacattcatagtctttggagaaatgcttagaaattcagcatttgacccttgctgtgaattaagcccaattaattcctgtttgtctacatatgatctgtctgtggcaaaagtttaatcagaggaaattctttcccagtctgtcgatttatgcctcagccacttgcctgtgctacaattcattgtgttacctgtagattcaggtaatacaaactatatataatcatcaagtaatacaaactaatttagtaatagcctgggttaagtattattagggccctgtgtctgctgtagaaaaaaaaattcacatgatgcacttcaaattcaaataaaaatccttttggcatgttcccatttttgcttagctcaattagtgtggctaaccaagagataactgtaaatgtgacattgatttgctcttactacagcttcagtgattgggggaggaaaagtcccaacccaatgggctcaaacttctaaggggtactcctctcatccccttatccttctccctcgacattttctccctctttcttcccatgaccccaaagccaagggcaacagatcagtaaagaacgtggtcagagtagaacccctgaagtattttttaatcctacctcaaaatttaacagttacctgagagatttaacattatctagttcattgaatcattgtatgtggtcatggataaattgcacaccttggaattcgctttctaaaggaaatcaaatgaatggaggaactttccaaacaccactttacttgtgttatatagccaatataactatctctactgaatgtcattgaaaaactaaaaaattaaacttatttacaaata

SEQ ID NO: 307422 - DNA, 2482 bp, Homo sapiens
caacggagatcaggcattaaagagaattcaagagttccccagactctggaaaatgtagttgttgataacagactagcattggattatttactagctggacaaggtggggtcttgtgcagttattaataaaacctgctgcacatatattaacatctggacaggttggaggaggtgaccaatgaatcgggctatgtggacgtgttgacccttctgcgtcgtgtcatgctggacacctctaacacgctcttcttgaggatccctttggacgaaagtgctatcgtggttaaaatccaaggttattttgatgcatggcaagctctcctcatcaaaccagacatcttctttaagatttcttggctatacaaaaagtatgagaagtctgtcaaggatttgaaagatgccatagaagttctgatagcagaaaaaagacgcaggatttccacagaagagaaactggaagaatgtatggactttgccactgagttgattttagcagagaaacgtggtgacctgacaagagagaatgtgaaccagtgcatattggaaatgctgatcgcagctcctgacaccatgtctgtctctttgttcttcatgctatttctcattgcaaagcaccctaatgttgaagaggcaataataaaggaaatccagactgttattggtgagagagacataaagattgatgatatacaaaaattaaaagtgatggaaaacttcatttatgagagcatgcggtaccagcctgtcgtggacttggtcatgcgcaaagccttagaagatgatgtaatcgatggctacccagtgaaaaaggggacaaacattatcctgaatattggaaggatgcacagactcgagtttttccccaaacccaatgaatttactcttgaaaattttgcaaagaatgttccttataggtactttcagccatttggctttgggccccgtggctgtgcaggaaagtacatcgccatggtgatgatgaaagccatcctcgttacacttctgagacgattccacgtgaagacattgcaaggacagtgtgttgagagcatacagaagatacacgacttgtccttgcacccagatgagactaaaaacatgctggaaatgatctttaccccaagaaactcagacaggtgtctggaacactagagaaggctggtcagtacccactctggagcatttctcatcagtagttcacatacaaatcatccatccttgccaatagtgtcatcctcacagtgaacactcagtggcccatggcattttataggcatacctcctatgggttgtcaccaagctaggtgctattggtcatctgctcctgttcacaccagagaaccaggctacaagagaaaaagcagaggccaagagtttgagggagaaatagtcggtgaagaaaccgtatccataaagacccgattccaccaaatgtgctttgagaaggataggccttcattaacaaaatgtatgtctggttccccagtagagctctactgcctcaacccaaggggatttttatgtctggggcagaaacactcaagttgattagaaagaccaggccaatgtcagggtacctggggccaaacccacctgctagtgtgaattaaagtactttaattttgttttctgtggaggtggaaaagcaacattcatagtctttggagaaatgcttagaaattcagcatttgacccttgctgtgaattaagcccaattaattcctgtttgtctacatatgatctgtctgtggcaaaagtttaatcagaggaaattctttcccagtctgtcgatttatgcctcagccacttgcctgtgctacaattcattgtgttacctgtagattcaggtaatacaaactatatataatcatcaagtaatacaaactaatttagtaatagcctgggttaagtattattagggccctgtgtctgctgtagaaaaaaaaattcacatgatgcacttcaaattcaaataaaaatccttttggcatgttcccatttttgcttagctcaattagtgtggctaaccaagagataactgtaaatgtgacattgatttgctcttactacagcttcagtgattgggggaggaaaagtcccaacccaatgggctcaaacttctaaggggtactcctctcatccccttatccttctccctcgacattttctccctctttcttcccatgaccccaaagccaagggcaacagatcagtaaagaacgtggtcagagtagaacccctgaagtattttttaatcctacctcaaaatttaacagttacctgagagatttaacattatctagttcattgaatcattgtatgtggtcatggataaattgcacaccttggaattcgctttctaaaggaaatcaaatgaatggaggaactttccaaacaccactttacttgtgttatatagccaatataactatctctactgaatgtcattgaaaaactaaaaaattaaacttatttacaaata

SEQ ID NO: 307423 - DNA, 2844 bp, Homo sapiens
  misc_feature (24)..(24): n is a, c, g, or t
aaacagtgtatcaacgcagagtgnccattacggccgggggagtttctggagggctgaacacgtggaggcaaacaggaaggtgaagaagaacttatcctatcaggacggaaggtcctgtgctcgggatcttccagacgtcgcgactctaaattgccccctctgaggtcaaggaacacaagatggttttggaaatgctgaacccgatacattataacatcaccagcatcgtgcctgaagccatgcctgctgccaccatgccagtcctgctcctcactggcctttttctcttggtgtggaattatgagggcacatcctcaataccaggtcctggctactgcatgggaattggacccctcatctcccacggcagattcctgtggatggggatcggcagtgcctgcaactactacaaccgggtatatggagaattcatgcgagtctggatctctggagaggaaacactcattatcagcaagtcctcaagtatgttccacataatgaagcacaatcattacagctctcgattcggcagcaaacttgggctgcagtgcatcggtatgcatgagaaaggcatcatatttaacaacaatccagagctctggaaaacaactcgacccttctttatgaaagaaagtgctatcgtggttaaaatccaaggttattttgatgcatggcaagctctcctcatcaaaccagacatcttctttaagatttcttggctatacaaaaagtatgagaagtctgtcaaggatttgaaagatgccatagaagttctgatagcagaaaaaagacgcaggatttccacagaagagaaactggaagaatgtatggactttgccactgagttgattttagcagagaaacgtggtgacctgacaagagagaatgtgaaccagtgcatattggaaatgctgatcgcagctcctgacaccatgtctgtctctttgttcttcatgctatttctcattgcaaagcaccctaatgttgaagaggcaataataaaggaaatccagactgttattggtgagagagacataaagattgatgatatacaaaaattaaaagtgatggaaaacttcatttatgagagcatgcggtaccagcctgtcgtggacttggtcatgcgcaaagccttagaagatgatgtaatcgatggctacccagtgaaaaaggggacaaacattatcctgaatattggaaggatgcacagactcgagtttttccccaaacccaatgaatttactcttgaaaattttgcaaagaatgttccttataggtactttcagccatttggctttgggccccgtggctgtgcaggaaagtacatcgccatggtgatgatgaaagccatcctcgttacacttctgagacgattccacgtgaagacattgcaaggacagtgtgttgagagcatacagaagatacacgacttgtccttgcacccagatgagactaaaaacatgctggaaatgatctttaccccaagaaactcagacaggtgtctggaacactagagaaggctggtcagtacccactctggagcatttctcatcagtagttcacatacaaatcatccatccttgccaatagtgtcatcctcacagtgaacactcagtggcccatggcattttataggcatacctcctatgggttgtcaccaagctaggtgctattggtcatctgctcctgttcacaccagagaaccaggctacaagagaaaaagcagaggccaagagtttgagggagaaatagtcggtgaagaaaccgtatccataaagacccgattccaccaaatgtgctttgagaaggataggccttcattaacaaaatgtatgtctggttccccagtagagctctactgcctcaacccaaggggatttttatgtctggggcagaaacactcaagttgattagaaagaccaggccaatgtcagggtacctggggccaaacccacctgctagtgtgaattaaagtactttaattttgttttctgtggaggtggaaaagcaacattcatagtctttggagaaatgcttagaaattcagcatttgacccttgctgtgaattaagcccaattaattcctgtttgtctacatatgatctgtctgtggcaaaagtttaatcagaggaaattctttcccagtctgtcgatttatgcctcagccacttgcctgtgctacaattcattgtgttacctgtagattcaggtaatacaaactatatataatcatcaagtaatacaaactaatttagtaatagcctgggttaagtattattagggccctgtgtctgctgtagaaaaaaaaattcacatgatgcacttcaaattcaaataaaaatccttttggcatgttcccatttttgcttagctcaattagtgtggctaaccaagagataactgtaaatgtgacattgatttgctcttactacagcttcagtgattgggggaggaaaagtcccaacccaatgggctcaaacttctaaggggtactcctctcatccccttatccttctccctcgacattttctccctctttcttcccatgaccccaaagccaagggcaacagatcagtaaagaacgtggtcagagtagaacccctgaagtattttttaatcctacctcaaaatttaacagttacctgagagatttaacattatctagttcattgaatcattgtatgtggtcatggataaattgcacaccttggaattcgctttctaaaggaaatcaaatgaatggaggaactttccaaacaccactttacttgtgttatatagccaatataactatctctactgaatgtcattgaaaaactaaaaaattaaacttatttacaaata

SEQ ID NO: 307424 - DNA, 2257 bp, Homo sapiens
ttccagagctctggattgttgttaaatatgatgcctttggacaaaagtgctatcgtggttaaaatccaaggttattttgatgcatggcaagctctcctcatcaaaccagacatcttctttaagatttcttggctatacaaaaagtatgagaagtctgtcaaggatttgaaagatgccatagaagttctgatagcagaaaaaagacgcaggatttccacagaagagaaactggaagaatgtatggactttgccactgagttgattttagcagagaaacgtggtgacctgacaagagagaatgtgaaccagtgcatattggaaatgctgatcgcagctcctgacaccatgtctgtctctttgttcttcatgctatttctcattgcaaagcaccctaatgttgaagaggcaataataaaggaaatccagactgttattggtgagagagacataaagattgatgatatacaaaaattaaaagtgatggaaaacttcatttatgagagcatgcggtaccagcctgtcgtggacttggtcatgcgcaaagccttagaagatgatgtaatcgatggctacccagtgaaaaaggggacaaacattatcctgaatattggaaggatgcacagactcgagtttttccccaaacccaatgaatttactcttgaaaattttgcaaagaatgttccttataggtactttcagccatttggctttgggccccgtggctgtgcaggaaagtacatcgccatggtgatgatgaaagccatcctcgttacacttctgagacgattccacgtgaagacattgcaaggacagtgtgttgagagcatacagaagatacacgacttgtccttgcacccagatgagactaaaaacatgctggaaatgatctttaccccaagaaactcagacaggtgtctggaacactagagaaggctggtcagtacccactctggagcatttctcatcagtagttcacatacaaatcatccatccttgccaatagtgtcatcctcacagtgaacactcagtggcccatggcattttataggcatacctcctatgggttgtcaccaagctaggtgctattggtcatctgctcctgttcacaccagagaaccaggctacaagagaaaaagcagaggccaagagtttgagggagaaatagtcggtgaagaaaccgtatccataaagacccgattccaccaaatgtgctttgagaaggataggccttcattaacaaaatgtatgtctggttccccagtagagctctactgcctcaacccaaggggatttttatgtctggggcagaaacactcaagttgattagaaagaccaggccaatgtcagggtacctggggccaaacccacctgctagtgtgaattaaagtactttaattttgttttctgtggaggtggaaaagcaacattcatagtctttggagaaatgcttagaaattcagcatttgacccttgctgtgaattaagcccaattaattcctgtttgtctacatatgatctgtctgtggcaaaagtttaatcagaggaaattctttcccagtctgtcgatttatgcctcagccacttgcctgtgctacaattcattgtgttacctgtagattcaggtaatacaaactatatataatcatcaagtaatacaaactaatttagtaatagcctgggttaagtattattagggccctgtgtctgctgtagaaaaaaaaattcacatgatgcacttcaaattcaaataaaaatccttttggcatgttcccatttttgcttagctcaattagtgtggctaaccaagagataactgtaaatgtgacattgatttgctcttactacagcttcagtgattgggggaggaaaagtcccaacccaatgggctcaaacttctaaggggtactcctctcatccccttatccttctccctcgacattttctccctctttcttcccatgaccccaaagccaagggcaacagatcagtaaagaacgtggtcagagtagaacccctgaagtattttttaatcctacctcaaaatttaacagttacctgagagatttaacattatctagttcattgaatcattgtatgtggtcatggataaattgcacaccttggaattcgctttctaaaggaaatcaaatgaatggaggaactttccaaacaccactttacttgtgttatatagccaatataactatctctactgaatgtcattgaaaaactaaaaaattaaacttatttacaaata

SEQ ID NO: 307425 - DNA, 2541 bp, Homo sapiens
  misc_feature (24)..(24): n is a, c, g, or t
aaacagtgtatcaacgcagagtgnccattacggccgggggagtttctggagggctgaacacgtggaggcaaacaggaaggtgaagaagaacttatcctatcaggacggaaggtcctgtgctcgggatcttccagacgtcgcgactctaaattgccccctctgaggtcaaggaacacaagatggttttggaaatgctgaacccgatacattataacatcaccagcatcgtgcctgaagccatgcctgctgccaccatgccagtcctgctcctcactggcctttttctcttggtgtggaattatgagggcacatcctcaataccaggtcctggctactgcatgggaattggacccctcatctcccacggcagattcctgtggatggggatcggcagtgcctgcaactactacaaccgggtatatggagaattcatgcgagtctggatctctggagaggaaacactcattatcagcaagtcctcaagtatgttccacataatgaagcacaatcattacagctctcgattcggcagcaaacttgggctgcagtgcatcggtatgcatgagaaaggcatcatatttaacaacaatccagagctctggaaaacaactcgacccttctttatgaaagctctgtcaggccccggccttgttcgtatggtcacagtctgtgctgaatccctcaaaacacatctggacaggttggaggaggtgaccaatgaatcgggctatgtggacgtgttgacccttctgcgtcgtgtcatgctggacacctctaacacgctcttcttgaggatccctttggacgaaagtgctatcgtggttaaaatccaaggttattttgatgcatggcaagctctcctcatcaaaccagacatcttctttaagatttcttggctatacaaaaagtatgagaagtctgtcaaggatttgaaagatgccatagaagttctgatagcagaaaaaagacgcaggatttccacagaagagaaactggaagaatgtatggactttgccactgagttgattttagcagagaaacgtggtgacctgacaagagagaatgtgaaccagtgcatattggaaatgctgatcgcagctcctgacaccatgtctgtctctttgttcttcatgctatttctcattgcaaagcaccctaatgttgaagaggcaataataaaggaaatccagactgttattggtgagagagacataaagattgatgatatacaaaaattaaaagtgatggaaaacttcatttatgagagcatgcggtaccagcctgtcgtggacttggtcatgcgcaaagccttagaagatgatgtaatcgatggctacccagtgaaaaaggggacaaacattatcctgaatattggaaggatgcacagactcgagtttttccccaaacccaatgaatttactcttgaaaattttgcaaagaatgttccttataggtactttcagccatttggctttgggccccgtggctgtgcaggaaagtacatcgccatggtgatgatgaaagccatcctcgttacacttctgagacgattccacgtgaagacattgcaaggacagtgtgttgagagcatacagaagatacacgacttgtccttgcacccagatgagactaaaaacatgctggaaatgatctttaccccaagaaactcagacaggtgtctggaacactagagaaggctggtcagtacccactctggagcatttctcatcagtagttcacatacaaatcatccatccttgccaatagtgtcatcctcacagtgaacactcagtggcccatggcattttataggcatacctcctatgggttgtcaccaagctaggtgctattggtcatctgctcctgttcacaccagagaaccaggctacaagagaaaaagcagaggccaagagtttgagggagaaatagtcggtgaagaaaccgtatccataaagacccgattccaccaaatgtgctttgagaaggataggccttcattaacaaaatgtatgtctggttccccagtagagctctactgcctcaacccaaggggatttttatgtctggggcagaaacactcaagttgattagaaagaccaggccaatgtcagggtacctggggccaaacccacctgctagtgtgaattaaagtactttaattttgttttctgtggaggtggaaaagcaacattcatagtctttggagaaatgcttagaaattcagcatttgacccttgctgtgaattaagcccaattaattcctgtttgtctacatatgatctgtctgtggcaaaagtttaatcagaggaaattctttcccagtctgtcgatttatgcctcagccacttgcctgtgctacaattcattgtgttacctgtagattcaggtaatacaaactatatataatcatcaagtaatacaaactaatttagtaatagcctgggttaagtattattagggccctgtgtctgctgtagaaaaaaaaattcacatgatgcacttcaaattcaaataaaaatccttttggcatgttcccatttt

SEQ ID NO: 307426 - DNA, 3645 bp, Homo sapiens
  misc_feature (24)..(24): n is a, c, g, or t
aaacagtgtatcaacgcagagtgnccattacggccgggggagtttctggagggctgaacacgtggaggcaaacaggaaggtgaagaagaacttatcctatcaggacggaaggtcctgtgctcgggatcttccagacgtcgcgactctaaattgccccctctgaggtcaaggaacacaagatggttttggaaatgctgaacccgatacattataacatcaccagcatcgtgcctgaagccatgcctgctgccaccatgccagtcctgctcctcactggcctttttctcttggtgtggaattatgagggcacatcctcaataccaggtcctggctactgcatgggaattggacccctcatctcccacggcagattcctgtggatggggatcggcagtgcctgcaactactacaaccgggtatatggagaattcatgcgagtctggatctctggagaggaaacactcattatcagcaagtcctcaagtatgttccacataatgaagcacaatcattacagctctcgattcggcagcaaacttgggctgcagtgcatcggtatgcatgagaaaggcatcatatttaacaacaatccagagctctggaaaacaactcgacccttctttatgaaagctctgtcaggccccggccttgttcgtatggtcacagtctgtgctgaatccctcaaaacacatctggacaggttggaggaggtgaccaatgaatcgggctatgtggacgtgttgacccttctgcgtcgtgtcatgctggacacctctaacacgctcttcttgaggatccctttggacgaaagtgctatcgtggttaaaatccaaggttattttgatgcatggcaagctctcctcatcaaaccagacatcttctttaagatttcttggctatacaaaaagtatgagaagtctgtcaaggatttgaaagatgccatagaagttctgatagcagaaaaaagacgcaggatttccacagaagagaaactggaagaatgtatggactttgccactgagttgattttagcagagaaacgtggtgacctgacaagagagaatgtgaaccagtgcatattggaaatgctgatcgcagctcctgacaccatgtctgtctctttgttcttcatgctatttctcattgcaaagcaccctaatgttgaagaggcaataataaaggaaatccagactgttattggtgagagagacataaagattgatgatatacaaaaattaaaagtgatggaaaacttcatttatgagagcatgcggtaccagcctgtcgtggacttggtcatgcgcaaagccttagaagatgatgtaatcgatggctacccagtgaaaaaggggacaaacattatcctgaatattggaaggatgcacagactcgagtttttccccaaacccaatgaatttactcttgaaaattttgcaaagaatgttccttataggtactttcagccatttggctttgggccccgtggctgtgcaggaaagtacatcgccatggtgatgatgaaagccatcctcgttacacttctgagacgattccacgtgaagacattgcaaggacagtgtgttgagagcatacagaagatacacgacttgtccttgcacccagatgagactaaaaacatgctggaaatgatctttaccccaagaaactcagacaggtgtctggaacactagagaaggctggtcagtacccactctggagcatttctcatcagtagttcacatacaaatcatccatccttgccaatagtgtcatcctcacagtgaacactcagtggcccatggcattttataggcatacctcctatgggttgtcaccaagctaggtgctattggtcatctgctcctgttcacaccagagaaccaggctacaagagaaaaagcagaggccaagagtttgagggagaaatagtcggtgaagaaaccgtatccataaagacccgattccaccaaatgtgctttgagaaggataggccttcattaacaaaatgtatgtctggttccccagtagagctctactgcctcaacccaaggggatttttatgtctggggcagaaacactcaagttgattagaaagaccaggccaatgtcagggtacctggggccaaacccacctgctagtgtgaattaaagtactttaattttgttttctgtggaggtggaaaagcaacattcatagtctttggagaaatgcttagaaattcagcatttgacccttgctgtgaattaagcccaattaattcctgtttgtctacatatgatctgtctgtggcaaaagtttaatcagaggaaattctttcccagtctgtcgatttatgcctcagccacttgcctgtgctacaattcattgtgttacctgtagattcaggtaatacaaactatatataatcatcaagtaatacaaactaatttagtaatagcctgggttaagtattattagggccctgtgtctgctgtagaaaaaaaaattcacatgatgcacttcaaattcaaataaaaatccttttggcatgttcccatttttgcttagctcaattagtgtggctaaccaagagataactgtaaatgtgacattgatttgctcttactacagcttcagtgattgggggaggaaaagtcccaacccaatgggctcaaacttctatcttcccatgaccccaaagccaagggcaacagatcagtaaagaacgtggtcagagtagaacccctgaagtattttttaatcctacctcaaaatttaacagttacctgagagatttaacattatctagttcattgaatcattgtatgtggtcatggataaattgcacaccttggaattcgctttctaaaggaaatcaaatgaatggaggaactttccaaacaccactttacttgtgttatatagccaatataactatctctactgaatgtcattgaaaaactaaaaaattaaacttatttacaaataggtaaatatttgtcattgaatccattgccatcccatttgactgttcttttcatcctactgtctagtaataagctgagtataagatgacagtgtaatctccctgaaagcaggagctactttctttcttttgtaatctatttccatccccatttccctgtcctgtctccctgtattcactcccaagctcagttctgaatagacattcctgctcagagatactcccaactgatgcagaaaccaaataaagaggtaggtattccaagaattcaagaatggacattagtaaagaataaaacatttatttgagcttggaattatttggatcatctatatggcctaaaaatatatggactatgcctgtgtacctgaatacgtatgtagtcaggtcaagacaatcatccaaataacttagacccctaaaagcaaggccaggatttgcaatttaatgtgtcccaattaattcacttgaaaattagtaacactctgtttacgttgcctctggctggagctgcatggtggaagaagcccaactttggatccatgtacttcacccatccaatactcttgggacatttatgtgtattttatctgtatatatgaagccaatgtctatgtctacacagtcaaagtgaaatgcatgtttgatatagctgtacatagatatctattttgcaggt

SEQ ID NO: 307427 - DNA, 3646 bp, Homo sapiens
  misc_feature (24)..(24): n is a, c, g, or t
aaacagtgtatcaacgcagagtgnccattacggccgggggagtttctggagggctgaacacgtggaggcaaacaggaaggtgaagaagaacttatcctatcaggacggaaggtcctgtgctcgggatcttccagacgtcgcgactctaaattgccccctctgaggtcaaggaacacaagatggttttggaaatgctgaacccgatacattataacatcaccagcatcgtgcctgaagccatgcctgctgccaccatgccagtcctgctcctcactggcctttttctcttggtgtggaattatgagggcacatcctcaataccaggtcctggctactgcatgggaattggacccctcatctcccacggcagattcctgtggatggggatcggcagtgcctgcaactactacaaccgggtatatggagaattcatgcgagtctggatctctggagaggaaacactcattatcagcaagtcctcaagtatgttccacataatgaagcacaatcattacagctctcgattcggcagcaaacttgggctgcagtgcatcggtatgcatgagaaaggcatcatatttaacaacaatccagagctctggaaaacaactcgacccttctttatgaaagctctgtcaggccccggccttgttcgtatggtcacagtctgtgctgaatccctcaaaacacatctggacaggttggaggaggtgaccaatgaatcgggctatgtggacgtgttgacccttctgcgtcgtgtcatgctggacacctctaacacgctcttcttgaggatccctttggacgaaagtgctatcgtggttaaaatccaaggttattttgatgcatggcaagctctcctcatcaaaccagacatcttctttaagatttcttggctatacaaaaagtatgagaagtctgtcaaggatttgaaagatgccatagaagttctgatagcagaaaaaagacgcaggatttccacagaagagaaactggaagaatgtatggactttgccactgagttgattttagcagagaaacgtggtgacctgacaagagagaatgtgaaccagtgcatattggaaatgctgatcgcagctcctgacaccatgtctgtctctttgttcttcatgctatttctcattgcaaagcaccctaatgttgaagaggcaataataaaggaaatccagactgttattggtgagagagacataaagattgatgatatacaaaaattaaaagtgatggaaaacttcatttatgagagcatgcggtaccagcctgtcgtggacttggtcatgcgcaaagccttagaagatgatgtaatcgatggctacccagtgaaaaaggggacaaacattatcctgaatattggaaggatgcacagactcgagtttttccccaaacccaatgaatttactcttgaaaattttgcaaagaatgttccttataggtactttcagccatttggctttgggccccgtggctgtgcaggaaagtacatcgccatggtgatgatgaaagccatcctcgttacacttctgagacgattccacgtgaagacattgcaaggacagtgtgttgagagcatacagaagatacacgacttgtccttgcacccagatgagactaaaaacatgctggaaatgatctttaccccaagaaactcagacaggtgtctggaacactagagaaggctggtcagtacccactctggagcatttctcatcagtagttcacatacaaatcatccatccttgccaatagtgtcatcctcacagtgaacactcagtggcccatggcattttataggcatacctcctatgggttgtcaccaagctaggtgctattggtcatctgctcctgttcacaccagagaaccaggctacaagagaaaaagcagaggccaagagtttgagggagaaatagtcggtgaagaaaccgtatccataaagacccgattccaccaaatgtgctttgagaaggataggccttcattaacaaaatgtatgtctggttccccagtagagctctactgcctcaacccaaggggatttttatgtctggggcagaaacactcaagttgattagaaagaccaggccaatgtcagggtacctggggccaaacccacctgctagtgtgaattaaagtactttaattttgttttctgtggaggtggaaaagcaacattcatagtctttggagaaatgcttagaaattcagcatttgacccttgctgtgaattaagcccaattaattcctgtttgtctacatatgatctgtctgtggcaaaagtttaatcagaggaaattctttcccagtctgtcgatttatgcctcagccacttgcctgtgctacaattcattgtgttacctgtagattcaggtaatacaaactatatataatcatcaagtaatacaaactaatttagtaatagcctgggttaagtattattagggccctgtgtctgctgtagaaaaaaaaattcacatgatgcacttcaaattcaaataaaaatccttttggcatgttcccatttttgcttagctcaattagtgtggctaaccaagagataactgtaaatgtgacattgatttgctcttactacaaggggtactcctctcatccccttatccttctccctcgacattttctccctctttcttcccatgaccccaaagccaagggcaacagatcagtaaagaacgtggtcagagtagaacccctgaagtattttttaatcctacctcaaaatttaacagttacctgagagatttaacattatctagttcattgaatcattgtatgtggtcatggataaattgcacaccttggaattcgctttctaaaggaaatcaaatgaatggaggaactttccaaacaccactttacttgtgttatatagccaatataactatctctactgaatgtcattgaaaaactaaaaaattaaacttatttacaaataggtaaatatttgtcattgaatccattgccatcccatttgactgttcttttcatcctactgtctagtaataagctgagtataagatgacagtgtaatctccctgaaagcaggagctactttctttcttttgtaatctatttccatccccatttccctgtcctgtctccctgtattcactcccaagctcagttctgaatagacattcctgctcagagatactcccaactgatgcagaaaccaaataaagaggtaggtattccaagaattcaagaatggacattagtaaagaataaaacatttatttgagcttggaattatttggatcatctatatggcctaaaaatatatggactatgcctgtgtacctgaatacgtatgtagtcaggtcaagacaatcatccaaataacttagacccctaaaagcaaggccaggatttgcaatttaatgtgtcccaattaattcacttgaaaattagtaacactctgtttacgttgcctctggctggagctgcatggtggaagaagcccaactttggatccatgtacttcacccatccaatactcttgggacatttatgtgtattttatctgtatatatgaagccaatgtctatgtctacacagtcaaagtgaaatgcatgtttgatatagctgtacatagatatctattttgcaggt

SEQ ID NO: 307428 - DNA, 2888 bp, Homo sapiens
  misc_feature (24)..(24): n is a, c, g, or t
aaacagtgtatcaacgcagagtgnccattacggccgggggagtttctggagggctgaacacgtggaggcaaacaggaaggtgaagaagaacttatcctatcaggacggaaggtcctgtgctcgggatcttccagacgtcgcgactctaaattgccccctctgaggtcaaggaacacaagatggttttggaaatgctgaacccgatacattataacatcaccagcatcgtgcctgaagccatgcctgctgccaccatgccagtcctgctcctcactggcctttttctcttggtgtggaattatgagggcacatcctcaataccaggtcctggctactgcatgggaattggacccctcatctcccacggcagattcctgtggatggggatcggcagtgcctgcaactactacaaccgggtatatggagaattcatgcgagtctggatctctggagaggaaacactcattatcagcaagtcctcaagtatgttccacataatgaagcacaatcattacagctctcgattcggcagcaaacttgggctgcagtgcatcggtatgcatgagaaaggcatcatatttaacaacaatccagagctctggaaaacaactcgacccttctttatgaaagctctgtcaggccccggccttgttcgtatggtcacagtctgtgctgaatccctcaaaacacatctggacaggttggaggaggtgaccaatgaatcgggctatgtggacgtgttgacccttctgcgtcgtgtcatgctggacacctctaacacgctcttcttgaggatccctttggacgaaagtgctatcgtggttaaaatccaaggttattttgatgcatggcaagctctcctcatcaaaccagacatcttctttaagatttcttggctatacaaaaagtatgagaagtctgtcaaggatttgaaagatgccatagaagttctgatagcagaaaaaagacgcaggatttccacagaagagaaactggaagaatgtatggactttgccactgagttgattttagcagagaaacgtggtgacctgacaagagagaatgtgaaccagtgcatattggaaatgctgatcgcagctcctgacaccatgtctgtctctttgttcttcatgctatttctcattgcaaagcaccctaatgttgaagaggcaataataaaggaaatccagactgttattggtgagagagacataaagattgatgatatacaaaaattaaaagtgatggaaaacttcatttatgagagcatgcggtaccagcctgtcgtggacttggtcatgcgcaaagccttagaagatgatgtaatcgatggctacccagtgaaaaaggggacaaacattatcctgaatattggaaggatgcacagactcgagtttttccccaaacccaatgaatttactcttgaaaattttgcaaagaatgttccttataggtactttcagccatttggctttgggccccgtggctgtgcaggaaagtacatcgccatggtgatgatgaaagccatcctcgttacacttctgagacgattccacgtgaagacattgcaaggacagtgtgttgagagcatacagaagatacacgacttgtccttgcacccagatgagactaaaaacatgctggaaatgatctttaccccaagaaactcagacaggtgtctggaacactagagaaggctggtcagtacccactctggagcatttctcatcagtagttcacatacaaatcatccatccttgccaatagtgtcatcctcacagtgaacactcagtggcccatggcattttataggcatacctcctatgggttgtcaccaagctaggtgctattggtcatctgctcctgttcacaccagagaaccaggctacaagagaaaaagcagaggccaagagtttgagggagaaatagtcggtgaagaaaccgtatccataaagacccgattccaccaaatgtgctttgagaaggataggccttcattaacaaaatgtatgtctggttccccagtagagctctactgcctcaacccaaggggatttttatgtctggggcagaaacactcaagttgattagaaagaccaggccaatgtcagggtacctggggccaaacccacctgctagtgtgaattaaagtactttaattttgttttctgtggaggtggaaaagcaacattcatagtctttggagaaatgcttagaaattcagcatttgacccttgctgtgaattaagcccaattaattcctgtttgtctacatatgatctgtctgtggcaaaagtttaatcagaggaaattctttcccagtctgtcgatttatgcctcagccacttgcctgtgctacaattcattgtgttacctgtagattcaggtaatacaaactatatataatcatcaagtaatacaaactaatttagtaatagcctgggttaagtattattagggccctgtgtctgctgtagaaaaaaaaattcacatgatgcacttcaaattcaaataaaaatccttttggcatgttcccattttaaaaaaaaaaaaaaaaaaaaaaaaaaaaaaaaaaaaaaaaaaatttttgggcggccgggccccaaaaatttttaaacccatctccgttggggcgcgggcgcccaagtggggtacgtgcaacactggggcacaaaggcgggtcccctaagaggagaactccgcggccaaaagagactaaggcggtggggtttcctcccaatataaaaaacaacggccggggggggacacccggaggcgtgttcgtgagaaacaacctcacaaaatggaggggcacaagagcgacccacgcggggagtcttattcagacggggcgccaaacggagagcgccgaatatataaattatcgg

SEQ ID NO: 307429 - DNA, 1844 bp, Homo sapiens
gcttaaggatgatgaaagccatcctcgttacacgttctgagacgatcccacgtgaagacattgcaaggacagtgtgttgagagcatacagaagatacacgacttgtccttgcaatgtcttcatgcgcaaagccttagaagatgatgtaatcgatggctacccagtgaaaaaggggacaaacattatcctgaatattggaaggatgcacagactcgagtttttccccaaacccaatgaatttactcttgaaaattttgcaaagaatgttccttataggtactttcagccatttggctttgggccccgtggctgtgcaggaaagtacatcgccatggtgatgatgaaagccatcctcgttacacttctgagacgattccacgtgaagacattgcaaggacagtgtgttgagagcatacagaagatacacgacttgtccttgcacccagatgagactaaaaacatgctggaaatgatctttaccccaagaaactcagacaggtgtctggaacactagagaaggctggtcagtacccactctggagcatttctcatcagtagttcacatacaaatcatccatccttgccaatagtgtcatcctcacagtgaacactcagtggcccatggcattttataggcatacctcctatgggttgtcaccaagctaggtgctattggtcatctgctcctgttcacaccagagaaccaggctacaagagaaaaagcagaggccaagagtttgagggagaaatagtcggtgaagaaaccgtatccataaagacccgattccaccaaatgtgctttgagaaggataggccttcattaacaaaatgtatgtctggttccccagtagagctctactgcctcaacccaaggggatttttatgtctggggcagaaacactcaagttgattagaaagaccaggccaatgtcagggtacctggggccaaacccacctgctagtgtgaattaaagtactttaattttgttttctgtggaggtggaaaagcaacattcatagtctttggagaaatgcttagaaattcagcatttgacccttgctgtgaattaagcccaattaattcctgtttgtctacatatgatctgtctgtggcaaaagtttaatcagaggaaattctttcccagtctgtcgatttatgcctcagccacttgcctgtgctacaattcattgtgttacctgtagattcaggtaatacaaactatatataatcatcaagtaatacaaactaatttagtaatagcctgggttaagtattattagggccctgtgtctgctgtagaaaaaaaaattcacatgatgcacttcaaattcaaataaaaatccttttggcatgttcccatttttgcttagctcaattagtgtggctaaccaagagataactgtaaatgtgacattgatttgctcttactacagcttcagtgattgggggaggaaaagtcccaacccaatgggctcaaacttctaaggggtactcctctcatccccttatccttctccctcgacattttctccctctttcttcccatgaccccaaagccaagggcaacagatcagtaaagaacgtggtcagagtagaacccctgaagtattttttaatcctacctcaaaatttaacagttacctgagagatttaacattatctagttcattgaatcattgtatgtggtcatggataaattgcacaccttggaattcgctttctaaaggaaatcaaatgaatggaggaactttccaaacaccactttacttgtgttatatagccaatataactatctctactgaatgtcattgaaaaactaaaaaattaaacttatttacaaata

SEQ ID NO: 307430 - DNA, 1949 bp, Homo sapiens
atatggtgtcacacaaaaataatctttgccttagtgacttataaaacaatagtaaatctgtggctattccacagagctacctgattatactaacacttgctgtaataagatttggtttgcattgctttaccccagcacatgaaaggcaaaactggggactctctgaggttgggtcagaacacagggggtgaatgaaataggacatagaaagggcttgagttccagttgttcatctgaggggatggagggcattgtagctgataaccccaaaacagtgttctgactgacccatgttttcagaatgaatcaaacagagactgagtgactctagcctttaatattctggctaactgtctgatcattttcataggttccttataggtactttcagccatttggctttgggccccgtggctgtgcaggaaagtacatcgccatggtgatgatgaaagccatcctcgttacacttctgagacgattccacgtgaagacattgcaaggacagtgtgttgagagcatacagaagatacacgacttgtccttgcacccagatgagactaaaaacatgctggaaatgatctttaccccaagaaactcagacaggtgtctggaacactagagaaggctggtcagtacccactctggagcatttctcatcagtagttcacatacaaatcatccatccttgccaatagtgtcatcctcacagtgaacactcagtggcccatggcattttataggcatacctcctatgggttgtcaccaagctaggtgctattggtcatctgctcctgttcacaccagagaaccaggctacaagagaaaaagcagaggccaagagtttgagggagaaatagtcggtgaagaaaccgtatccataaagacccgattccaccaaatgtgctttgagaaggataggccttcattaacaaaatgtatgtctggttccccagtagagctctactgcctcaacccaaggggatttttatgtctggggcagaaacactcaagttgattagaaagaccaggccaatgtcagggtacctggggccaaacccacctgctagtgtgaattaaagtactttaattttgttttctgtggaggtggaaaagcaacattcatagtctttggagaaatgcttagaaattcagcatttgacccttgctgtgaattaagcccaattaattcctgtttgtctacatatgatctgtctgtggcaaaagtttaatcagaggaaattctttcccagtctgtcgatttatgcctcagccacttgcctgtgctacaattcattgtgttacctgtagattcaggtaatacaaactatatataatcatcaagtaatacaaactaatttagtaatagcctgggttaagtattattagggccctgtgtctgctgtagaaaaaaaaattcacatgatgcacttcaaattcaaataaaaatccttttggcatgttcccatttttgcttagctcaattagtgtggctaaccaagagataactgtaaatgtgacattgatttgctcttactacagcttcagtgattgggggaggaaaagtcccaacccaatgggctcaaacttctaaggggtactcctctcatccccttatccttctccctcgacattttctccctctttcttcccatgaccccaaagccaagggcaacagatcagtaaagaacgtggtcagagtagaacccctgaagtattttttaatcctacctcaaaatttaacagttacctgagagatttaacattatctagttcattgaatcattgtatgtggtcatggataaattgcacaccttggaattcgctttctaaaggaaatcaaatgaatggaggaactttccaaacaccactttacttgtgttatatagccaatataactatctctactgaatgtcattgaaaaactaaaaaattaaacttatttacaaata

SEQ ID NO: 307431 - DNA, 2360 bp, Homo sapiens
  misc_feature (24)..(24): n is a, c, g, or t
aaacagtgtatcaacgcagagtgnccattacggccgggggagtttctggagggctgaacacgtggaggcaaacaggaaggtgaagaagaacttatcctatcaggacggaaggtcctgtgctcgggatcttccagacgtcgcgactctaaattgccccctctgaggtcaaggaacacaagatggttttggaaatgctgaacccgatacattataacatcaccagcatcgtgcctgaagccatgcctgctgccaccatgccagtcctgctcctcactggcctttttctcttggtgtggaattatgagggcacatcctcaataccaggtcctggctactgcatgggaattggacccctcatctcccacggcagattcctgtggatggggatcggcagtgcctgcaactactacaaccgggtatatggagaattcatgcgagtctggatctctggagaggaaacactcattatcagcaagtcctcaagtatgttccacataatgaagcacaatcattacagctctcgattcggcagcaaacttgggctgcagtgcatcggtatgcatgagaaaggcatcatatttaacaacaatccagagctctggaaaacaactcgacccttctttatgaaagctctgtcaggccccggccttgttcgtatggtcacagtctgtgctgaatccctcaaaacacatctggacaggttggaggaggtgaccaatgaatcgggctatgtggacgtgttgacccttctgcgtcgtgtcatgctggacacctctaacacgctcttcttgaggatccctttggacgaaagtgctatcgtggttaaaatccaaggttattttgatgcatggcaagctctcctcatcaaaccagacatcttctttaagatttcttggctatacaaaaagtatgagaagtctgtcaaggatttgaaagatgccatagaagttctgatagcagaaaaaagacgcaggatttccacagaagagaaactggaagaatgtatggactttgccactgagttgattttagcagagaaacgtggtgacctgacaagagagaatgtgaaccagtgcatattggaaatgctgatcgcagctcctgacaccatgtctgtctctttgttcttcatgctatttctcattgcaaagcaccctaatgttgaagaggcaataataaaggaaatccagactgttattggtgagagagacataaagattgatgatatacaaaaattaaaagtgatggaaaacttcatttatgagagcatgcggtaccagcctgtcgtggacttggtcatgcgcaaagccttagaagatgatgtaatcgatggctacccagtgaaaaaggggacaaacattatcctgaatattggaaggatgcacagactcgagtttttccccaaacccaatgaatttactcttgaaaattttgcaaagaatgttccttataggtactttcagccatttggctttgggccccgtggctgtgcaggaaagtacatcgccatggtgatgatgaaagccatcctcgttacacttctgagacgattccacgtgaagacattgcaaggacagtgtgttgagagcatacagaagatacacgacttgtccttgcacccagatgagactaaaaacatgctggaaatgatctttaccccaagaaactcagacaggtgtctggaacactagagaaggctggtcagtacccactctggagcatttctcatcagtagttcacatacaaatcatccatctacaaactaatttagtaatagcctgggttaagtattattagggccctgtgtctgctgtagaaaaaaaaattcacatgatgcacttcaaattcaaataaaaatccttttggcatgttcccatttttgcttagctcaattagtgtggctaaccaagagataactgtaaatgtgacattgatttgctcttactacagcttcagtgattgggggaggaaaagtcccaacccaatgggctcaaacttctaaggggtactcctctcatccccttatccttctccctcgacattttctccctctttcttcccatgaccccaaagccaagggcaacagatcagtaaagaacgtggtcagagtagaacccctgaagtattttttaatcctacctcaaaatttaacagttacctgagagatttaacattatctagttcattgaatcattgtatgtggtcatggataaattgcacaccttggaattcgctttctaaaggaaatcaaatgaatggaggaactttccaaacaccactttacttgtgttatatagccaatataactatctctactgaatgtcattgaaaaactaaaaaattaaacttatttacaaata

SEQ ID NO: 307432 - DNA, 1098 bp, Homo sapiens
  misc_feature (58)..(58): n is a, c, g, or t
ttgataatccaggccctgggaggcttctttacttactcgctacaccgtgtgtacgagntaaggataggccttcattaacaaaatgtatgtctggttccccagtagagctctactgcctcaacccaaggggatttttatgtctggggcagaaacactcaagttgattagaaagaccaggccaatgtcagggtacctggggccaaacccacctgctagtgtgaattaaagtactttaattttgttttctgtggaggtggaaaagcaacattcatagtctttggagaaatgcttagaaattcagcatttgacccttgctgtgaattaagcccaattaattcctgtttgtctacatatgatctgtctgtggcaaaagtttaatcagaggaaattctttcccagtctgtcgatttatgcctcagccacttgcctgtgctacaattcattgtgttacctgtagattcaggtaatacaaactatatataatcatcaagtaatacaaactaatttagtaatagcctgggttaagtattattagggccctgtgtctgctgtagaaaaaaaaattcacatgatgcacttcaaattcaaataaaaatccttttggcatgttcccatttttgcttagctcaattagtgtggctaaccaagagataactgtaaatgtgacattgatttgctcttactacagcttcagtgattgggggaggaaaagtcccaacccaatgggctcaaacttctaaggggtactcctctcatccccttatccttctccctcgacattttctccctctttcttcccatgaccccaaagccaagggcaacagatcagtaaagaacgtggtcagagtagaacccctgaagtattttttaatcctacctcaaaatttaacagttacctgagagatttaacattatctagttcattgaatcattgtatgtggtcatggataaattgcacaccttggaattcgctttctaaaggaaatcaaatgaatggaggaactttccaaacaccactttacttgtgttatatagccaatataactatctctactgaatgtcattgaaaaactaaaaaattaaacttatttacaaata

SEQ ID NO: 307433 - DNA, 1039 bp, Homo sapiens
aggaccccaattaggctggcgcacagtatgtacgctacccgatgatagctctactgcctcaacccaaggggatttttatgtctggggcagaaacactcaagttgattagaaagaccaggccaatgtcagggtacctggggccaaacccacctgctagtgtgaattaaagtactttaattttgttttctgtggaggtggaaaagcaacattcatagtctttggagaaatgcttagaaattcagcatttgacccttgctgtgaattaagcccaattaattcctgtttgtctacatatgatctgtctgtggcaaaagtttaatcagaggaaattctttcccagtctgtcgatttatgcctcagccacttgcctgtgctacaattcattgtgttacctgtagattcaggtaatacaaactatatataatcatcaagtaatacaaactaatttagtaatagcctgggttaagtattattagggccctgtgtctgctgtagaaaaaaaaattcacatgatgcacttcaaattcaaataaaaatccttttggcatgttcccatttttgcttagctcaattagtgtggctaaccaagagataactgtaaatgtgacattgatttgctcttactacagcttcagtgattgggggaggaaaagtcccaacccaatgggctcaaacttctaaggggtactcctctcatccccttatccttctccctcgacattttctccctctttcttcccatgaccccaaagccaagggcaacagatcagtaaagaacgtggtcagagtagaacccctgaagtattttttaatcctacctcaaaatttaacagttacctgagagatttaacattatctagttcattgaatcattgtatgtggtcatggataaattgcacaccttggaattcgctttctaaaggaaatcaaatgaatggaggaactttccaaacaccactttacttgtgttatatagccaatataactatctctactgaatgtcattgaaaaactaaaaaattaaacttatttacaaata

SEQ ID NO: 307434 - DNA, 1488 bp, Homo sapiens
  misc_feature (24)..(24): n is a, c, g, or t
aaacagtgtatcaacgcagagtgnccattacggccgggggagtttctggagggctgaacacgtggaggcaaacaggaaggtgaagaagaacttatcctatcaggacggaaggtcctgtgctcgggatcttccagacgtcgcgactctaaattgccccctctgaggtcaaggaacacaagatggttttggaaatgctgaacccgatacattataacatcaccagcatcgtgcctgaagccatgcctgctgccaccatgccagtcctgctcctcactggcctttttctcttggtgtggaattatgagggcacatcctcaataccaggtcctggctactgcatgggaattggacccctcatctcccacggcagattcctgtggatggggatcggcagtgcctgcaactactacaaccgggtatatggagaattcatgcgagtctggatctctggagaggaaacactcattatcagcaagtcctcaagtatgttccacataatgaagcacaatcattacagctctcgattcggcagcaaacttgggctgcagtgcatcggtatgcatgagaaaggcatcatatttaacaacaatccagagctctggaaaacaactcgacccttctttatgaaagctctgtcaggccccggccttgttcgtatggtcacagtctgtgctgaatccctcaaaacacatctggacaggttggaggaggtgaccaatgaatcgggctatgtggacgtgttgacccttctgcgtcgtgtcatgctggacacctctaacacgctcttcttgaggatccctttggacgaaagtgctatcgtggttaaaatccaaggttattttgatgcatggcaagctctcctcatcaaaccagacatcttctttaagatttcttggctatacaaaaagtatgagaagtctgtcaaggatttgaaagatgccatagaagttctgatagcagaaaaaagacgcaggatttccacagaagagaaactggaagaatgtatggactttgccactgagttgattttagcagagaaacgtggtgacctgacaagagagaatgtgaaccagtgcatattggaaatgctgatcgcagctcctgacaccatgtctgtctctttgttcttcatgctatttctcattgcaaagcaccctaatgttgaagaggcaataataaaggaaatccagactgttattggtgagagagacataaagattgatgatatacaaaaattaaaagtgatggaaaacttcatttatgagagcatgcggtaccagcctgtcgtggacttggtcatgcgcaaagccttagaagatgatgtaatcgatggctacccagtgaaaaaggggacaaacattatcctgaatattggaaggatgcacagactcgagtttttccccaaacccaatgaatttactcttgaaaattttgcaaagaatgtaagagcccttccttaaaactgagtgtgccactcttgaaaatgtc

SEQ ID NO: 307435 - DNA, 1306 bp, Homo sapiens
  misc_feature (24)..(24): n is a, c, g, or t
  misc_feature (1275)..(1277): n is a, c, g, or t
  misc_feature (1289)..(1290): n is a, c, g, or t
  misc_feature (1296)..(1296): n is a, c, g, or t
aaacagtgtatcaacgcagagtgnccattacggccgggggagtttctggagggctgaacacgtggaggcaaacaggaaggtgaagaagaacttatcctatcaggacggaaggtcctgtgctcgggatcttccagacgtcgcgactctaaattgccccctctgaggtcaaggaacacaagatggttttggaaatgctgaacccgatacattataacatcaccagcatcgtgcctgaagccatgcctgctgccaccatgccagtcctgctcctcactggcctttttctcttggtgtggaattatgagggcacatcctcaataccaggtcctggctactgcatgggaattggacccctcatctcccacggcagattcctgtggatggggatcggcagtgcctgcaactactacaaccgggtatatggagaattcatgcgagtctggatctctggagaggaaacactcattatcagcaagtcctcaagtatgttccacataatgaagcacaatcattacagctctcgattcggcagcaaacttgggctgcagtgcatcggtatgcatgagaaaggcatcatatttaacaacaatccagagctctggaaaacaactcgacccttctttatgaaagctctgtcaggccccggccttgttcgtatggtcacagtctgtgctgaatccctcaaaacacatctggacaggttggaggaggtgaccaatgaatcgggctatgtggacgtgttgacccttctgcgtcgtgtcatgctggacacctctaacacgctcttcttgaggatccctttggacgaaagtgctatcgtggttaaaatccaaggttattttgatgcatggcaagctctcctcatcaaaccagacatcttctttaagatttcttggctatacaaaaagtatgagaagtctgtcaaggatttgaaagatgccatagaagttctgatagcagaaaaaagacgcaggatttccacagaagagaaactggaagaatgtatggactttgccactgagttgattttagcagagaaacgtggtgacctgacaagagagaatgtgaaccagtgcatattggaaatgctgatcgcagctcctgacaccatgtctgtctctttgttcttcatgctatttctcattgcaaagcaccctaatgttgaagaggcaataataaaggaaatccagactgttattggtaagaatttatcaaataaataatacatcttaaaaacaaggtaaaaaaaaaaaaaaaaacaaacacaaaaaaacnnntggggggcgccnngggccncggaaaaacc

SEQ ID NO: 307436 - DNA, 639 bp, Homo sapiens
gtatccagaggatcccttcagcacatttagtcaagtacaaactaatttagtaatagcctgggttaagtattattagggccctgtgtctgctgtagaaaaaaaaattcacatgatgcacttcaaattcaaataaaaatccttttggcatgttcccatttttgcttagctcaattagtgtggctaaccaagagataactgtaaatgtgacattgatttgctcttactacagcttcagtgattgggggaggaaaagtcccaacccaatgggctcaaacttctaaggggtactcctctcatccccttatccttctccctcgacattttctccctctttcttcccatgaccccaaagccaagggcaacagatcagtaaagaacgtggtcagagtagaacccctgaagtattttttaatcctacctcaaaatttaacagttacctgagagatttaacattatctagttcattgaatcattgtatgtggtcatggataaattgcacaccttggaattcgctttctaaaggaaatcaaatgaatggaggaactttccaaacaccactttacttgtgttatatagccaatataactatctctactgaatgtcattgaaaaactaaaaaattaaacttatttacaaata

SEQ ID NO: 307437 - DNA, 2168 bp, Homo sapiens
  misc_feature (24)..(24): n is a, c, g, or t
aaacagtgtatcaacgcagagtgnccattacggccgggggagtttctggagggctgaacacgtggaggcaaacaggaaggtgaagaagaacttatcctatcaggacggaaggtcctgtgctcgggatcttccagacgtcgcgactctaaattgccccctctgaggtcaaggaacacaagatggttttggaaatgctgaacccgatacattataacatcaccagcatcgtgcctgaagccatgcctgctgccaccatgccagtcctgctcctcactggcctttttctcttggtgtggaattatgagggcacatcctcaataccaggtcctggctactgcatgggaattggacccctcatctcccacggcagattcctgtggatggggatcggcagtgcctgcaactactacaaccgggtatatggagaattcatgcgagtctggatctctggagaggaaacactcattatcagcaagtcctcaagtatgttccacataatgaagcacaatcattacagctctcgattcggcagcaaacttgggctgcagtgcatcggtatgcatgagaaaggcatcatatttaacaacaatccagagctctggaaaacaactcgacccttctttatgaaagctctgtcaggccccggccttgttcgtatggtcacagtctgtgctgaatccctcaaaacacatctggacaggttggaggaggtgaccaatgaatcgggctatgtggacgtgttgacccttctgcgtcgtgtcatgctggacacctctaacacgctcttcttgaggatccctttggacggtactgaaattttcactctcacatcttgaccatctgtcctttactgaacaaggagctaggagggataacagaccaaaggaatcacatgccattttctacattgctcttgtttaaacatttctaagtactcctcgtttttttccctagtgtttctgctttgttcacttataaaatataaatttccataaagtaggggccagcatctactagccttttgtatctttcctcattactctaggaaatagaattctacccacagttgaaacttaacaaatgtgattagttcgtttggttattaacatatcctaccaccaatcaactttatatatttaaccatttccagttgttcttttgggcatgatatatacatacatatatacatacatacccacacatatatacacacactcctccctcaaagctactaaacatgaaaacattgtgcctatatgataaaaatgtcaatattgctggtgatactgatgctgatggaaatgacgatattagctgccattaacgtagtatctaatgtgtgccaaacaatattaaaaattgctgtatatacatgtttgccatttattatttataaccttaacaagatgtctcactcataagactactttccgcactatgatacagaaatgaatattaaaacatgtgcatgctcatgtcaaactcatagaacttgattttattttggcaggattaaaccaatttgcaacttgagtacaaatgccaatatttcagctagttcttgaaaagttgtgccattgtgcaaaagtcattgaattatttgataactttttaacctaatgaccaaacacctgacaggaatggaattcactggacttgtatctaattgttttacactgttttctatgggttacattttttattgccattgtgacctttatccacacactaacctggaaagtataggaataaaagaattggcattctttctgatacaccctttttgttttcttcttaaagtcatttatattatgtattactcttaaagaatgttttagtctccattttagtagtctgtgcataaggtagtaatacatgtacacaaagaaaaattcacaagcccattcaggtgtcttttagaacattatttaccactaaatatttatacagttgacataatgcttattatgcccttgaataatagaatttgttttgtttttacttcttatccataagcattggccttacattgcctcaagaggaacagaatttattattaaacaggattcttaaatccataactcatattgtgacttcatacattttgtaaccctagtagtgaatataccctaaaaacctataaatccccccaaatcactctactgatg

SEQ ID NO: 307438 - DNA, 500 bp, Homo sapiens
gatcaagaggaccccttcagtgcttagctcaattagtgtggctaaccaagagataactgtaaatgtgacattgatttgctcttactacagcttcagtgattgggggaggaaaagtcccaacccaatgggctcaaacttctaaggggtactcctctcatccccttatccttctccctcgacattttctccctctttcttcccatgaccccaaagccaagggcaacagatcagtaaagaacgtggtcagagtagaacccctgaagtattttttaatcctacctcaaaatttaacagttacctgagagatttaacattatctagttcattgaatcattgtatgtggtcatggataaattgcacaccttggaattcgctttctaaaggaaatcaaatgaatggaggaactttccaaacaccactttacttgtgttatatagccaatataactatctctactgaatgtcattgaaaaactaaaaaattaaacttatttacaaata

SEQ ID NO: 307439 - DNA, 1282 bp, Homo sapiens
  misc_feature (24)..(24): n is a, c, g, or t
aaacagtgtatcaacgcagagtgnccattacggccgggggagtttctggagggctgaacacgtggaggcaaacaggaaggtgaagaagaacttatcctatcaggacggaaggtcctgtgctcgggatcttccagacgtcgcgactctaaattgccccctctgaggtcaaggaacacaagatggttttggaaatgctgaacccgatacattataacatcaccagcatcgtgcctgaagccatgcctgctgccaccatgccagtcctgctcctcactggcctttttctcttggtgtggaattatgagggcacatcctcaataccaggtcctggctactgcatgggaattggacccctcatctcccacggcagattcctgtggatggggatcggcagtgcctgcaactactacaaccgggtatatggagaattcatgcgagtctggatctctggagaggaaacactcattatcagcaagtcctcaagtatgttccacataatgaagcacaatcattacagctctcgattcggcagcaaacttgggctgcagtgcatcggtatgcatgagaaaggcatcatatttaacaacaatccagagctctggaaaacaactcgacccttctttatgaaagctctgtcaggccccggccttgttcgtatggtcacagtctgtgctgaatccctcaaaacacatctggacaggttggaggaggtgaccaatgaatcgggctatgtggacgtgttgacccttctgcgtcgtgtcatgctggacacctctaacacgctcttcttgaggatccctttggacggtactgaaattttcactctcacatcttgaccatctgtcctttactgaacaaggagctaggagggataacagaccaaaggaatcacatgccattttctacattgctcttgtttaaacatttctaagtactcctcgtttttttccctagtgtttctgctttgttcacttataaaatataaatttccataaagtaggggccagcatctactagccttttgtatctttcctcattactctaggaaatagaattctacccacagttgaaacttaacaaatgtgattagttcgtttggttattaacatatcctaccaccaatcaactttatatatttaaccatttccagttgttcttttgggcatgatatatacatacatatatacatacatacccacacatatatacacaccccaaaacacatacattgaaagtgcctcatctgaataaaatgacttgtgtcttccctttgggatctgct

SEQ ID NO: 307440 - DNA, 1129 bp, Homo sapiens
  misc_feature (24)..(24): n is a, c, g, or t
  misc_feature (1098)..(1100): n is a, c, g, or t
  misc_feature (1112)..(1113): n is a, c, g, or t
  misc_feature (1119)..(1119): n is a, c, g, or t
aaacagtgtatcaacgcagagtgnccattacggccgggggagtttctggagggctgaacacgtggaggcaaacaggaaggtgaagaagaacttatcctatcaggacggaaggtcctgtgctcgggatcttccagacgtcgcgactctaaattgccccctctgaggtcaaggaacacaagatggttttggaaatgctgaacccgatacattataacatcaccagcatcgtgcctgaagccatgcctgctgccaccatgccagtcctgctcctcactggcctttttctcttggtgtggaattatgagggcacatcctcaataccaggtcctggctactgcatgggaattggacccctcatctcccacggcagattcctgtggatggggatcggcagtgcctgcaactactacaaccgggtatatggagaattcatgcgagtctggatctctggagaggaaacactcattatcagcaagtcctcaagtatgttccacataatgaagcacaatcattacagctctcgattcggcagcaaacttgggctgcagtgcatcggtatgcatgagaaaggcatcatatttaacaacaatccagagctctggaaaacaactcgacccttctttatgaaagaaagtgctatcgtggttaaaatccaaggttattttgatgcatggcaagctctcctcatcaaaccagacatcttctttaagatttcttggctatacaaaaagtatgagaagtctgtcaaggatttgaaagatgccatagaagttctgatagcagaaaaaagacgcaggatttccacagaagagaaactggaagaatgtatggactttgccactgagttgattttagcagagaaacgtggtgacctgacaagagagaatgtgaaccagtgcatattggaaatgctgatcgcagctcctgacaccatgtctgtctctttgttcttcatgctatttctcattgcaaagcaccctaatgttgaagaggcaataataaaggaaatccagactgttattggtaagaatttatcaaataaataatacatcttaaaaacaaggtaaaaaaaaaaaaaaaaacaaacacaaaaaaacnnntggggggcgccnngggccncggaaaaacc

SEQ ID NO: 307441 - DNA, 1100 bp, Homo sapiens
tggtttcttcaccggactatttctccctcaaactctgggcctctgctttttctctggtagccgggttctcgggtgtgaacaggagcagatgaccaatagcacctagctgggtgacaatcttcccatgaccccaaagccaagggcaacagatcagtaaagaacgtggtcagagtagaacccctgaagtattttttaatcctacctcaaaatttaacagttacctgagagatttaacattatctagttcattgaatcattgtatgtggtcatggataaattgcacaccttggaattcgctttctaaaggaaatcaaatgaatggaggaactttccaaacaccactttacttgtgttatatagccaatataactatctctactgaatgtcattgaaaaactaaaaaattaaacttatttacaaataggtaaatatttgtcattgaatccattgccatcccatttgactgttcttttcatcctactgtctagtaataagctgagtataagatgacagtgtaatctccctgaaagcaggagctactttctttcttttgtaatctatttccatccccatttccctgtcctgtctccctgtattcactcccaagctcagttctgaatagacattcctgctcagagatactcccaactgatgcagaaaccaaataaagaggtaggtattccaagaattcaagaatggacattagtaaagaataaaacatttatttgagcttggaattatttggatcatctatatggcctaaaaatatatggactatgcctgtgtacctgaatacgtatgtagtcaggtcaagacaatcatccaaataacttagacccctaaaagcaaggccaggatttgcaatttaatgtgtcccaattaattcacttgaaaattagtaacactctgtttacgttgcctctggctggagctgcatggtggaagaagcccaactttggatccatgtacttcacccatccaatactcttgggacatttatgtgtattttatctgtatatatgaagccaatgtctatgtctacacagtcaaagtgaaatgcatgtttgatatagctgtacatagatatctattttgcaggt

SEQ ID NO: 307442 - DNA, 497 bp, Homo sapiens
  misc_feature (24)..(24): n is a, c, g, or t
aaacagtgtatcaacgcagagtgnccattacggccgggggagtttctggagggctgaacacgtggaggcaaacaggaaggtgaagaagaacttatcctatcaggacggaaggtcctgtgctcgggatcttccagacgtcgcgactctaaattgccccctctgaggtcaaggaacacaagatggttttggaaatgctgaacccgatacattataacatcaccagcatcgtgcctgaagccatgcctgctgccaccatgccagtcctgctcctcactggcctttttctcttggtgtggaattatgagggcacatcctcaataccaggtcctggctactgcatgggaattggacccctcatctcccacggcagattcctgtggatggggatcggcagtgcctgcaactactacaaccgggtatatggagaattcatgcgagtctggatctctggagaggaaacactcattatcagcaagtgagtctgttcataatcgaag

SEQ ID NO: 307443 - DNA, 1081 bp, Homo sapiens
ctttcccgagtagctaggaccacaggagtgcaccaccacgccctgctaatttttttctatttctggtagagacagggttttggcatgtttcccaggctggacttgaactcctgtgctcaggcaatcccactgcctcagccttcccaaatgctgggattacagatgtgagccactagacctgtcctcaaaatttaacagttacctgagagatttaacattatctagttcattgaatcattgtatgtggtcatggataaattgcacaccttggaattcgctttctaaaggaaatcaaatgaatggaggaactttccaaacaccactttacttgtgttatatagccaatataactatctctactgaatgtcattgaaaaactaaaaaattaaacttatttacaaataggtaaatatttgtcattgaatccattgccatcccatttgactgttcttttcatcctactgtctagtaataagctgagtataagatgacagtgtaatctccctgaaagcaggagctactttctttcttttgtaatctatttccatccccatttccctgtcctgtctccctgtattcactcccaagctcagttctgaatagacattcctgctcagagatactcccaactgatgcagaaaccaaataaagaggtaggtattccaagaattcaagaatggacattagtaaagaataaaacatttatttgagcttggaattatttggatcatctatatggcctaaaaatatatggactatgcctgtgtacctgaatacgtatgtagtcaggtcaagacaatcatccaaataacttagacccctaaaagcaaggccaggatttgcaatttaatgtgtcccaattaattcacttgaaaattagtaacactctgtttacgttgcctctggctggagctgcatggtggaagaagcccaactttggatccatgtacttcacccatccaatactcttgggacatttatgtgtattttatctgtatatatgaagccaatgtctatgtctacacagtcaaagtgaaatgcatgtttgatatagctgtacatagatatctattttgcaggt

SEQ ID NO: 307444 - DNA, 599 bp, Homo sapiens
  misc_feature (24)..(24): n is a, c, g, or t
  misc_feature (522)..(522): n is a, c, g, or t
  misc_feature (540)..(540): n is a, c, g, or t
  misc_feature (589)..(589): n is a, c, g, or t
aaacagtgtatcaacgcagagtgnccattacggccgggggagtttctggagggctgaacacgtggaggcaaacaggaaggtgaagaagaacttatcctatcaggacggaaggtcctgtgctcgggatcttccagacgtcgcgactctaaattgccccctctgaggtcaaggaacacaagatggttttggaaatgctgaacccgatacattataacatcaccagcatcgtgcctgaagccatgcctgctgccaccatgccagtcctgctcctcactggcctttttctcttggtgtggaattatgagggcacatcctcaataccaggtcctggctactgcatgggaattggaccccccatctcacgccacaacaaaattattttgagatagtaatagacccagaagtaaaggctaaaaatataaatctaaaaggaaacaatattttcatgaccttggggtaggcaaagatttattaaagaggacacaaaaaacaacaaacagaaggaaaaacctgaaaattgcntcattataagtgtctggntcctcaaaaggacaccttttaggaaaatggaattggttaggccacagangggaggaggt

SEQ ID NO: 307445 - DNA, 512 bp, Homo sapiens
  misc_feature (24)..(24): n is a, c, g, or t
aaacagtgtatcaacgcagagtgnccattacggccgggggagtttctggagggctgaacacgtggaggcaaacaggaaggtgaagaagaacttatcctatcaggacggaaggtcctgtgctcgggatcttccagacgtcgcgtatgtatctcttaatctgactgagccctcaacctgtgggatcagacactctttccaggtagatagtgttggaactgagttggaggacacccagctggtgcccgctgcttggtgtgtgggggaaaatcccctacatttggtcgcagaagtcttctgtgttgatgactgttgtcgtggtgtgagagcagagggaaaacactgcttgagtgtttttctgaaataggagggcctaagaactatactgttctatgccacagaactggccccctactttccttgaaaggctggctatccaatggtgaggagaggaagtggtagcctgaaccagcctccccatttccccacctcccaccccagttcagagcccagat

SEQ ID NO: 307446 - DNA, 180 bp, Homo sapiens
aaatacatggcaaataaatctgtttcgctagatgtctaaactgagtaaaaatagacaatattttgactttttttccagcaaggatttgaaagatgccatagaagttctgatagcagaaaaaagacgcaggatttccacagaagagaaactggaagaatgtatggactttgccactgagtt

SEQ ID NO: 307447 - DNA, 3951 bp, Homo sapiens
ctgggtcctgtgtgtgccacaggggtggggtgtccagcgagcggtctcctcctcctgctagtgctgctgcggcgtcccgcggcctccccgagtcgggcgggaggggagagcgggtgtggatttgtcttgacggtaattgttgcgtttccacgtctcggaggcctgcgcgctgggttgctccttcttcgggagcgagctgttctcagcgatcccactcccagccggggctccccacacacactgggctgcgtgcgtgtggagtgggacccgcgcacacgcgtgtctctggacagctacggcgccgaaagaactaaaattccagatggcaaactcaatgaatggcagaaaccctggtggtcgaggaggaaatccccgaaaaggtcgaattttgggtattattgatgctattcaggatgcagttggaccccctaagcaagctgccgcagatcgcaggaccgtggagaagacttggaagctcatggacaaagtggtaagactgtgccaaaatcccaaacttcagttgaaaaatagcccaccatatatacttgatattttgcctgatacatatcagcatttacgacttatattgagtaaatatgatgacaaccagaaacttgcccaactcagtgagaatgagtactttaaaatctacattgatagccttatgaaaaagtcaaaacgggcaataagactctttaaagaaggcaaggagagaatgtatgaagaacagtcacaggacagacgaaatctcacaaaactgtcccttatcttcagtcacatgctggcagaaatcaaagcaatctttcccaatggtcaattccagggagataactttcgtatcacaaaagcagatgctgctgaattctggagaaagttttttggagacaaaactatcgtaccatggaaagtattcagacagtgccttcatgaggtccaccagattagctctagcctggaagcaatggctctaaaatcaacaattgatttaacttgcaatgattacatttcagtttttgaatttgatatttttaccaggctgtttcagccttggggctctattttgcggaattggaatttcttagctgtgacacatccaggttacatggcatttctcacatatgatgaagttaaagcacgactacagaaatatagcaccaaacccggaagctatattttccggttaagttgcactcgattgggacagtgggccattggctatgtgactggggatgggaatatcttacagaccatacctcataacaagcccttatttcaagccctgattgatggcagcagggaaggattttatctttatcctgatgggaggagttataatcctgatttaactggattatgtgaacctacacctcatgaccatataaaagttacacaggaacaatatgaattatattgtgaaatgggctccacttttcagctctgtaagatttgtgcagagaatgacaaagatgtcaagattgagccttgtgggcatttgatgtgcacctcttgccttacggcatggcaggagtcggatggtcagggctgccctttctgtcgttgtgaaataaaaggaactgagcccataatcgtggacccctttgatccaagagatgaaggctccaggtgttgcagcatcattgacccctttggcatgccgatgctagacttggacgacgatgatgatcgtgaggagtccttgatgatgaatcggttggcaaacgtccgaaagtgcactgacaggcagaactcaccagtcacatcaccaggatcctctccccttgcccagagaagaaagccacagcctgacccactccagatcccacatctaagcctgccacccgtgcctcctcgcctggatctaattcagaaaggcatagttagatctccctgtggcagcccaacaggttcaccaaagtcttctccttgcatggtgagaaaacaagataaaccactcccagcaccacctcctcccttaagagatcctcctccaccgccacctgaaagacctccaccaatcccaccagacaatagactgagtagacacatccatcatgtggaaagcgtgccttccagagacccgccaatgcctcttgaagcatggtgccctcgggatgtgtttgggactaatcagcttgtgggatgtcgactcctaggggagggctctccaaaacctggaatcacagcgagttcaaatgtcaatggaaggcacagtagagtgggctctgacccagtgcttatgcggaaacacagacgccatgatttgcctttagaaggagctaaggtcttttccaatggtcaccttggaagtgaagaatatgatgttcctccccggctttctcctcctcctccagttaccaccctcctccctagcataaagtgtactggtccgttagcaaattctctttcagagaaaacaagagacccagtagaggaagatgatgatgaatacaagattccttcatcccaccctgtttccctgaattcacaaccatctcattgtcataatgtaaaacctcctgttcggtcttgtgataatggtcactgtatgctgaatggaacacatggtccatcttcagagaagaaatcaaacatccctgacttaagcatatatttaaagggagatgtttttgattcagcctctgatcccgtgccattaccacctgccaggcctccaactcgggacaatccaaagcatggttcttcactcaacaggacgccctctgattatgatcttctcatccctccattaggtgaagatgcttttgatgccctccctccatctctcccacctcccccacctcctgcaaggcatagtctcattgaacattcaaaacctcctggctccagtagccggccatcctcaggacaggatctttttcttcttccttcagatccctttgttgatctagcaagtggccaagttcctttgcctcctgctagaaggttaccaggtgaaaatgtcaaaactaacagaacatcacaggactatgatcagcttccttcatgttcagatggttcacaggcaccagccagaccccctaaaccacgaccgcgcaggactgcaccagaaattcaccacagaaaaccccatgggcctgaggcggcattggaaaatgtcgatgcaaaaattgcaaaactcatgggagagggttatgcctttgaagaggtgaagagagccttagagatagcccagaataatgtcgaagttgcccggagcatcctccgagaatttgccttccctcctccagtatccccacgtctaaatctatagcagccagaactgtagacaccaaaatggaaagcaatcgatgtattccaagagtgtggaaataaagagaactgagatggaattcaagagagaagtgtctcctcctcgtgtagcagcttgagaagaggcttgggagtgcagcttctcaaaggagaccgatgcttgctcaggatgtcgacagctgtggcttccttgtttttgctagccatatttttaaatcagggttgaactgacaaaaataatttaaagacgtttacttcccttgaactttgaacctgtgaaatgctttaccttgtttacagtttggcaaagttgcagtttgttcttgtttttagtttagttttgttttggtgttttgatacctgtactgtgttcttcacagaccctttgtagcgtggtcaggtctgctgtaacatttcccaccaactctcttgctgtccacatcaacagctaaatcatttattcatatggatctctaccatccccatgccttgcccaggtccagttccatttctctcattcacaagatgctttgaaggttctgattttcaactgatcaaactaatgcaaaaaaaaaaaagtatgtattcttcactactgagtttcttctttggaaaccatcactattgagagatgggaaaaacctgaatgtataaagcatttatttgtcaataaactgcctt

SEQ ID NO: 307448 - DNA, 3354 bp, Homo sapiens
ctgggtcctgtgtgtgccacaggggtggggtgtccagcgagcggtctcctcctcctgctagtgctgctgcggcgtcccgcggcctccccgagtcgggcgggaggggagagcgggtgtggatttgtcttgacggtaattgttgcgtttccacgtctcggaggcctgcgcgctgggttgctccttcttcgggagcgagctgttctcagcgatcccactcccagccggggctccccacacacactgggctgcgtgcgtgtggagtgggacccgcgcacacgcgtgtctctggacagctacggcgccgaaagaactaaaattccagatggcaaactcaatgaatggcagaaaccctggtggtcgaggaggaaatccccgaaaaggtcgaattttgggtattattgatgctattcaggatgcagttggaccccctaagcaagctgccgcagatcgcaggaccgtggagaagacttggaagctcatggacaaagtggtaagactgtgccaaaatcccaaacttcagttgaaaaatagcccaccatatatacttgatattttgcctgatacatatcagcatttacgacttatattgagtaaatatgatgacaaccagaaacttgcccaactcagtgagaatgagtactttaaaatctacattgatagccttatgaaaaagtcaaaacgggcaataagactctttaaagaaggcaaggagagaatgtatgaagaacagtcacaggacagacgaaatctcacaaaactgtcccttatcttcagtcacatgctggcagaaatcaaagcaatctttcccaatggtcaattccagggagataactttcgtatcacaaaagcagatgctgctgaattctggagaaagttttttggagacaaaactatcgtaccatggaaagtattcagacagtgccttcatgaggtccaccagattagctctagcctggaagcaatggctctaaaatcaacaattgatttaacttgcaatgattacatttcagtttttgaatttgatatttttaccaggctgtttcagccttggggctctattttgcggaattggaatttcttagctgtgacacatccaggttacatggcatttctcacatatgatgaagttaaagcacgactacagaaatatagcaccaaacccggaagctatattttccggttaagttgcactcgattgggacagtgggccattggctatgtgactggggatgggaatatcttacagaccatacctcataacaagcccttatttcaagccctgattgatggcagcagggaaggattttatctttatcctgatgggaggagttataatcctgatttaactggattatgtgaacctacacctcatgaccatataaaagttacacaggaacaatatgaattatattgtgaaatgggctccacttttcagctctgtaagatttgtgcagagaatgacaaagatgtcaagattgagccttgtgggcatttgatgtgcacctcttgccttacggcatggcaggagtcggatggtcagggctgccctttctgtcgttgtgaaataaaaggaactgagcccataatcgtggacccctttgatccaagagatgaaggctccaggtgttgcagcatcattgacccctttggcatgccgatgctagacttggacgacgatgatgatcgtgaggagtccttgatgatgaatcggttggcaaacgtccgaaagtgcactgacaggcagaactcaccagtcacatcaccaggatcctctccccttgcccagagaagaaagccacagcctgacccactccagatcccacatctaagcctgccacccgtgcctcctcgcctggatctaattcagaaaggcatagttagatctccctgtggcagcccaacaggttcaccaaagtcttctccttgcatggtgagaaaacaagataaaccactcccagcaccacctcctcccttaagagatcctcctccaccgccacctgaaagacctccaccaatcccaccagacaatagactgagtagacacatccatcatgtggaaagcgtgccttccagagacccgccaatgcctcttgaagcatggtgccctcgggatgtgtttgggactaatcagcttgtgggatgtcgactcctaggggagggctctccaaaacctggaatcacagcgagttcaaatgtcaatggaaggcacagtagagtgggctctgacccagtgcttatgcggaaacacagacgccatgatttgcctttagaaggagctaaggtcttttccaatggtcaccttggaagtgaagaatatgatgttcctccccggctttctcctcctcctccagttaccaccctcctccctagcataaagtgtactggtccgttagcaaattctctttcagagaaaacaagagacccagtagaggaagatgatgatgaatacaagattccttcatcccaccctgtttccctgaattcacaaccatctcattgtcataatgtaaaacctcctgttcggtcttgtgataatggtcactgtatgctgaatggaacacatggtccatcttcagagaagaaatcaaacatccctgacttaagcatatatttaaagggtacgtatagaatataatttcctttgtgatgtacatcttaatggtcagaatttaaaggcaaaatttcatgccattgtactgaaaatacattaaggttttgtgttatcctctaggagatgtttttgattcagcctctgatcccgtgccattaccacctgccaggcctccaactcgggacaatccaaagcatggttcttcactcaacaggacgccctctgattatgatcttctcatccctccattaggttgaaacctttaaaaaagttttgaacaacccacccctccttcttttaatttcagaattttcagaattcagagttcagtataacacagactcactgggttgtgaatttgcctgaaatttgaatgggttctccaggtgccggtgactcccaagttcacgagaccattactccatgtagatgattaaggtagtagtgtagtagttgggcatcagtcaggttttaagcaagttgttttgtccatactaaatgtagtctaaaaacacatgagagctttgtgctctagtagttttgaagtgatgacttgaagtgttgagattttctttaagtataataattcttaataaatatgaacttgcttttcttgcagcatgagcaccagttccacttacgctaattaaattatgcaaaattaaatagttgtatgtagagaactgataataaattctgttttattctaatcattacaactgtaacacattcaaaaaaaaaaa

SEQ ID NO: 307449 - DNA, 3241 bp, Homo sapiens
ctgggtcctgtgtgtgccacaggggtggggtgtccagcgagcggtctcctcctcctgctagtgctgctgcggcgtcccgcggcctccccgagtcgggcgggaggggagagcgggtgtggatttgtcttgacggtaattgttgcgtttccacgtctcggaggcctgcgcgctgggttgctccttcttcgggagcgagctgttctcagcgatcccactcccagccggggctccccacacacactgggctgcgtgcgtgtggagtgggacccgcgcacacgcgtgtctctggacagctacggcgccgaaagaactaaaattccagatggcaaactcaatgaatggcagaaaccctggtggtcgaggaggaaatccccgaaaaggtcgaattttgggtattattgatgctattcaggatgcagttggaccccctaagcaagctgccgcagatcgcaggaccgtggagaagacttggaagctcatggacaaagtggtaagactgtgccaaaatcccaaacttcagttgaaaaatagcccaccatatatacttgatattttgcctgatacatatcagcatttacgacttatattgagtaaatatgatgacaaccagaaacttgcccaactcagtgagaatgagtactttaaaatctacattgatagccttatgaaaaagtcaaaacgggcaataagactctttaaagaaggcaaggagagaatgtatgaagaacagtcacaggacagacgaaatctcacaaaactgtcccttatcttcagtcacatgctggcagaaatcaaagcaatctttcccaatggtcaattccagggagataactttcgtatcacaaaagcagatgctgctgaattctggagaaagttttttggagacaaaactatcgtaccatggaaagtattcagacagtgccttcatgaggtccaccagattagctctagcctggaagcaatggctctaaaatcaacaattgatttaacttgcaatgattacatttcagtttttgaatttgatatttttaccaggctgtttcagccttggggctctattttgcggaattggaatttcttagctgtgacacatccaggttacatggcatttctcacatatgatgaagttaaagcacgactacagaaatatagcaccaaacccggaagctatattttccggttaagttgcactcgattgggacagtgggccattggctatgtgactggggatgggaatatcttacagaccatacctcataacaagcccttatttcaagccctgattgatggcagcagggaaggattttatctttatcctgatgggaggagttataatcctgatttaactggattatgtgaacctacacctcatgaccatataaaagttacacaggaacaatatgaattatattgtgaaatgggctccacttttcagctctgtaagatttgtgcagagaatgacaaagatgtcaagattgagccttgtgggcatttgatgtgcacctcttgccttacggcatggcaggagtcggatggtcagggctgccctttctgtcgttgtgaaataaaaggaactgagcccataatcgtggacccctttgatccaagagatgaaggctccaggtgttgcagcatcattgacccctttggcatgccgatgctagacttggacgacgatgatgatcgtgaggagtccttgatgatgaatcggttggcaaacgtccgaaagtgcactgacaggcagaactcaccagtcacatcaccaggatcctctccccttgcccagagaagaaagccacagcctgacccactccagatcccacatctaagcctgccacccgtgcctcctcgcctggatctaattcagaaaggcatagttagatctccctgtggcagcccaacaggttcaccaaagtcttctccttgcatggtgagaaaacaagataaaccactcccagcaccacctcctcccttaagagatcctcctccaccgccacctgaaagacctccaccaatcccaccagacaatagactgagtagacacatccatcatgtggaaagcgtgccttccagagacccgccaatgcctcttgaagcatggtgccctcgggatgtgtttgggactaatcagcttgtgggatgtcgactcctaggggagggctctccaaaacctggaatcacagcgagttcaaatgtcaatggaaggcacagtagagtgggctctgacccagtgcttatgcggaaacacagacgccatgatttgcctttagaaggagctaaggtcttttccaatggtcaccttggaagtgaagaatatgatgttcctccccggctttctcctcctcctccagttaccaccctcctccctagcataaagtgtactggtccgttagcaaattctctttcagagaaaacaagagacccagtagaggaagatgatgatgaatacaagattccttcatcccaccctgtttccctgaattcacaaccatctcattgtcataatgtaaaacctcctgttcggtcttgtgataatggtcactgtatgctgaatggaacacatggtccatcttcagagaagaaatcaaacatccctgacttaagcatatatttaaagggagatgtttttgattcagcctctgatcccgtgccattaccacctgccaggcctccaactcgggacaatccaaagcatggttcttcactcaacaggacgccctctgattatgatcttctcatccctccattaggttgaaacctttaaaaaagttttgaacaacccacccctccttcttttaatttcagaattttcagaattcagagttcagtataacacagactcactgggttgtgaatttgcctgaaatttgaatgggttctccaggtgccggtgactcccaagttcacgagaccattactccatgtagatgattaaggtagtagtgtagtagttgggcatcagtcaggttttaagcaagttgttttgtccatactaaatgtagtctaaaaacacatgagagctttgtgctctagtagttttgaagtgatgacttgaagtgttgagattttctttaagtataataattcttaataaatatgaacttgcttttcttgcagcatgagcaccagttccacttacgctaattaaattatgcaaaattaaatagttgtatgtagagaactgataataaattctgttttattctaatcattacaactgtaacacattcaaaaaaaaaaa

SEQ ID NO: 307450 - DNA, 4108 bp, Homo sapiens
ctgggtcctgtgtgtgccacaggggtggggtgtccagcgagcggtctcctcctcctgctagtgctgctgcggcgtcccgcggcctccccgagtcgggcgggaggggagagcgggtgtggatttgtcttgacggtaattgttgcgtttccacgtctcggaggcctgcgcgctgggttgctccttcttcgggagcgagctgttctcagcgatcccactcccagccggggctccccacacacactgggctgcgtgcgtgtggagtgggacccgcgcacacgcgtgtctctggacagctacggcgccgaaagaactaaaattccagatggcaaactcaatgaatggcagaaaccctggtggtcgaggaggaaatccccgaaaaggtcgaattttgggtattattgatgctattcaggatgcagttggaccccctaagcaagctgccgcagatcgcaggaccgtggagaagacttggaagctcatggacaaagtggtaagactgtgccaaaatcccaaacttcagttgaaaaatagcccaccatatatacttgatattttgcctgatacatatcagcatttacgacttatattgagtaaatatgatgacaaccagaaacttgcccaactcagtgagaatgagtactttaaaatctacattgatagccttatgaaaaagtcaaaacgggcaataagactctttaaagaaggcaaggagagaatgtatgaagaacagtcacaggacagacgaaatctcacaaaactgtcccttatcttcagtcacatgctggcagaaatcaaagcaatctttcccaatggtcaattccagggagataactttcgtatcacaaaagcagatgctgctgaattctggagaaagttttttggagacaaaactatcgtaccatggaaagtattcagacagtgccttcatgaggtccaccagattagctctagcctggaagcaatggctctaaaatcaacaattgatttaacttgcaatgattacatttcagtttttgaatttgatatttttaccaggctgtttcagccttggggctctattttgcggaattggaatttcttagctgtgacacatccaggttacatggcatttctcacatatgatgaagttaaagcacgactacagaaatatagcaccaaacccggaagctatattttccggttaagttgcactcgattgggacagtgggccattggctatgtgactggggatgggaatatcttacagaccatacctcataacaagcccttatttcaagccctgattgatggcagcagggaaggattttatctttatcctgatgggaggagttataatcctgatttaactggattatgtgaacctacacctcatgaccatataaaagttacacaggaacaatatgaattatattgtgaaatgggctccacttttcagctctgtaagatttgtgcagagaatgacaaagatgtcaagattgagccttgtgggcatttgatgtgcacctcttgccttacggcatggcaggagtcggatggtcagggctgccctttctgtcgttgtgaaataaaaggaactgagcccataatcgtggacccctttgatccaagagatgaaggctccaggtgttgcagcatcattgacccctttggcatgccgatgctagacttggacgacgatgatgatcgtgaggagtccttgatgatgaatcggttggcaaacgtccgaaagtgcactgacaggcagaactcaccagtcacatcaccaggatcctctccccttgcccagagaagaaagccacagcctgacccactccagatcccacatctaagcctgccacccgtgcctcctcgcctggatctaattcagaaaggcatagttagatctccctgtggcagcccaacaggttcaccaaagtcttctccttgcatggtgagaaaacaagataaaccactcccagcaccacctcctcccttaagagatcctcctccaccgccacctgaaagacctccaccaatcccaccagacaatagactgagtagacacatccatcatgtggaaagcgtgccttccagagacccgccaatgcctcttgaagcatggtgccctcgggatgtgtttgggactaatcagcttgtgggatgtcgactcctaggggagggctctccaaaacctggaatcacagcgagttcaaatgtcaatggaaggcacagtagagtgggctctgacccagtgcttatgcggaaacacagacgccatgatttgcctttagaaggagctaaggtcttttccaatggtcaccttggaagtgaagaatatgatgttcctccccggctttctcctcctcctccagttaccaccctcctccctagcataaagtgtactggtccgttagcaaattctctttcagagaaaacaagagacccagtagaggaagatgatgatgaatacaagattccttcatcccaccctgtttccctgaattcacaaccatctcattgtcataatgtaaaacctcctgttcggtcttgtgataatggtcactgtatgctgaatggaacacatggtccatcttcagagaagaaatcaaacatccctgacttaagcatatatttaaagggagatgtttttgattcagcctctgatcccgtgccattaccacctgccaggcctccaactcgggacaatccaaagcatggttcttcactcaacaggacgccctctgattatgatcttctcatccctccattaggtgaagatgcttttgatgccctccctccatctctcccacctcccccacctcctgcaaggcatagtctcattgaacattcaaaacctcctggctccagtagccggccatcctcaggacaggatctttttcttcttccttcagatccctttgttgatctagcaagtggccaagttcctttgcctcctgctagaaggttaccaggtgaaaatgtcaaaactaacagaacatcacaggactatgatcagcttccttcatgttcagatggttcacaggcaccagccagaccccctaaaccacgaccgcgcaggactgcaccagaaattcaccacagaaaaccccatgggcctgaggcggcattggaaaatgtcgatgcaaaaattgcaaaactcatgggagagggttatgcctttgaagaggtgaagagagccttagagatagcccagaataatgtcgaagttgcccggagcatcctccgagaatttgccttccctcctccagtatccccacgtctaaatctatagcagccagaactgtagacaccaaaatggaaagcaatcgatgtattccaagagtgtggaaataaagagaactgagatggaattcaagagagaagtgtctcctcctcgtgtagcagcttgagaagaggcttgggagtgcagcttctcaaaggagaccgatgcttgctcaggatgtcgacagctgtggcttccttgtttttgctagccatatttttaaatcagggttgaactgacaaaaataatttaaagacgtttacttcccttgaactttgaacctgtgaaatgctttaccttgtttacagtttggcaaagttgcagtttgttcttgtttttagtttagttttgttttggtgttttgatacctgtactgtgttcttcacagaccctttgtagcgtggtcaggtctgctgtaacatttcccaccaactctcttgctgtccacatcaacagctaaatcatttattcatatggatctctaccatccccatgccttgcccaggtccagttccatttctctcattcacaagatgctttgaaggttctgattttcaactgatcaaactaatgcaaaaaaaaaaaagtatgtattcttcactactgagtttcttctttggaaaccatcactattgagagatgggaaaaacctgaatgtataaagcatttatttgtcaataaactgccttttgtaaggggttttcacataacatagaggagcttcccttttttgtttaagttttgtaacctttaatcctccatattctcatgtctgtcatcccaggggtgtcacaactgtaaaaatctacaatattagaaagcagctactacagatgtggaagagag

SEQ ID NO: 307451 - DNA, 3876 bp, Homo sapiens
cttaatgctactgcgcgtaccgcttactatctgaatcgggcgcgaggtaagagcgtatgtgcatttgtcttgacctaactaaaattccagatggcaaactcaatgaatggcagaaaccctggtggtcgaggaggaaatccccgaaaaggtcgaattttgggtattattgatgctattcaggatgcagttggaccccctaagcaagctgccgcagatcgcaggaccgtggagaagacttggaagctcatggacaaagtggtaagactgtgccaaaatcccaaacttcagttgaaaaatagcccaccatatatacttgatattttgcctgatacatatcagcatttacgacttatattgagtaaatatgatgacaaccagaaacttgcccaactcagtgagaatgagtactttaaaatctacattgatagccttatgaaaaagtcaaaacgggcaataagactctttaaagaaggcaaggagagaatgtatgaagaacagtcacaggacagacgaaatctcacaaaactgtcccttatcttcagtcacatgctggcagaaatcaaagcaatctttcccaatggtcaattccagggagataactttcgtatcacaaaagcagatgctgctgaattctggagaaagttttttggagacaaaactatcgtaccatggaaagtattcagacagtgccttcatgaggtccaccagattagctctagcctggaagcaatggctctaaaatcaacaattgatttaacttgcaatgattacatttcagtttttgaatttgatatttttaccaggctgtttcagccttggggctctattttgcggaattggaatttcttagctgtgacacatccaggttacatggcatttctcacatatgatgaagttaaagcacgactacagaaatatagcaccaaacccggaagctatattttccggttaagttgcactcgattgggacagtgggccattggctatgtgactggggatgggaatatcttacagaccatacctcataacaagcccttatttcaagccctgattgatggcagcagggaaggattttatctttatcctgatgggaggagttataatcctgatttaactggattatgtgaacctacacctcatgaccatataaaagttacacaggaacaatatgaattatattgtgaaatgggctccacttttcagctctgtaagatttgtgcagagaatgacaaagatgtcaagattgagccttgtgggcatttgatgtgcacctcttgccttacggcatggcaggagtcggatggtcagggctgccctttctgtcgttgtgaaataaaaggaactgagcccataatcgtggacccctttgatccaagagatgaaggctccaggtgttgcagcatcattgacccctttggcatgccgatgctagacttggacgacgatgatgatcgtgaggagtccttgatgatgaatcggttggcaaacgtccgaaagtgcactgacaggcagaactcaccagtcacatcaccaggatcctctccccttgcccagagaagaaagccacagcctgacccactccagatcccacatctaagcctgccacccgtgcctcctcgcctggatctaattcagaaaggcatagttagatctccctgtggcagcccaacaggttcaccaaagtcttctccttgcatggtgagaaaacaagataaaccactcccagcaccacctcctcccttaagagatcctcctccaccgccacctgaaagacctccaccaatcccaccagacaatagactgagtagacacatccatcatgtggaaagcgtgccttccagagacccgccaatgcctcttgaagcatggtgccctcgggatgtgtttgggactaatcagcttgtgggatgtcgactcctaggggagggctctccaaaacctggaatcacagcgagttcaaatgtcaatggaaggcacagtagagtgggctctgacccagtgcttatgcggaaacacagacgccatgatttgcctttagaaggagctaaggtcttttccaatggtcaccttggaagtgaagaatatgatgttcctccccggctttctcctcctcctccagttaccaccctcctccctagcataaagtgtactggtccgttagcaaattctctttcagagaaaacaagagacccagtagaggaagatgatgatgaatacaagattccttcatcccaccctgtttccctgaattcacaaccatctcattgtcataatgtaaaacctcctgttcggtcttgtgataatggtcactgtatgctgaatggaacacatggtccatcttcagagaagaaatcaaacatccctgacttaagcatatatttaaagggagatgtttttgattcagcctctgatcccgtgccattaccacctgccaggcctccaactcgggacaatccaaagcatggttcttcactcaacaggacgccctctgattatgatcttctcatccctccattaggtgaagatgcttttgatgccctccctccatctctcccacctcccccacctcctgcaaggcatagtctcattgaacattcaaaacctcctggctccagtagccggccatcctcaggacaggatctttttcttcttccttcagatccctttgttgatctagcaagtggccaagttcctttgcctcctgctagaaggttaccaggtgaaaatgtcaaaactaacagaacatcacaggactatgatcagcttccttcatgttcagatggttcacaggcaccagccagaccccctaaaccacgaccgcgcaggactgcaccagaaattcaccacagaaaaccccatgggcctgaggcggcattggaaaatgtcgatgcaaaaattgcaaaactcatgggagagggttatgcctttgaagaggtgaagagagccttagagatagcccagaataatgtcgaagttgcccggagcatcctccgagaatttgccttccctcctccagtatccccacgtctaaatctatagcagccagaactgtagacaccaaaatggaaagcaatcgatgtattccaagagtgtggaaataaagagaactgagatggaattcaagagagaagtgtctcctcctcgtgtagcagcttgagaagaggcttgggagtgcagcttctcaaaggagaccgatgcttgctcaggatgtcgacagctgtggcttccttgtttttgctagccatatttttaaatcagggttgaactgacaaaaataatttaaagacgtttacttcccttgaactttgaacctgtgaaatgctttaccttgtttacagtttggcaaagttgcagtttgttcttgtttttagtttagttttgttttggtgttttgatacctgtactgtgttcttcacagaccctttgtagcgtggtcaggtctgctgtaacatttcccaccaactctcttgctgtccacatcaacagctaaatcatttattcatatggatctctaccatccccatgccttgcccaggtccagttccatttctctcattcacaagatgctttgaaggttctgattttcaactgatcaaactaatgcaaaaaaaaaaaagtatgtattcttcactactgagtttcttctttggaaaccatcactattgagagatgggaaaaacctgaatgtataaagcatttatttgtcaataaactgccttttgtaaggggttttcacataacatagaggagcttcccttttttgtttaagttttgtaacctttaatcctccatattctcatgtctgtcatcccaggggtgtcacaactgtaaaaatctacaatattagaaagcagctactacagatgtggaagagag

SEQ ID NO: 307452 - DNA, 3976 bp, Homo sapiens
ctgggtcctgtgtgtgccacaggggtggggtgtccagcgagcggtctcctcctcctgctagtgctgctgcggcgtcccgcggcctccccgagtcgggcgggaggggagagcgggtgtggatttgtcttgacggtaattgttgcgtttccacgtctcggaggcctgcgcgctgggttgctccttcttcgggagcgagctgttctcagcgatcccactcccagccggggctccccacacacactgggctgcgtgcgtgtggagtgggacccgcgcacacgcgtgtctctggacagctacggcgccgaaagaactaaaattccagatggcaaactcaatgaatggcagaaaccctggtggtcgaggaggaaatccccgaaaaggtcgaattttgggtattattgatgctattcaggatgcagttggaccccctaagcaagctgccgcagatcgcaggaccgtggagaagacttggaagctcatggacaaagtggtaagactgtgccaaaatcccaaacttcagttgaaaaatagcccaccatatatacttgatattttgcctgatacatatcagcatttacgacttatattgagtaaatatgatgacaaccagaaacttgcccaactcagtgagaatgagtactttaaaatctacattgatagccttatgaaaaagtcaaaacgggcaataagactctttaaagaaggcaaggagagaatgtatgaagaacagtcacaggacagacgaaatctcacaaaactgtcccttatcttcagtcacatgctggcagaaatcaaagcaatctttcccaatggtcaattccagggagataactttcgtatcacaaaagcagatgctgctgaattctggagaaagttttttggagacaaaactatcgtaccatggaaagtattcagacagtgccttcatgaggtccaccagattagctctagcctggaagcaatggctctaaaatcaacaattgatttaacttgcaatgattacatttcagtttttgaatttgatatttttaccaggctgtttcagccttggggctctattttgcggaattggaatttcttagctgtgacacatccaggttacatggcatttctcacatatgatgaagttaaagcacgactacagaaatatagcaccaaacccggaagctatattttccggttaagttgcactcgattgggacagtgggccattggctatgtgactggggatgggaatatcttacagaccatacctcataacaagcccttatttcaagccctgattgatggcagcagggaaggattttatctttatcctgatgggaggagttataatcctgatttaactggattatgtgaacctacacctcatgaccatataaaagttacacaggaacaatatgaattatattgtgaaatgggctccacttttcagctctgtaagatttgtgcagagaatgacaaagatgtcaagattgagccttgtgggcatttgatgtgcacctcttgccttacggcatggcaggagtcggatggtcagggctgccctttctgtcgttgtgaaataaaaggaactgagcccataatcgtggacccctttgatccaagagatgaaggctccaggtgttgcagcatcattgacccctttggcatgccgatgctagacttggacgacgatgatgatcgtgaggagtccttgatgatgaatcggttggcaaacgtccgaaagtgcactgacaggcagaactcaccagtcacatcaccaggatcctctccccttgcccagagaagaaagccacagcctgacccactccagatcccacatctaagcctgccacccgtgcctcctcgcctggatctaattcagaaaggcatagttagatctccctgtggcagcccaacaggttcaccaaagtcttctccttgcatggtgagaaaacaagataaaccactcccagcaccacctcctcccttaagagatcctcctccaccgccacctgaaagacctccaccaatcccaccagacaatagactgagtagacacatccatcatgtggaaagcgtgccttccagagacccgccaatgcctcttgaagcatggtgccctcgggatgtgtttgggactaatcagcttgtgggatgtcgactcctaggggagggctctccaaaacctggaatcacagcgagttcaaatgtcaatggaaggcacagtagagtgggctctgacccagtgcttatgcggaaacacagacgccatgatttgcctttagaaggagctaaggtcttttccaatggtcaccttggaagtgaagaatatgatgttcctccccggctttctcctcctcctccagttaccaccctcctccctagcataaagtgtactggtccgttagcaaattctctttcagagaaaacaagagacccagtagaggaagatgatgatgaatacaagattccttcatcccaccctgtttccctgaattcacaaccatctcattgtcataatgtaaaacctcctgttcggtcttgtgataatggtcactgtatgctgaatggaacacatggtccatcttcagagaagaaatcaaacatccctgacttaagcatatatttaaagggtgaagatgcttttgatgccctccctccatctctcccacctcccccacctcctgcaaggcatagtctcattgaacattcaaaacctcctggctccagtagccggccatcctcaggacaggatctttttcttcttccttcagatccctttgttgatctagcaagtggccaagttcctttgcctcctgctagaaggttaccaggtgaaaatgtcaaaactaacagaacatcacaggactatgatcagcttccttcatgttcagatggttcacaggcaccagccagaccccctaaaccacgaccgcgcaggactgcaccagaaattcaccacagaaaaccccatgggcctgaggcggcattggaaaatgtcgatgcaaaaattgcaaaactcatgggagagggttatgcctttgaagaggtgaagagagccttagagatagcccagaataatgtcgaagttgcccggagcatcctccgagaatttgccttccctcctccagtatccccacgtctaaatctatagcagccagaactgtagacaccaaaatggaaagcaatcgatgtattccaagagtgtggaaataaagagaactgagatggaattcaagagagaagtgtctcctcctcgtgtagcagcttgagaagaggcttgggagtgcagcttctcaaaggagaccgatgcttgctcaggatgtcgacagctgtggcttccttgtttttgctagccatatttttaaatcagggttgaactgacaaaaataatttaaagacgtttacttcccttgaactttgaacctgtgaaatgctttaccttgtttacagtttggcaaagttgcagtttgttcttgtttttagtttagttttgttttggtgttttgatacctgtactgtgttcttcacagaccctttgtagcgtggtcaggtctgctgtaacatttcccaccaactctcttgctgtccacatcaacagctaaatcatttattcatatggatctctaccatccccatgccttgcccaggtccagttccatttctctcattcacaagatgctttgaaggttctgattttcaactgatcaaactaatgcaaaaaaaaaaaagtatgtattcttcactactgagtttcttctttggaaaccatcactattgagagatgggaaaaacctgaatgtataaagcatttatttgtcaataaactgccttttgtaaggggttttcacataacatagaggagcttcccttttttgtttaagttttgtaacctttaatcctccatattctcatgtctgtcatcccaggggtgtcacaactgtaaaaatctacaatattagaaagcagctactacagatgtggaagagag

SEQ ID NO: 307453 - DNA, 1936 bp, Homo sapiens
aaggcacaaggttaaggaaggttggggccttccttggaccccaaggttggcctttaattggccggaaaaccaaccagacgccatgatttgcctttagaaaggagctaaggtcttttccaatggtcaccttggaagtgaagaatatgatgttcctccccggctttctcctcctcctccagttaccaccctcctccctagcataaagtgtactggtccgttagcaaattctctttcagagaaaacaagagacccagtagaggaagatgatgatgaatacaagattccttcatcccaccctgtttccctgaattcacaaccatctcattgtcataatgtaaaacctcctgttcggtcttgtgataatggtcactgtatgctgaatggaacacatggtccatcttcagagaagaaatcaaacatccctgacttaagcatatatttaaagggagatgtttttgattcagcctctgatcccgtgccattaccacctgccaggcctccaactcgggacaatccaaagcatggttcttcactcaacaggacgccctctgattatgatcttctcatccctccattaggtgaagatgcttttgatgccctccctccatctctcccacctcccccacctcctgcaaggcatagtctcattgaacattcaaaacctcctggctccagtagccggccatcctcaggacaggatctttttcttcttccttcagatccctttgttgatctagcaagtggccaagttcctttgcctcctgctagaaggttaccaggtgaaaatgtcaaaactaacagaacatcacaggactatgatcagcttccttcatgttcagatggttcacaggcaccagccagaccccctaaaccacgaccgcgcaggactgcaccagaaattcaccacagaaaaccccatgggcctgaggcggcattggaaaatgtcgatgcaaaaattgcaaaactcatgggagagggttatgcctttgaagaggtgaagagagccttagagatagcccagaataatgtcgaagttgcccggagcatcctccgagaatttgccttccctcctccagtatccccacgtctaaatctatagcagccagaactgtagacaccaaaatggaaagcaatcgatgtattccaagagtgtggaaataaagagaactgagatggaattcaagagagaagtgtctcctcctcgtgtagcagcttgagaagaggcttgggagtgcagcttctcaaaggagaccgatgcttgctcaggatgtcgacagctgtggcttccttgtttttgctagccatatttttaaatcagggttgaactgacaaaaataatttaaagacgtttacttcccttgaactttgaacctgtgaaatgctttaccttgtttacagtttggcaaagttgcagtttgttcttgtttttagtttagttttgttttggtgttttgatacctgtactgtgttcttcacagaccctttgtagcgtggtcaggtctgctgtaacatttcccaccaactctcttgctgtccacatcaacagctaaatcatttattcatatggatctctaccatccccatgccttgcccaggtccagttccatttctctcattcacaagatgctttgaaggttctgattttcaactgatcaaactaatgcaaaaaaaaaaaagtatgtattcttcactactgagtttcttctttggaaaccatcactattgagagatgggaaaaacctgaatgtataaagcatttatttgtcaataaactgccttttgtaaggggttttcacataacatagaggagcttcccttttttgtttaagttttgtaacctttaatcctccatattctcatgtctgtcatcccaggggtgtcacaactgtaaaaatctacaatattagaaagcagctactacagatgtggaagagag

SEQ ID NO: 307454 - DNA, 1608 bp, Homo sapiens
aacccatggttttatgtatatttgtttgtttgttttttgcttttactttagaacagtttctatacattgtacaggttggattgggacagaaaataaaatttagaagctgtttttattgtcaacaatcttataattaaatatatctgcaaaatataaatataaaacaagtagtctttattatctggaaataaatgtgaagagcatatttaagcaagtgatgaataaattagaaaatatgcaggcagtaaaaaatggttaatatcagtcatgaatttaattttctaatttatttttgaaagccataatcttcataaaataattctagaatttttttcttcagccaatcaacagagatcatccttttaatttgaaacttgtttttatttttaagatccctttgttgatctagcaagtggccaagttcctttgcctcctgctagaaggttaccaggtgaaaatgtcaaaactaacagaacatcacaggactatgatcagcttccttcatgttcagatggttcacaggcaccagccagaccccctaaaccacgaccgcgcaggactgcaccagaaattcaccacagaaaaccccatgggcctgaggcggcattggaaaatgtcgatgcaaaaattgcaaaactcatgggagagggttatgcctttgaagaggtgaagagagccttagagatagcccagaataatgtcgaagttgcccggagcatcctccgagaatttgccttccctcctccagtatccccacgtctaaatctatagcagccagaactgtagacaccaaaatggaaagcaatcgatgtattccaagagtgtggaaataaagagaactgagatggaattcaagagagaagtgtctcctcctcgtgtagcagcttgagaagaggcttgggagtgcagcttctcaaaggagaccgatgcttgctcaggatgtcgacagctgtggcttccttgtttttgctagccatatttttaaatcagggttgaactgacaaaaataatttaaagacgtttacttcccttgaactttgaacctgtgaaatgctttaccttgtttacagtttggcaaagttgcagtttgttcttgtttttagtttagttttgttttggtgttttgatacctgtactgtgttcttcacagaccctttgtagcgtggtcaggtctgctgtaacatttcccaccaactctcttgctgtccacatcaacagctaaatcatttattcatatggatctctaccatccccatgccttgcccaggtccagttccatttctctcattcacaagatgctttgaaggttctgattttcaactgatcaaactaatgcaaaaaaaaaaaagtatgtattcttcactactgagtttcttctttggaaaccatcactattgagagatgggaaaaacctgaatgtataaagcatttatttgtcaataaactgccttttgtaaggggttttcacataacatagaggagcttcccttttttgtttaagttttgtaacctttaatcctccatattctcatgtctgtcatcccaggggtgtcacaactgtaaaaatctacaatattagaaagcagctactacagatgtggaagagag

SEQ ID NO: 307455 - DNA, 978 bp, Homo sapiens
ttcttcaaaggcataaccctctcccatgagttttgcaatttttgcatcgacattttccaatgccgcctcaggcccatggggttttctgtggtgaatttctggtgcagtcctcctccagtatccccacgtctaaatctatagcagccagaactgtagacaccaaaatggaaagcaatcgatgtattccaagagtgtggaaataaagagaactgagatggaattcaagagagaagtgtctcctcctcgtgtagcagcttgagaagaggcttgggagtgcagcttctcaaaggagaccgatgcttgctcaggatgtcgacagctgtggcttccttgtttttgctagccatatttttaaatcagggttgaactgacaaaaataatttaaagacgtttacttcccttgaactttgaacctgtgaaatgctttaccttgtttacagtttggcaaagttgcagtttgttcttgtttttagtttagttttgttttggtgttttgatacctgtactgtgttcttcacagaccctttgtagcgtggtcaggtctgctgtaacatttcccaccaactctcttgctgtccacatcaacagctaaatcatttattcatatggatctctaccatccccatgccttgcccaggtccagttccatttctctcattcacaagatgctttgaaggttctgattttcaactgatcaaactaatgcaaaaaaaaaaaagtatgtattcttcactactgagtttcttctttggaaaccatcactattgagagatgggaaaaacctgaatgtataaagcatttatttgtcaataaactgccttttgtaaggggttttcacataacatagaggagcttcccttttttgtttaagttttgtaacctttaatcctccatattctcatgtctgtcatcccaggggtgtcacaactgtaaaaatctacaatattagaaagcagctactacagatgtggaagagag

SEQ ID NO: 307456 - DNA, 602 bp, Homo sapiens
  misc_feature (36)..(36): n is a, c, g, or t
tagaggatcccccaagaacaaactgcaactttgccnaactgtaaacaaggtaaagcatttcacaggttcaaagttcaagggaagtaaacgtctttagtttagttttgttttggtgttttgatacctgtactgtgttcttcacagaccctttgtagcgtggtcaggtctgctgtaacatttcccaccaactctcttgctgtccacatcaacagctaaatcatttattcatatggatctctaccatccccatgccttgcccaggtccagttccatttctctcattcacaagatgctttgaaggttctgattttcaactgatcaaactaatgcaaaaaaaaaaaagtatgtattcttcactactgagtttcttctttggaaaccatcactattgagagatgggaaaaacctgaatgtataaagcatttatttgtcaataaactgccttttgtaaggggttttcacataacatagaggagcttcccttttttgtttaagttttgtaacctttaatcctccatattctcatgtctgtcatcccaggggtgtcacaactgtaaaaatctacaatattagaaagcagctactacagatgtggaagagag

SEQ ID NO: 307457 - DNA, 937 bp, Homo sapiens
cttaatgctactgcgcgtaccgcttactatctgaatcgggcgcgaggtaagagcgtatgtgcatttgtcttgacctaactaaaattccagatggcaaactcaatgaatggcagaaaccctggtggtcgaggaggaaatccccgaaaaggtcgaattttgggtattattgatgctattcaggatgcagttggaccccctaagcaagctgccgcagatcgcaggaccgtggagaagacttggaagctcatggacaaagtggtaagactgtgccaaaatcccaaacttcagttgaaaaatagcccaccatatatacttgatattttgcctgatacatatcagcatttacgacttatattgagtaaatatgatgacaaccagaaacttgcccaactcagtgagaatgagtactttaaaatctacattgatagccttatgaaaaagtcaaaacgggcaataagactctttaaagaaggcaaggagagaatgtatgaagaacagtcacaggacagacgaaatctcacaaaactgtcccttatcttcagtcacatgctggcagaaatcaaagcaatctttcccaatggtcaattccagggagataactttcgtatcacaaaagcagatgctgctgaattctggagaaagttttttggagacaagcctccaggcctgtgatgagagaagctgccgtgaagacctctgacatgccctggagacattttcctcattgtcttggtgattaacatttggctcctccttacttatacaaatttctgcagccagcttgaggttcttctcagagaatgtgtttttcttttttatcacattgtcaggctgcaaattttctgaactttaatgctccgcttcttcttgaaacataagttccaattccatatcatatctttgtgaatgaataaaacttaatgcttttaacagtacc

SEQ ID NO: 307458 - DNA, 881 bp, Homo sapiens
cttaatgctactgcgcgtaccgcttactatctgaatcgggcgcgaggtaagagcgtatgtgcatttgtcttgacctaactaaaattccagatggcaaactcaatgaatggcagaaaccctggtggtcgaggaggaaatccccgaaaaggtcgaattttgggtattattgatgctattcaggatgcagttggaccccctaagcaagctgccgcagatcgcaggaccgtggagaagacttggaagctcatggacaaagtggtaagactgtgccaaaatcccaaacttcagttgaaaaatagcccaccatatatacttgatattttgcctgatacatatcagcatttacgacttatattgagtaaatatgatgacaaccagaaacttgcccaactcagtgagaatgagtactttaaaatctacattgatagccttatgaaaaagtcaaaacgggcaataagactctttaaagaaggcaaggagagaatgtatgaagaacagtcacaggacagacgaaatctcacaaaactgtcccttatcttcagtcacatgctggcagaaatcaaagcaatctttcccaatggtcaattccagggagataactttcgtatcacaaaagcagatgctgctgaattctggagaaagttttttggagacaaacattttcctcattgtcttggtgattaacatttggctcctccttacttatacaaatttctgcagccagcttgaggttcttctcagagaatgtgtttttcttttttatcacattgtcaggctgcaaattttctgaactttaatgctccgcttcttcttgaaacataagttccaattccatatcatatctttgtgaatgaataaaacttaatgcttttaacagtacc

SEQ ID NO: 307459 - DNA, 259 bp, Homo sapiens
ctggtccgttagcaaattctctttcagagaaaacaagagacccagtagaggaagatgatgatgaatacaagattccttcatcccaccctgtttccctgaattcacaaccatctcattgtcataatgtaaaacctcctgttcggtaagagtatgggcagatttttgccacttacatctgcataagcattatcatttgtaatgtttgtttttaaacaattgattcacgtctaattaaaaatccttaatttccagctcaaat

SEQ ID NO: 307460 - DNA, 400 bp, Homo sapiens
tcagcttgtgggatgtcgactcctaggggagggctctccaaaacctggaatcacagcgagttcaaatgtcaatggaaggcacagtagagtgggctctgacccagtgcttatgcggaaacacagacgccatgatttgcctttagaaggagctaagaaggtaagaaatacgcaaagcagaagctagagaatctgcttataaatgcttctgatggtcagtagcataaaaggttgggaagtgtttttttttgcctagcatggcacttccctgtaagtctttaattatccccaagttataaataatcagaagctcattaaaacttgaacttaagagaagtcaggaggttctaagtaatgatttaattttaatgtgaagacactagacaatttgccagagatttat

SEQ ID NO: 307461 - DNA, 457 bp, Homo sapiens
ggtcaacttcagcgctggcctgggcttggctcttgaacccttcccttgaacttcaccaacaccctcagccccgcctcggcccacagccctcactcagcctccccaacctgaatctccagaattcgattttttaaccatgaaccagaagatgctgaagccacacagaacacctccggccccggtgactgaagagatgctacagcggtgcaagtacagccacatggagccccctctgggtggactgcgcttcttctcaacacaatacaaggacgagtttcctttcaagtaccagggcccagcagccctgagactgaaaaatcctcaggagggcttcgtgcccctgggcacgcctcaccagcgcggctgcagggagaagatagaccctctggtcccccagccccctatgtacctgtgccccagccagcaataaatgccatcttggcaacattccaaactt

SEQ ID NO: 307462 - DNA, 406 bp, Homo sapiens
gagccaaagctactcaaacgcttcttcaagaccaccatgggctcggactactgcccttcagagtggagaattcgattttttaaccatgaaccagaagatgctgaagccacacagaacacctccggccccggtgactgaagagatgctacagcggtgcaagtacagccacatggagccccctctgggtggactgcgcttcttctcaacacaatacaaggacgagtttcctttcaagtaccagggcccagcagccctgagactgaaaaatcctcaggagggcttcgtgcccctgggcacgcctcaccagcgcggctgcagggagaagatagaccctctggtcccccagccccctatgtacctgtgccccagccagcaataaatgccatcttggcaacattccaaactt

SEQ ID NO: 307463 - DNA, 1952 bp, Homo sapiens
cgggagcgcctggcggggccgctgggccgagggggccgccggcggggctggcgggcggggggcttcctgcgggcccggggggagccggcggccggcgcgggcgcggcgggccgggcaggggcgaggggcgccgggtcttgccccagaagctgcgggcacatccacgcctgaaatgcggcgctcagtcctggtcaggaacccaggccacaaaggcctgagacccgtttatgaagagctcgactctgactccgaggacctagaccccaatcctgaagatctggacccggtttctgaagacccagagcctgatcctgaagacctcaacactgtcccggaagacgtggaccccagctatgaagatctggagcccgtctcggaggatctggaccccgacgccgaagctccgggctcggaaccccaagatcccgaccccatgtcttcgagtttcgacctcgatccagatgtgattggccccgtacccctgattctcgatcctaacagcgacaccctcagccccggcgatccaaaagtggaccccatctcctctggcctcactgccaccccccaggtcttggccaccagccccgcggtgctccccgcccccgccagcccgccccggcccttctcctgcccggattgcgggcgagccttccgccgcagctccgggctgagccagcatcgccgcacgcacagcggcgagaagccgtaccgctgccccgactgcgggaagtccttcagccacggtgccaccctggctcagcaccgtggcatccacactggggcgcggccgtaccagtgcgcggcctgcggcaaggccttcggctggcgctccacgctgctgaaacatcgcagcagccacagcggggagaagccgcaccactgcccggtgtgtggcaaggccttcgggcacggctcgctcctggcacagcacctgcgcacgcacggcggcccgcggccccacaagtgcccggtgtgcgccaagggcttcggccagggctctgcgctgctcaaacacctgcgcacgcacacgggcgagcggccctacccgtgtccgcagtgcggcaaggccttcgggcagagctcggcgctgctgcagcaccagcgcacacacacggccgagcgcccctaccgctgcccccactgcggcaaagccttcgggcagagctccaacttgcaacaccacctgcgcatccacacgggcgagcggccctacgcctgcccgcactgctccaaggccttcggccagagctcagcgctgctccagcacctgcacgtgcattcgggcgagcgtccctatcgctgtcagctctgcgggaaggccttcggccaggcctccagcctcaccaagcacaaacgggtgcatgagggtgcagccgctgctgcagctgccgcggccgctgcagctgcagcagcggccgccggcctgggcctcgggcctggcctaagccctgcatccatgatgaggccggggcaggtctccctcctgggtcctgatgctgtttctgtgctcggctctggcttgggcctcagccctggcaccagctctggccgcaaccctgaccctggctctgggccgggcactctgccggatcccagctccaaacccctccccggctccagatccacccccagccctactcctgtggaatcttctgacccaaaggctgggcacgacgctggtcccgaccttgtgcccagcccagaccttgatcctgtgcccagcccagaccctgatcctgtgcccagccctgatcccaaccctgtgtcctgccctgacccctgttctcccactcgtggcactgtcagcccagccctccctaccggcgagagtccagagtgggtacaggagcaaggggcactgctggggcctgatggctgaaggagacgccggcatcctcgggggcctggggaagttgtgtgttgtgcagtcagtaaaatcctcccactgccgg

SEQ ID NO: 307464 - DNA, 1676 bp, Homo sapiens
  misc_feature (29)..(29): n is a, c, g, or t
acaacgaaattagggctggtacgaggctnggggtgctgaagacctcaacactgtcccggaagacgtggaccccagctatgaagatctggagcccgtctcggaggatctggaccccgacgccgaagctccgggctcggaaccccaagatcccgaccccatgtcttcgagtttcgacctcgatccagatgtgattggccccgtacccctgattctcgatcctaacagcgacaccctcagccccggcgatccaaaagtggaccccatctcctctggcctcactgccaccccccaggtcttggccaccagccccgcggtgctccccgcccccgccagcccgccccggcccttctcctgcccggattgcgggcgagccttccgccgcagctccgggctgagccagcatcgccgcacgcacagcggcgagaagccgtaccgctgccccgactgcgggaagtccttcagccacggtgccaccctggctcagcaccgtggcatccacactggggcgcggccgtaccagtgcgcggcctgcggcaaggccttcggctggcgctccacgctgctgaaacatcgcagcagccacagcggggagaagccgcaccactgcccggtgtgtggcaaggccttcgggcacggctcgctcctggcacagcacctgcgcacgcacggcggcccgcggccccacaagtgcccggtgtgcgccaagggcttcggccagggctctgcgctgctcaaacacctgcgcacgcacacgggcgagcggccctacccgtgtccgcagtgcggcaaggccttcgggcagagctcggcgctgctgcagcaccagcgcacacacacggccgagcgcccctaccgctgcccccactgcggcaaagccttcgggcagagctccaacttgcaacaccacctgcgcatccacacgggcgagcggccctacgcctgcccgcactgctccaaggccttcggccagagctcagcgctgctccagcacctgcacgtgcattcgggcgagcgtccctatcgctgtcagctctgcgggaaggccttcggccaggcctccagcctcaccaagcacaaacgggtgcatgagggtgcagccgctgctgcagctgccgcggccgctgcagctgcagcagcggccgccggcctgggcctcgggcctggcctaagccctgcatccatgatgaggccggggcaggtctccctcctgggtcctgatgctgtttctgtgctcggctctggcttgggcctcagccctggcaccagctctggccgcaaccctgaccctggctctgggccgggcactctgccggatcccagctccaaacccctccccggctccagatccacccccagccctactcctgtggaatcttctgacccaaaggctgggcacgacgctggtcccgaccttgtgcccagcccagaccttgatcctgtgcccagcccagaccctgatcctgtgcccagccctgatcccaaccctgtgtcctgccctgacccctgttctcccactcgtggcactgtcagcccagccctccctaccggcgagagtccagagtgggtacaggagcaaggggcactgctggggcctgatggctgaaggagacgccggcatcctcgggggcctggggaagttgtgtgttgtgcagtcagtaaaatcctcccactgccgg

SEQ ID NO: 307465 - DNA, 2183 bp, Homo sapiens
cgggagcgcctggcggggccgctgggccgagggggccgccggcggggctggcgggcggggggcttcctgcgggcccggggggagccggcggccggcgcgggcgcggcgggccgggcaggggcgaggggcgccgggtcttgccccagaagctgcgggcacatccacgcctgaaatgcggcgctcagtcctggtcaggaacccaggccacaaaggcctgagacccgtttatgaagagctcgactctgactccgaggacctagaccccaatcctgaagatctggacccggtttctgaagacccagagcctgatcctgaagacctcaacactgtcccggaagacgtggaccccagctatgaagatctggagcccgtctcggaggatctggaccccgacgccgaagctccgggctcggaaccccaagatcccgaccccatgtcttcgagtttcgacctcgatccagatgtgattggccccgtacccctgattctcgatcctaacagcgacaccctcagccccggcgatccaaaagtggaccccatctcctctggcctcactgccaccccccaggtcttggccaccagccccgcggtgctccccgcccccgccagcccgccccggcccttctcctgcccggattgcgggcgagccttccgccgcagctccgggctgagccagcatcgccgcacgcacagcggcgagaagccgtaccgctgccccgactgcgggaagtccttcagccacggtgccaccctggctcagcaccgtggcatccacactggggcgcggccgtaccagtgcgcggcctgcggcaaggccttcggctggcgctccacgctgctgaaacatcgcagcagccacagcggggagaagccgcaccactgcccggtgtgtggcaaggccttcgggcacggctcgctcctggcacagcacctgcgcacgcacggcggcccgcggccccacaagtgcccggtgtgcgccaagggcttcggccagggctctgcgctgctcaaacacctgcgcacgcacacgggcgagcggccctacccgtgtccgcagtgcggcaaggccttcgggcagagctcggcgctgctgcagcaccagcgcacacacacggccgagcgcccctaccgctgcccccactgcggcaaagccttcgggcagagctccaacttgcaacaccacctgcgcatccacacgggcgagcggccctacgcctgcccgcactgctccaaggccttcggccagagctcagcgctgctccagcacctgcacgtgcattcgggcgagcgtccctatcgctgtcagctctgcgggaaggccttcggccaggcctccagcctcaccaagcacaaacgggtgcatgagggtgcagccgctgctgcagctgccgcggccgctgcagctgcagcagcggccgccggcctgggcctcgggcctggcctaagccctgcatccatgatgaggccggggcaggtctccctcctgggtcctgatgctgtttctgtgctcggctctggcttgggcctcagccctggcaccagctctggccgcaaccctgaccctggctctgggccgggcactctgccggatcccagctccaaacccctccccggctccagatccacccccagccctactcctgtggaatcttctgacccaaaggctgggcacgacgctggtcccgaccttgtgcccagcccagaccttgatcctgtgcccagcccagaccctgatcctgtgcccagccctgatcccaaccctgtgtcctgccctgacccctgttctcccactcgtggcactgtcagcccagccctccctaccggcgagagtccagagtgggtacaggagcaaggggcactgctggggcctgatggctgaaggagacgccggcatcctcgggggcctggggaagttgtgtgttgtgcagtcagtaaaatcctcccactgccggaaaaaaaccacacatcaaaaaactcgaagccaccaatacacaccactcacaacacacgaagaaaatcaaacagtgaccagtggtcacaatacagtggtaaccagtgaccccagacaacactggaaacacaaacgtagaacacatcaatgcagaaatacccataaatcaagatacccagaaaacaatctacctataacgcacagtacaccactacatatatcaccgtgacac

SEQ ID NO: 307466 - DNA, 1928 bp, Homo sapiens
cgggagcgcctggcggggccgctgggccgagggggccgccggcggggctggcgggcggggggcttcctgcgggcccggggggagccggcggccggcgcgggcgcggcgggccgggcaggggcgaggggcgccgggtcttgccccagaagctgcgggcacatccacgcctgaaatgcggcgctcagtcctggtcaggaacccaggccacaaaggcctgagacccgtttatgaagagctcgactctgactccgaggacctagaccccaatcctgaagatctggacccggtttctgaagacccagagcctgatcctgaagacctcaacactgtcccggaagacgtggaccccagctatgaagatctggagcccgtctcggaggatctggaccccgacgccgaagctccgggctcggaaccccaagatcccgaccccatgtcttcgagtttcgacctcgatccagatgtgattggccccgtacccctgattctcgatcctaacagcgacaccctcagccccggcgatccaaaagtggaccccatctcctctggcctcactgccaccccccaggtcttggccaccagccccgcggtgctccccgcccccgccagcccgccccggcccttctcctgcccggattgcgggcgagccttccgccgcagctccgggctgagccagcatcgccgcacgcacagcggcgagaagccgtaccgctgccccgactgcgggaagtccttcagccacggtgccaccctggctcagcaccgtggcatccacactggggcgcggccgtaccagtgcgcggcctgcggcaaggccttcggctggcgctccacgctgctgaaacatcgcagcagccacagcggggagaagccgcaccactgcccggtgtgtggcaaggccttcgggcacggctcgctcctggcacagcacctgcgcacgcacggcggcccgcggccccacaagtgcccggtgtgcgccaagggcttcggccagggctctgcgctgctcaaacacctgcgcacgcacacgggcgagcggccctacccgtgtccgcagtgcggcaaggccttcgggcagagctcggcgctgctgcagcaccagcgcacacacacggccgagcgcccctaccgctgcccccactgcggcaaagccttcgggcagagctccaacttgcaacaccacctgcgcatccacacgggcgagcggccctacgcctgcccgcactgctccaaggccttcggccagagctcagcgctgctccagcacctgcacgtgcattcgggcgagcgtccctatcgctgtcagctctgcgggaaggccttcggccaggcctccagcctcaccaagcacaaacgggtgcatgagggtgcagccgctgctgcagctgccgcggccgctgcagctgcagcagcggccgccggcctgggcctcgggcctggcctaagccctgcatccatgatgaggccggggcaggtctccctcctgggtcctgatgctgtttctgtgctcggctctggcttgggcctcagccctggcaccagctctggccgcaaccctgaccctggctctgggccgggcactctgccggatcccagctccaaacccctccccggctccagatccacccccagccctactcctgtggaatcttctgacccaaaggctgggcacgacgctggtcccgaccttgtgcccagcccagaccctgatcctgtgcccagccctgatcccaaccctgtgtcctgccctgacccctgttctcccactcgtggcactgtcagcccagccctccctaccggcgagagtccagagtgggtacaggagcaaggggcactgctggggcctgatggctgaaggagacgccggcatcctcgggggcctggggaagttgtgtgttgtgcagtcagtaaaatcctcccactgccgg

SEQ ID NO: 307467 - DNA, 991 bp, Homo sapiens
  misc_feature (17)..(17): n is a, c, g, or t
  misc_feature (57)..(57): n is a, c, g, or t
  misc_feature (93)..(93): n is a, c, g, or t
gctgctcaaacacctgncacgcacacggcgaaaggggccccgagggggccccccccntaaaacaccgggttgttacccaccgggacaccaaangggtgcggcaaggccttcgggcagagctcggcgctgctgcagcaccagcgcacacacacggccgagcgcccctaccgctgcccccactgcggcaaagccttcgggcagagctccaacttgcaacaccacctgcgcatccacacgggcgagcggccctacgcctgcccgcactgctccaaggccttcggccagagctcagcgctgctccagcacctgcacgtgcattcgggcgagcgtccctatcgctgtcagctctgcgggaaggccttcggccaggcctccagcctcaccaagcacaaacgggtgcatgagggtgcagccgctgctgcagctgccgcggccgctgcagctgcagcagcggccgccggcctgggcctcgggcctggcctaagccctgcatccatgatgaggccggggcaggtctccctcctgggtcctgatgctgtttctgtgctcggctctggcttgggcctcagccctggcaccagctctggccgcaaccctgaccctggctctgggccgggcactctgccggatcccagctccaaacccctccccggctccagatccacccccagccctactcctgtggaatcttctgacccaaaggctgggcacgacgctggtcccgaccttgtgcccagcccagaccttgatcctgtgcccagcccagaccctgatcctgtgcccagccctgatcccaaccctgtgtcctgccctgacccctgttctcccactcgtggcactgtcagcccagccctccctaccggcgagagtccagagtgggtacaggagcaaggggcactgctggggcctgatggctgaaggagacgccggcatcctcgggggcctggggaagttgtgtgttgtgcagtcagtaaaatcctcccactgccgg

SEQ ID NO: 307468 - DNA, 900 bp, Homo sapiens
cgggagcgcctggcggggccgctgggccgagggggccgccggcggggctggcgggcggggggcttcctgcgggcccggggggagccggcggccggcgcgggcgcggcgggccgggcaggggcgaggggcgccgggtcttgccccagaagctgcgggcacatccacgcctgaaatgcggcgctcagtcctggtcaggaacccaggccacaaaggcctgagacccgtttatgaagagctcgactctgactccgaggacctagaccccaatcctgaagatctggacccggtttctgaagacccagagcctgatcctgaagacctcaacactgtcccggaagacgtggaccccagctatgaagatctggagcccgtctcggaggatctggaccccgacgccgaagctccgggctcggaaccccaagatcccgaccccatgtcttcgagtttcgacctcgatccagatgtgattggccccgtacccctgattctcgatcctaacagcgacaccctcagccccggcgatccaaaagtggaccccatctcctctggcctcactgccaccccccaggtcttgccccagccctactcctgtggaatcttctgacccaaaggctgggcacgacgctggtcccgaccttgtgcccagcccagaccttgatcctgtgcccagcccagaccctgatcctgtgcccagccctgatcccaaccctgtgtcctgccctgacccctgttctcccactcgtggcactgtcagcccagccctccctaccggcgagagtccagagtgggtacaggagcaaggggcactgctggggcctgatggctgaaggagacgccggcatcctcgggggcctggggaagttgtgtgttgtgcagtcagtaaaatcctcccactgccgg

SEQ ID NO: 307469 - DNA, 1007 bp, Homo sapiens
gagccaaagctactcaaacgcttcttcaagaccaccatgggctcggactactgcccttcagagtggagacaggtgcagaaagcgcccaacctccacttgcagcaaagcaacctgccgcggggcacgggcgaattcgattttttaaccatgaaccagaagatgctgaagccacacagaacacctccggccccggtgactgaagagatgctacagcgggtaataattcctaaattagtcaagactgtcacggatgcaaagaacagacatccactaaaaccagctcaaacacccagaacatttgttggtttgtggtacaggaaagaatgagttctgtggcttcaggtcttgccccagaagctgcgggcacatccacgcctgaaatgcggcgctcagtcctggtcaggaacccaggccacaaaggcctgagacccgtttatgaagagctcgactctgactccgaggacctagaccccaatcctgaagatctggacccggtttctgaagacccagagcctgatcctgaagacctcaacactgtcccggaagacgtggaccccagctatgaagatctggagcccgtctcggaggatctggaccccgacgccgaagctccgggctcggaaccccaagatcccgaccccatgtcttcgagtttcgacctcgatccagatgtgattggccccgtacccctgattctcgatcctaacagcgacaccctcagccccggcgatccaaaagtggaccccatctcctctggccttcacatggcacaaaaaagagaataggaaaaaagaaaaaagaaaagaaaacagaaaaaagaaaaaaaaaaaagaaaaagagaagagaacaacaggaagaaagaagagaacagaagaagaagacagaacagaccaagggaaaaagagagacagagaggaaagaaggagagaaaagagagagagagagagaaggagaggagaaaagacgatcgacggagaagagaaaagagaaaaaaagagaagaggaag

SEQ ID NO: 307470 - DNA, 468 bp, Homo sapiens
gagccaaagctactcaaacgcttcttcaagaccaccatgggctcggactactgcccttcagagtggagacaggtgcagaaagcgcccaacctccacttgcagcaaagcaacctgccgcggggcacgggcgaattcgattttttaaccatgaaccagaagatgctgaagccacacagaacacctccggccccggtgactgaagagatgctacagcggtgcaagtacagccacatggagccccctctgggtggactgcgcttcttctcaacacaatacaaggacgagtttcctttcaagtaccagggcccagcagccctgagactgaaaaatcctcaggagggcttcgtgcccctgggcacgcctcaccagcgcggctgcagggagaagatagaccctctggtcccccagccccctatgtacctgtgccccagccagcaataaatgccatcttggcaacattccaaactt

SEQ ID NO: 307471 - DNA, 1703 bp, Homo sapiens
gtgcctctgctccgtccgccttcgaggagaggtcggcatctttgttccctgcccggccattgttcgtgccgcgcttctagcaacgccgggccggtaaccccctctccctccttgcgcgttccgggtctcgcaagcgcctccaaggtttgtcttgaagcatagctccagctggagggtaccttttaagctgttcaaggtcaagatgaatacaaactcaaaggaggttttatccctgggtgttcaagttcccgaggcatgggaagaacttctgacaatgaaagtggaagcaaaaagtcaccttcaatggcaggaatccagactgaaacgcagtaatccactggcaagggaaatcttccgaaggcactttcgacagctgtgctaccaagagacccctggaccaagggaggctcttactcgactccaggaactttgctaccagtggttgaggccacatgtgagcacaaaggagcagattttggatctgctggtgctggagcagtttctatccattctgcccaaggagctccagggctgggtgagggaacactgtccagagagtggagaagaggctgtgattttgctggaggatctggagagagagctcgatgaaccacaacatgagatggtggcccacagacacagacaagaagtcctctgtaaagagatggtgcctctagcagagcagacaccactgacccttcagtcccagcctaaggagccacagctcacatgtgactctgctcagaagtgccattctattggagagacagatgaagtaaccaagactgaggacagagagttggtgctaaggaaagactgtcctaagatagtggaaccacatgggaaaatgtttaatgagcagacctgggaggtatcacagcaggatccctcacatggagaagttggtgaacataaggataggatagagaggcagtggggaaacctcttaggagaggggcaacacaaatgtgatgaatgtgggaagagctttactcagagctcaggtctcattcgacatcaaagaattcatactggagaaagaccttatgaatgtaatgaatgtgggaaagccttcagtcgaagttctggtctttttaatcaccgaggaatccacaatatacagaaacggtaccactgcaaggagtgtgggaaggtcttcagtcagagtgcgggtcttatccagcatcagagaatccacaaaggagaaaagccgtatcagtgcagccagtgcagtaagagctacagtcggcgttcatttctcattgaacatcagagaagccacacaggggagcgacctcaccagtgcattgaatgtgggaaaagctttaatcgacactgcaacctcattcgccatcagaagatccacacagtggctgagctggtctagggcttggctatgagcaagttttccagatcaccacccaagttgtgtggggcaggttgagactagaaaatgcctctttcttcctttctccatgaaatgtgtttgaaacaaatcctgacttaaggcccagggacttccttaaaggaaagttgggtgtttgaagctactgttttctcttttgttcgttttacctctttcttactcttactagctgtgtccctcttatttataatttatttatttttttgagatggctgctaaacccttctaataatataataaatggcactgccacagccaacatgcctgaaaaaaaaaa

SEQ ID NO: 307472 - DNA, 874 bp, Homo sapiens
gtgcctctgctccgtccgccttcgaggagaggtcggcatctttgttccctgcccggccattgttcgtgccgcgcttctagcaacgccgggccggtaaccccctctccctccttgcgcgttccgggtctcgcaagcgcctccaaggtttgtcttgaagcatagctccagctggagggtaccttttaagctgttcaaggtcaagatgaatacaaactcaaaggaggttttatccctgggtgttcaagttcccgaggcatgggaagaacttctgacaatgaaagtggaagcaaaaagtcaccttcaatggcaggaatccagactgaaacgcagtaatccactggcaagggaaatcttccgaaggcactttcgacagctgtgctaccaagagacccctggaccaagggaggctcttactcgactccaggaactttgctaccagtggttgaggccacatgtgagcacaaaggagcagattttggatctgctggtgctggagcagtttctatccattctgcccaaggagctccagggctgggtgagggaacactgtccagagagtggagaagaggctgtgattttgctggaggatctggagagagagctcgatgaaccacaacatgagatggtggcccacagacacagacaagaagtcctctgtaaagagatggtgcctctagcagagcagacaccactgacccttcagtcccagcctaaggagccacagctcacatgtgactctgctcagaagtgccattctattggagagacaggtgagggacagcatttatttgatgttgaacgaatcccacctggtcaagcaaaaacaaacaataaacccagagctgggaaaacaggagacccaaagactccttac

SEQ ID NO: 307473 - DNA, 898 bp, Homo sapiens
gtgcctctgctccgtccgccttcgaggagaggtcggcatctttgttccctgcccggccattgttcgtgccgcgcttctagcaacgccgggccggtaaccccctctccctccttgcgcgttccgggtctcgcaagcgcctccaaggtttgtcttgaagcatagctccagctggagggtaccttttaagctgttcaaggtcaagatgaatacaaactcaaaggaggttttatccctgggtgttcaagttcccgaggcatgggaagaacttctgacaatgaaagtggaagcaaaaagtcaccttcaatggcaggaatccagactgaaacgcagtaatccactggcaagggaaatcttccgaaggcactttcgacagctgtgctaccaagagacccctggaccaagggaggctcttactcgactccaggaactttgctaccagtggttgaggccacatgtgagcacaaaggagcagattttggatctgctggtgctggagcagtttctatccattctgcccaaggagctccagggctgggtgagggaacactgtccagagagtggagaagaggctgtgattttgctggaggatctggagagagagctcgatgaaccacaacatgagatggtggcccacagacacagacaagaagtcctctgtaaagagatggtgcctctagcagagcagacaccactgacccttcagtcccagcctaaggagccacagctcacatgtgactctgctcagaagtgccattctattggagagacagacttctccctgagtaccaccctggaagctttctggacttctgatgcatggtacatgaggaaggctttcagggatcgctgtggagcacagcttcagagaatggacttcaaggtttgacagacaggttca

SEQ ID NO: 307474 - DNA, 1483 bp, Homo sapiens
ataccacagactggttgtctttaacagaaatttattttctcacattttcaaaggctagtagtccaagatcaagataccatcaggtttggtttctggtgaggcctcttcctggcttatagatggccatcttcttgctgtatcctcacatggcctttcttctgtatgcatacagagagagagcaagctctctcatcttataaggacagataccattcctacccgatagggcccttccttataacctcatttaacttttaataccttcctcaaggccctatctccaaatataatcatattgaggggttaggacctcagcatatgtgagggaatacaatttagtccgtaaccagtatgtacctcagaaagtcattgtgagtatcaaatacaatttatgaaaagcacttggcatgcattatgcttaatacatggtcactattgtcacaaatcaccagtgccacccttgctgatttgggttcatacttggagtagaaagatatcagatatgcttagtaagtggcagaactgtatgggagaatccagtgaaatcagactttgccatttccttctctgtaatcttctgagtggtggcagtgaccacccttgtggatatagtactgagcacttgggactgagtcagctgctttcccattctagccctccctgcaggaattggctctagcttgtctgatttcccacacataaaatcatgccctcttactgactttttgttaatgttctgacaatcaatctgtagcaaggttctactgttttcagtttcatattacccctatatgcatcaaagctgcaacttcccttgcctctttgtccctaggttctgtttatttcatttaccctagcaattatggatttctattacatggaactcatctcttgatttaaattaaagtgtatgtgttgagtaaattctgtgcagaccttcttatagcttctgtgactttatcagattaaaattgcttctgatatcattttccctctttatgagcatctttccagtcaatttgtttctttcttcttcctctctctatgaacttggaccttttattttctagccacttcctttcttctaccttccaaactgcatctagaaccctgctgagtatccccttttccaagaagcacatctatattttccacctatccacttatctatccatctatcattcaacaagtgtttattaagcatctactatggctgtaggagaatatccagagggcatctggagactggagtgttctccttgtaggatatcagcgcaggtatgtgttacaaatttagataaagccaatattataaaacaacatagtgtttgaaattacaaggaccaaattcaagttccagcttttcaaattcttagccaagcaatatttaataggtaagcttgagtttctttttaagttatgctgattatttaaaaatccaaataatacaaaagtttatatagtaaaaaatggaagttttcca

SEQ ID NO: 307475 - DNA, 863 bp, Homo sapiens
gtgcctctgctccgtccgccttcgaggagaggtcggcatctttgttccctgcccggccattgttcgtgccgcgcttctagcaacgccgggccggcaagcgcctccaaggtttgtcttgaagcatagctccagctggagggtaccttttaagctgttcaaggtcaagatgaatacaaactcaaaggaggttttatccctgggtgttcaagttcccgaggcatgggaagaacttctgacaatgaaagtggaagcaaaaagtcaccttcaatggcaggaatccagactgaaacgcagtaatccactggcaagggaaatcttccgaaggcactttcgacagctgtgctaccaagagacccctggaccaagggaggctcttactcgactccaggaactttgctaccagtggttgaggccacatgtgagcacaaaggagcagattttggatctgctggtgctggagcagtttctatccattctgcccaaggagctccagggctgggtgagggaacactgtccagagagtggagaagaggctgtgattttgctggaggatctggagagagagctcgatgaaccacaacatgagtcaaatcttgtctttttgtccccagatggtggcccacagacacagacaagaagtcctctgtaaagagatggtgcctctagcagagcagacaccactgacccttcagtcccagcctaaggagccacagctcacatgtgactctgctcagaagtgccattctattggagagacaggtgagggacagcatttatttgatgttgaacgaatcccacctggtcaagcaaaaacaaacaataaacccagagctgggaaaacaggagacccaaagactccttac

SEQ ID NO: 307476 - DNA, 1790 bp, Homo sapiens
gtgcctctgctccgtccgccttcgaggagaggtcggcatctttgttccctgcccggccattgttcgtgccgcgcttctagcaacgccgggccggtaaccccctctccctccttgcgcgttccgggtctcgcaagcgcctccaaggtttgtcttgaagcatagctccagctggagggtaccttttaagctgttcaaggtcaagatgaatacaaactcaaaggaggttttatccctgggtgttcaagttcccgaggcatgggaagaacttctgacaatgaaagtggaagcaaaaagtcaccttcaatggcaggaatccagactgaaacgcagtaatccactggcaagggaaatcttccgaaggcactttcgacagctgtgctaccaagagacccctggaccaagggaggctcttactcgactccaggaactttgctaccagtggttgaggccacatgtgagcacaaaggagcagattttggatctgctggtgctggagcagtttctatccattctgcccaaggagctccagggctgggtgagggaacactgtccagagagtggagaagaggctgtgattttgctggaggatctggagagagagctcgatgaaccacaacatgagatggtggcccacagacacagacaagaagtcctctgtaaagagatggtgcctctagcagagcagacaccactgacccttcagtcccagcctaaggagccacagctcacatgtgactctgctcagaagtgccattctattggagagacagacacatttttattttccaaacctgttgtgatcccccagctaaaaggaggaggagaaacatggcctaacaacagaggagtcctaagagatgaagtaaccaagactgaggacagagagttggtgctaaggaaagactgtcctaagatagtggaaccacatgggaaaatgtttaatgagcagacctgggaggtatcacagcaggatccctcacatggagaagttggtgaacataaggataggatagagaggcagtggggaaacctcttaggagaggggcaacacaaatgtgatgaatgtgggaagagctttactcagagctcaggtctcattcgacatcaaagaattcatactggagaaagaccttatgaatgtaatgaatgtgggaaagccttcagtcgaagttctggtctttttaatcaccgaggaatccacaatatacagaaacggtaccactgcaaggagtgtgggaaggtcttcagtcagagtgcgggtcttatccagcatcagagaatccacaaaggagaaaagccgtatcagtgcagccagtgcagtaagagctacagtcggcgttcatttctcattgaacatcagagaagccacacaggggagcgacctcaccagtgcattgaatgtgggaaaagctttaatcgacactgcaacctcattcgccatcagaagatccacacagtggctgagctggtctagggcttggctatgagcaagttttccagatcaccacccaagttgtgtggggcaggttgagactagaaaatgcctctttcttcctttctccatgaaatgtgtttgaaacaaatcctgacttaaggcccagggacttccttaaaggaaagttgggtgtttgaagctactgttttctcttttgttcgttttacctctttcttactcttactagctgtgtccctcttatttataatttatttatttttttgagatggctgctaaacccttctaataatataataaatggcactgccacagccaacatgcctgaaaaaaaaaa

SEQ ID NO: 307477 - DNA, 1667 bp, Homo sapiens
gtgcctctgctccgtccgccttcgaggagaggtcggcatctttgttccctgcccggccattgttcgtgccgcgcttctagcaacgccgggccggcaagcgcctccaaggtttgtcttgaagcatagctccagctggagggtaccttttaagctgttcaaggtcaagatgaatacaaactcaaaggaggttttatccctgggtgttcaagttcccgaggcatgggaagaacttctgacaatgaaagtggaagcaaaaagtcaccttcaatggcaggaatccagactgaaacgcagtaatccactggcaagggaaatcttccgaaggcactttcgacagctgtgctaccaagagacccctggaccaagggaggctcttactcgactccaggaactttgctaccagtggttgaggccacatgtgagcacaaaggagcagattttggatctgctggtgctggagcagtttctatccattctgcccaaggagctccagggctgggtgagggaacactgtccagagagtggagaagaggctgtgattttgctggaggatctggagagagagctcgatgaaccacaacatgagatggtggcccacagacacagacaagaagtcctctgtaaagagatggtgcctctagcagagcagacaccactgacccttcagtcccagcctaaggagccacagctcacatgtgactctgctcagaagtgccattctattggagagacagatgaagtaaccaagactgaggacagagagttggtgctaaggaaagactgtcctaagatagtggaaccacatgggaaaatgtttaatgagcagacctgggaggtatcacagcaggatccctcacatggagaagttggtgaacataaggataggatagagaggcagtggggaaacctcttaggagaggggcaacacaaatgtgatgaatgtgggaagagctttactcagagctcaggtctcattcgacatcaaagaattcatactggagaaagaccttatgaatgtaatgaatgtgggaaagccttcagtcgaagttctggtctttttaatcaccgaggaatccacaatatacagaaacggtaccactgcaaggagtgtgggaaggtcttcagtcagagtgcgggtcttatccagcatcagagaatccacaaaggagaaaagccgtatcagtgcagccagtgcagtaagagctacagtcggcgttcatttctcattgaacatcagagaagccacacaggggagcgacctcaccagtgcattgaatgtgggaaaagctttaatcgacactgcaacctcattcgccatcagaagatccacacagtggctgagctggtctagggcttggctatgagcaagttttccagatcaccacccaagttgtgtggggcaggttgagactagaaaatgcctctttcttcctttctccatgaaatgtgtttgaaacaaatcctgacttaaggcccagggacttccttaaaggaaagttgggtgtttgaagctactgttttctcttttgttcgttttacctctttcttactcttactagctgtgtccctcttatttataatttatttatttttttgagatggctgctaaacccttctaataatataataaatggcactgccacagccaacatgcctgaaaaaaaaaa

SEQ ID NO: 307478 - DNA, 1159 bp, Homo sapiens
acaaaacaaaaaacaacgactcaggccaagtctacatggggatggactgacctgcattatgccaaagagggcaaacgttcctccctacgtaggggaaagtgttaccacactagcccttctgtttctagcccacttccttttctatgatatatttttatagacatagtcaccttcccataggctcagggaacaagtgacatttacctagcctttttctttgtttcagatgaagtaaccaagactgaggacagagagttggtgctaaggaaagactgtcctaagatagtggaaccacatgggaaaatgtttaatgagcagacctgggaggtatcacagcaggatccctcacatggagaagttggtgaacataaggataggatagagaggcagtggggaaacctcttaggagaggggcaacacaaatgtgatgaatgtgggaagagctttactcagagctcaggtctcattcgacatcaaagaattcatactggagaaagaccttatgaatgtaatgaatgtgggaaagccttcagtcgaagttctggtctttttaatcaccgaggaatccacaatatacagaaacggtaccactgcaaggagtgtgggaaggtcttcagtcagagtgcgggtcttatccagcatcagagaatccacaaaggagaaaagccgtatcagtgcagccagtgcagtaagagctacagtcggcgttcatttctcattgaacatcagagaagccacacaggggagcgacctcaccagtgcattgaatgtgggaaaagctttaatcgacactgcaacctcattcgccatcagaagatccacacagtggctgagctggtctagggcttggctatgagcaagttttccagatcaccacccaagttgtgtggggcaggttgagactagaaaatgcctctttcttcctttctccatgaaatgtgtttgaaacaaatcctgacttaaggcccagggacttccttaaaggaaagttgggtgtttgaagctactgttttctcttttgttcgttttacctctttcttactcttactagctgtgtccctcttatttataatttatttatttttttgagatggctgctaaacccttctaataatataataaatggcactgccacagccaacatgcctgaaaaaaaaaa

SEQ ID NO: 307479 - DNA, 1188 bp, Homo sapiens
gtgcctctgctccgtccgccttcgaggagaggtcggcatctttgttccctgcccggccattgttcgtgccgcgcttctagcaacgccgggccggtaaccccctctccctccttgcgcgttccgggtctcgcaagcgcctccaaggtttgtcttgaagcatagctccagctggagggtaccttttaagctgttcaaggtcaagatgaatacaaactcaaaggaggttttatccctgggtgttcaagttcccgaggcatgggaagaacttctgacaatgaaagtggaagcaaaaagtcaccttcaatggcaggaatccagactgaaacgcagtaatccactggcaagggaaatcttccgaaggcactttcgacagctgtgctaccaagagacccctggaccaagggaggctcttactcgactccaggaactttgctaccagtggttgaggccacatgtgagcacaaaggagcagattttggatctgctggtgctggagcagtttctatccattctgcccaaggagctccagggctgggtgagggaacactgtccagagagtggagaagaggctgtgattttgctggaggatctggagagagagctcgatgaaccacaacatgagatggtggcccacagacacagacaagaagtcctctgtaaagagatggtgcctctagcagagcagacaccactgacccttcagtcccagcctaaggagccacagctcacatgtgactctgctcagaagtgccattctattggagagacagatgaagtaaccaagactgaggacagagagttggtgctaaggaaagactgtcctaagatagtggaaccacatgggaaaatgtttaatgagcagactggtctagggcttggctatgagcaagttttccagatcaccacccaagttgtgtggggcaggttgagactagaaaatgcctctttcttcctttctccatgaaatgtgtttgaaacaaatcctgacttaaggcccagggacttccttaaaggaaagttgggtgtttgaagctactgttttctcttttgttcgttttacctctttcttactcttactagctgtgtccctcttatttataatttatttatttttttgagatggctgctaaacccttctaataatataataaatggcactgccacagccaacatgcctgaaaaaaaaaa

SEQ ID NO: 307480 - DNA, 351 bp, Homo sapiens
cagatagcagtaatggtcagttcttctgagagcctagtgtgctcatctttgacccttctccctgcgtgcagacttctccctgagtaccaccctggaagctttctggacttctgatgcatggtacatgaggaaggctttcagggatcgctgtggagcacagcttcagagaatggacttcaaggtttgacagacaggttcagatcctggcatcgcctcatggaagctgcttgtattgggcagattacttaaccacttgacctcagatccctcatctacaaaatggggttgataatagctttggtttagtctacttgcgctgccttaagagaataccacagactggttgtcttt

SEQ ID NO: 307481 - DNA, 268 bp, Homo sapiens
ggccattgttcgtgccgcgcttctagcaacgccgggccggtaaccccctctccctccttgcgcgttccgggtctcgtgagttggctgtggggaccgggaatggaggcgggtcagggagggtggggctggaaaaggggtgtggaaagtgaacctcagccgctgggaagtgggagccggaggagggggcggcggtcagtgccgggcggcttcgggcgtcccctagaccagagtggtcatccccagctgtggggacattgtacaagaaagg

SEQ ID NO: 307482 - DNA, 656 bp, Homo sapiens
ctaaaagaagtcactgatcttatgatctgttatattttgtaaggttgtgatgctctaccatccagaaatatttttagccaaaatatacaaaccatatgcctagttcattaaaatgaaaccaagtccagtatgaacatgatcagaataatataaatatattttgatttcttctttaaattttgaatcaattgggcttcagtttggaggctgctgtatgggtgtgtttaaacaatttatgatttccaagatcatatccccagttttcaggaggaaatgaaattggatgaaaagcaaaggagtaaccattgatagaataactttctacagaggaaagaactgaaaaggaaagatgccgactcgagtctctaaaggtcttgcacttcattggattccagtaattgactccggagtgagtgagacgatgatttccagtggccttgtttgcagccggcagcctctggtttcagtccctgagaggagcgtcccagttagtgttgctgagcaacagcatgctgggttgagagctggaatgtgaagggttgcaaaacgatttttaaaataaacacacaacttcccatcagcatgaagcaagccaaagggagagaagtactaagcactacactgtgacaggtggtgaggcagaattgaaagggaaa

SEQ ID NO: 307483 - DNA, 289 bp, Homo sapiens
tcctttctgcccgtggacgccgccgaagaagcatcgttaaagtctctcttcaccctgccgtcatgtctaagtcagagtctcctaaagagcccgaacagctgaggaagctcttcattggagggttgagctttgaaacaactgaacaaacaaatgcaagaataagaacaagaaatgaaagtcccctctcatagagagccgacattccagtggaggagacagagaatgagttctaaatgagcaaaatacatagtgcgttagatggtgttgactgctaaggagaaagaaacag

SEQ ID NO: 307484 - DNA, 1737 bp, Homo sapiens
tcctttctgcccgtggacgccgccgaagaagcatcgttaaagtctctcttcaccctgccgtcatgtctaagtcagagtctcctaaagagcccgaacagctgaggaagctcttcattggagggttgagctttgaaacaactgatgagagcctgaggagccattttgagcaatggggaacgctcacggactgtgtggtaatgagagatccaaacaccaagcgctccaggggctttgggtttgtcacatatgccactgtggaggaggtggatgcagctatgaatgcaaggccacacaaggtggatggaagagttgtggaaccaaagagagctgtctccagagaagattctcaaagaccaggtgcccacttaactgtgaaaaagatatttgttggtggcattaaagaagacactgaagaacatcacctaagagattattttgaacagtatggaaaaattgaagtgattgaaatcatgactgaccgaggcagtggcaagaaaaggggctttgcctttgtaacctttgacgaccatgactccgtggataagattgtcattcagaaataccatactgtgaatggccacaactgtgaagttagaaaagccctgtcaaagcaagagatggctagtgcttcatccagccaaagaggtcgaagtggttctggaaactttggtggtggtcgtggaggtggtttcggtgggaatgacaacttcggtcgtggaggaaacttcagtggtcgtggtggctttggtggcagccgtggtggtggtggatatggtggcagtggggatggctataatggatttggtaatgatggaagcaattttggaggtggtggaagctacaatgattttgggaattacaacaatcagtcttcaaattttggacccatgaagggaggaaattttggaggcagaagctctggcccctatggcggtggaggccaatactttgcaaaaccacgaaaccaaggtggctatggcggttccagcagcagcagtagctatggcagtggcagaagattttaattaggaaacaaagcttagcaggagaggagagccagagaagtgacagggaagctacaggttacaacagatttgtgaactcagccaagcacagtggtggcagggcctagctgctacaaagaagacatgttttagacaaatactcatgtgtatgggcaaaaaactcgaggactgtatttgtgactaattgtataacaggttattttagtttctgttctgtggaaagtgtaaagcattccaacaaagggttttaatgtagatttttttttttgcaccccatgctgttgattgctaaatgtaacagtctgatcgtgacgctgaataaatgtctttttttaaatgtgctgtgtaaagttagtcctactccttaagccatcttggtaaatttccccaaccagtgtgaagttagaattcctttcagggtgatgccaggttctatttggaatttatatacaacctgcttgggtggagaagctattgtcttcggaaaccttggtgtagttgaactgatagttactgttgtgacctgaagttcaccattaaaagggattacccaagcaaaatcatggaattattggttataaaagtgattgttggcacatcctatgcaatatatctaaattgaataatggtaccagataaaattatagatgggaatgaagcttgtgtatcatccattatcatgtgtaatcaataaacgatttaattctctgga

SEQ ID NO: 307485 - DNA, 1358 bp, Homo sapiens
tcctttctgcccgtggacgccgccgaagaagcatcgttaaagtctctcttcaccctgccgtcatgtctaagtcagagtctcctaaagagcccgaacagctgaggaagctcttcattggagggttgagctttgaaacaactgatgagagcctgaggagccattttgagcaatggggaacgctcacggactgtgtggtaatgagagatccaaacaccaagcgctccaggggctttgggtttgtcacatatgccactgtggaggaggtggatgcagctatgaatgcaaggccacacaaggtggatggaagagttgtggaaccaaagagagctgtctccagagaagattctcaaagaccaggtgcccacttaactgtgaaaaagatatttgttggtggcattaaagaagacactgaagaacatcacctaagagattattttgaacagtatggaaaaattgaagtgattgaaatcatgactgaccgaggcagtggcaagaaaaggggctttgcctttgtaacctttgacgaccatgactccgtggataagattgtcattcagaaataccatactgtgaatggccacaactgtgaagttagaaaagccctgtcaaagcaagagatggctagtgcttcatccagccaaagaggtcgaagtggttctggaaactttggtggtggtcgtggaggtggtttcggtgggaatgacaacttcggtcgtggaggaaacttcagtggtcgtggtggctttggtggcagccgtggtggtggtggatatggtggcagtggggatggctataatggatttggtaatgatggaagcaattttggaggtggtggaagctacaatgattttgggaattacaacaatcagtcttcaaattttggacccatgaagggaggaaattttggaggcagaagctctggcccctatggcggtggaggccaatactttgcaaaaccacgaaaccaaggtggctatggcggttccagcagcagcagtagctatggcagtggcagaagattttaattaggaaacaaagcttagcaggagaggagagccagagaagtgacagggaagctacaggttacaacagatttgtgaactcagccaagcacagtggtggcagggcctagctgctacaaagaagacatgttttagacaaatactcatgtgtatgggcaaaaaactcgaggactgtatttgtgactaattgtataacaggttattttagtttctgttctgtggaaagtgtaaagcattccaacaaagggttttaatgtagatttttttttttgcaccccatgctgttgattgctaaatgtaacagtctgatcgtgacgctgaataaatgtctttttt

SEQ ID NO: 307486 - DNA, 311 bp, Homo sapiens
aaaaaaacaaatgcaggatatccatgcatttccgtacaaccggatagtattcagctctaaaaagtattattcagctgctgatacatgctacatcatgctcagagaaagaaggcagtcacagaggatcacatattgtaggattccatttatgtgaaatgtccagaataggcaaattcatagagatagaaagtcaattagtggttgcaaggggctaggggtgaagggtagggggaaagggagtgactgctaatgggcacagcatttcttttattggggggataaagctgttctaaaattagatgttgatgatg

SEQ ID NO: 307487 - DNA, 189 bp, Homo sapiens
agcttctaacgatgtacgggtagtccatgttaatagtggggctttcaggtgtttagagattttttttgttgttgttaacattcattgcaaaagtactagatggtgtataactctagagttgaattttaagggattccctaatatgtatactatctttttatctgaagtaataaataaacaatgatcttg

SEQ ID NO: 307488 - DNA, 2714 bp, Homo sapiens
cgtcagccggggccgccatattggaaaggcgccgccgccgcctccgccttggagctcggggtgtttcggggactgcggccacaggcaggaaggcgctcctctcctgccccgccgacgcccggccagcccgcttcgccctgacctgtttcctcatgactgcccccggccctgctgccgacggacgtcgccccggcgtccggatttaacacggaaacccggatcggaggccgcgcggggaggaggagggcgacccggtcggtcctgcgaccctctcggcccggctcggcgcctcggcgggagccatgacctcgctgacccagcgcagctccggcctggtgcagcggcgcaccgaggcctcccgcaacgccgccgacaaggagcgggcggcgggcggcggcgccggcagcagcgaggacgacgcgcagagccgccgcgacgagcaggacgacgacgacaagggcgactccaaggaaacgcggctgaccctgatggaggaagtgctcctgctgggcctcaaggaccgcgagggttacacatcattttggaatgactgtatatcatctggattacgtggctgtatgttaattgaattagcattgagaggaaggttacaactagaggcttgtggaatgagacgtaaaagtctattaacaagaaaggtaatctgtaagtcagatgctccaacaggggatgttcttcttgatgaagctctgaagcatgttaaggaaactcagcctccagaaacggtccagaactggattgaattacttagtggtgagacatggaatccattaaaattgcattatcagttaagaaatgtacgggaacgattagctaaaaacctggtggaaaagggtgtattgacaacagagaaacagaacttcctactttttgacatgacaacacatcccctcaccaataacaacattaagcagcgcctcatcaagaaagtacaggaagccgttcttgacaaatgggtgaatgaccctcaccgcatggacaggcgcttgctggccctcatttacctggctcatgcctcggacgtcctggagaatgcttttgctcctcttctggacgagcagtatgatttggctaccaagagagtgcggcagcttctcgacttagaccctgaagtggaatgtctgaaggccaacaccaatgaggttctgtgggcggtggtggcggcgttcaccaagtaactctgctcggggtgaaccattctcctttctctcaagtaaaccagtagtttttcttctgttgacttctggttttctgtaatttgtactttcccacactataattggcttctgttttacaaaatggtgggtggctttttcttttttgtacgtgtacaggattctgctggtacgagaggccttcctctttctgtttttaaaaaaagttttactgccatattggcattccattccctgttgccatcctcactgttacctgttttgggtttctggtctactttgactttcaaagtacctccagcctcctcatacgcacagcttttggatgacctcagcttgagtttctccatatgtgcatgtacatctagcattctgcctacagttcagacagaagtcacaaaaaggccttcaactcaccaaaggtaaatatctgtatctattaggacattttttacatagacttcagttgagatgtatacttagcaaaattatttttaaattgaaacagcacagtaaatacttaatataaaatgtcccttggattttgcttcccatgtaaatctattgtattattacacttgttataattttaactataaaggtccaattgtttcacagagccagtttgggatgggctgcattccatttatgctgtatatagtttgaattatatataaattaccccttcttctggccacccctgctcccatcttagtattttgcaagatctaatcagttgtacacctggtgcccctcgcttgcttcaatcatggttatttgatggcaaaatcgacctcttgtcgctgaaggagagagaaaagatgtgtgtctgattggtcctgggattttttgagctgtgccatttatggtactctttgcctatgcatcccctttttagattttttttaaattttatcttactgtttttataatttctattgggaagaggcttgtgaccagtaccaatcttgagtttctttttctgtccacaagtaaattaatatctgctctgaaatgtcatttatctactcacacattcttggggaaaaaaatcaaatgtcagtcctagcagatgttgcatgtaaattggtagcaagtaatgattacaacccagaggattaagaattttgtaacagaaagctctatgttttaattttttatatacaattaggataattagcattgtcagactataaacctttgctttttaaagtttatttttactatttctttatcactttattgtatcatcaccattggtttcataatgtaaatactatatgttgaacaaattaaatgtcaaaattttttattaccatagtccatgttaatagtggggctttcaggtgtttagagattttttttgttgttgttaacattcattgcaaaagtactagatggtgtataactctagagttgaattttaagggattccctaatatgtatactatctttttatctgaagtaataaataaacaatgatcttgaaagtgcctgaatcagagcaagcaaaaaaat

SEQ ID NO: 307489 - DNA, 2683 bp, Homo sapiens
cgtcagccggggccgccatattggaaaggcgccgccgccgcctccgccttggagctcggggtgtttcggggactgcggccacaggcaggaaggcgctcctctcctgccccgccgacgcccggccagcccgcttcgccctgacctgtttcctcatgactgcccccggccctgctgccgacggacgtcgccccggcgtccggatttaacacggaaacccggatcggaggccgcgcggggaggaggagggcgacccggtcggtcctgcgaccctctcggcccggctcggcgcctcggcgggagccatgacctcgctgacccagcgcagctccggcctggtgcagcggcgcaccgaggcctcccgcaacgccgccgacaaggagcgggcggcgggcggcggcgccggcagcagcgaggacgacgcgcagagccgccgcgacgagcaggacgacgacgacaagggcgactccaaggaaacgcggctgaccctgatggaggaagtgctcctgctgggcctcaaggaccgcgagggttacacatcattttggaatgactgtatatcatctggattacgtggctgtatgttaattgaattagcattgagaggaaggttacaactagaggcttgtggaatgagacgtaaaagtctattaacaagaaaggtaatctgtaagtcagatgctccaacaggggatgttcttcttgatgaagctctgaagcatgttaaggaaactcagcctccagaaacggtccagaactggattgaattacttagtggtgagacatggaatccattaaaattgcattatcagttaagaaatgtacgggaacgattagctaaaaacctggtggaaaagggtgtattgacaacagagaaacagaacttcctactttttgacatgacaacacatcccctcaccaataacaacattaagcagcgcctcatcaagaaagtacaggaagccgttcttgacaaatgggtgaatgaccctcaccgcatggacaggcgcttgctggccctcatttacctggctcatgcctcggacgtcctggagaatgcttttgctcctcttctggacgagcagtatgatttggctaccaagagagtgcggcagcttctcgacttagaccctgaagtggaatgtctgaaggccaacaccaatgaggttctgtgggcggtggtggcggcgttcaccaagtaactctgctcggggtgaaccattctcctttctctcaagtaaaccagtagtttttcttctgttgacttctggttttctgtaatttgtactttcccacactataattggcttctgttttacaaaatggtgggtggctttttcttttttgtacgtgtacaggattctgctggtacgagaggccttcctctttctgtttttaaaaaaagttttactgccatattggcattccattccctgttgccatcctcactgttacctgttttgggtttctggtctactttgactttcaaagtacctccagcctcctcatacgcacagcttttggatgacctcagcttgagtttctccatatgtgcatgtacatctagcattctgcctacagttcagacagaagtcacaaaaaggccttcaactcaccaaaggtaaatatctgtatctattaggacattttttacatagacttcagttgagatgtatacttagcaaaattatttttaaattgaaacagcacagtaaatacttaatataaaatgtcccttggattttgcttcccatgtaaatctattgtattattacacttgttataattttaactataaaggtccaattgtttcacagagccagtttgggatgggctgcattccatttatgctgtatatagtttgaattatatataaattaccccttcttctggccacccctgctcccatcttagtattttgcaagatctaatcagttgtacacctggtgcccctcgcttgcttcaatcatggttatttgatggcaaaatcgacctcttgtcgctgaaggagagagaaaagatgtgtgtctgattggtcctgggattttttgagctgtgccatttatggtactctttgcctatgcatcccctttttagattttttttaaattttatcttactgtttttataatttctattgggaagaggcttgtgaccagtaccaatcttgagtttctttttctgtccacaagtaaattaatatctgctctgaaatgtcatttatctactcacacattcttggggaaaaaaatcaaatgtcagtcctagcagatgttgcatgtaaattggtagcaagtaatgattacaacccagaggattaagaattttgtaacagaaagctctatgttttaattttttatatacaattaggataattagcattgtcagactataaacctttgctttttaaagtttatttttactatttctttatcactttattgtatcatcaccattggtttcataatgtaaatactatatgttgaacaaattaaatgtcaaaattttttattaccatagtccatgttaatagtggggctttcaggtgtttagagattttttttgttgttgttaacattcattgcaaaagtactagatggtgtataactctagagttgaattttaagggattccctaatatgtatactatctttttatctgaagtaataaataaacaatgatcttg

SEQ ID NO: 307490 - DNA, 2671 bp, Homo sapiens
cgtcagccggggccgccatattggaaaggcgccgccgccgcctccgccttggagctcggggtgtttcggggactgcggccacaggcaggaaggcgctcctctcctgccccgccgacgcccggccagcccgcttcgccctgacctgtttcctcatgactgcccccggccctgctgccgacggacgtcgccccggcgtccggatttaacacggaaacccggatcggaggccgcgcggggaggaggagggcgacccggtcggtcctgcgaccctctcggcccggctcggcgcctcggcgggagccatgacctcgctgacccagcgcagctccggcctggtgcagcggcgcaccgaggcctcccgcaacgccgccgacaaggagcgggcggcggggacgagcaggacgacgacgacaagggcgactccaaggaaacgcggctgaccctgatggaggaagtgctcctgctgggcctcaaggaccgcgagggttacacatcattttggaatgactgtatatcatctggattacgtggctgtatgttaattgaattagcattgagaggaaggttacaactagaggcttgtggaatgagacgtaaaagtctattaacaagaaaggtaatctgtaagtcagatgctccaacaggggatgttcttcttgatgaagctctgaagcatgttaaggaaactcagcctccagaaacggtccagaactggattgaattacttagtggtgagacatggaatccattaaaattgcattatcagttaagaaatgtacgggaacgattagctaaaaacctggtggaaaagggtgtattgacaacagagaaacagaacttcctactttttgacatgacaacacatcccctcaccaataacaacattaagcagcgcctcatcaagaaagtacaggaagccgttcttgacaaatgggtgaatgaccctcaccgcatggacaggcgcttgctggccctcatttacctggctcatgcctcggacgtcctggagaatgcttttgctcctcttctggacgagcagtatgatttggctaccaagagagtgcggcagcttctcgacttagaccctgaagtggaatgtctgaaggccaacaccaatgaggttctgtgggcggtggtggcggcgttcaccaagtaactctgctcggggtgaaccattctcctttctctcaagtaaaccagtagtttttcttctgttgacttctggttttctgtaatttgtactttcccacactataattggcttctgttttacaaaatggtgggtggctttttcttttttgtacgtgtacaggattctgctggtacgagaggccttcctctttctgtttttaaaaaaagttttactgccatattggcattccattccctgttgccatcctcactgttacctgttttgggtttctggtctactttgactttcaaagtacctccagcctcctcatacgcacagcttttggatgacctcagcttgagtttctccatatgtgcatgtacatctagcattctgcctacagttcagacagaagtcacaaaaaggccttcaactcaccaaaggtaaatatctgtatctattaggacattttttacatagacttcagttgagatgtatacttagcaaaattatttttaaattgaaacagcacagtaaatacttaatataaaatgtcccttggattttgcttcccatgtaaatctattgtattattacacttgttataattttaactataaaggtccaattgtttcacagagccagtttgggatgggctgcattccatttatgctgtatatagtttgaattatatataaattaccccttcttctggccacccctgctcccatcttagtattttgcaagatctaatcagttgtacacctggtgcccctcgcttgcttcaatcatggttatttgatggcaaaatcgacctcttgtcgctgaaggagagagaaaagatgtgtgtctgattggtcctgggattttttgagctgtgccatttatggtactctttgcctatgcatcccctttttagattttttttaaattttatcttactgtttttataatttctattgggaagaggcttgtgaccagtaccaatcttgagtttctttttctgtccacaagtaaattaatatctgctctgaaatgtcatttatctactcacacattcttggggaaaaaaatcaaatgtcagtcctagcagatgttgcatgtaaattggtagcaagtaatgattacaacccagaggattaagaattttgtaacagaaagctctatgttttaattttttatatacaattaggataattagcattgtcagactataaacctttgctttttaaagtttatttttactatttctttatcactttattgtatcatcaccattggtttcataatgtaaatactatatgttgaacaaattaaatgtcaaaattttttattaccatagtccatgttaatagtggggctttcaggtgtttagagattttttttgttgttgttaacattcattgcaaaagtactagatggtgtataactctagagttgaattttaagggattccctaatatgtatactatctttttatctgaagtaataaataaacaatgatcttgaaagtgcctgaatcagagcaagcaaaaaaat

SEQ ID NO: 307491 - DNA, 2629 bp, Homo sapiens
cgtcagccggggccgccatattggaaaggcgccgccgccgcctccgccttggagctcggggtgtttcggggactgcggccacaggcaggaaggcgctcctctcctgccccgccgacgcccggccagcccgcttcgccctgacctgtttcctcatgactgcccccggccctgctgccgacggacgtcgccccggcgtccggatttaacacggaaacccggatcggaggccgcgcggggaggaggagggcgacccggtcggtcctgcgaccctctcggcccggctcggcgcctcggcgggagccatgacctcgctgacccagcgcagctccggcctggtgcagcggcgcaccgaggcctcccgcaacgccgccgacaaggagcgggcggcgggcggcggcgccggcagcagcgaggacgacgcgcagagccgccgcgacgagcaggacgacgacgacaagggcgactccaaggaaacgcggctgaccctgatggaggaagtgctcctgctgggcctcaaggaccgcgagggttacacatcattttggaatgactgtatatcatctggattacgtggctgtatgttaattgaattagcattgagaggaaggttacaactagaggcttgtggaatgagacgtaaaagtctattaacaagaaaggtaatctgtaagtcagatgctccaacaggggatgttcttcttgatgaagctctgaagcatgttaaggaaactcagcctccagaaacggtccagaactggattgaattacttagtggtgagacatggaatccattaaaattgcattatcagttaagaaatgtacgggaacgattagctaaaaacctggtggaacatcccctcaccaataacaacattaagcagcgcctcatcaagaaagtacaggaagccgttcttgacaaatgggtgaatgaccctcaccgcatggacaggcgcttgctggccctcatttacctggctcatgcctcggacgtcctggagaatgcttttgctcctcttctggacgagcagtatgatttggctaccaagagagtgcggcagcttctcgacttagaccctgaagtggaatgtctgaaggccaacaccaatgaggttctgtgggcggtggtggcggcgttcaccaagtaactctgctcggggtgaaccattctcctttctctcaagtaaaccagtagtttttcttctgttgacttctggttttctgtaatttgtactttcccacactataattggcttctgttttacaaaatggtgggtggctttttcttttttgtacgtgtacaggattctgctggtacgagaggccttcctctttctgtttttaaaaaaagttttactgccatattggcattccattccctgttgccatcctcactgttacctgttttgggtttctggtctactttgactttcaaagtacctccagcctcctcatacgcacagcttttggatgacctcagcttgagtttctccatatgtgcatgtacatctagcattctgcctacagttcagacagaagtcacaaaaaggccttcaactcaccaaaggtaaatatctgtatctattaggacattttttacatagacttcagttgagatgtatacttagcaaaattatttttaaattgaaacagcacagtaaatacttaatataaaatgtcccttggattttgcttcccatgtaaatctattgtattattacacttgttataattttaactataaaggtccaattgtttcacagagccagtttgggatgggctgcattccatttatgctgtatatagtttgaattatatataaattaccccttcttctggccacccctgctcccatcttagtattttgcaagatctaatcagttgtacacctggtgcccctcgcttgcttcaatcatggttatttgatggcaaaatcgacctcttgtcgctgaaggagagagaaaagatgtgtgtctgattggtcctgggattttttgagctgtgccatttatggtactctttgcctatgcatcccctttttagattttttttaaattttatcttactgtttttataatttctattgggaagaggcttgtgaccagtaccaatcttgagtttctttttctgtccacaagtaaattaatatctgctctgaaatgtcatttatctactcacacattcttggggaaaaaaatcaaatgtcagtcctagcagatgttgcatgtaaattggtagcaagtaatgattacaacccagaggattaagaattttgtaacagaaagctctatgttttaattttttatatacaattaggataattagcattgtcagactataaacctttgctttttaaagtttatttttactatttctttatcactttattgtatcatcaccattggtttcataatgtaaatactatatgttgaacaaattaaatgtcaaaattttttattaccatagtccatgttaatagtggggctttcaggtgtttagagattttttttgttgttgttaacattcattgcaaaagtactagatggtgtataactctagagttgaattttaagggattccctaatatgtatactatctttttatctgaagtaataaataaacaatgatcttg

SEQ ID NO: 307492 - DNA, 2197 bp, Homo sapiens
cgtcagccggggccgccatattggaaaggcgccgccgccgcctccgccttggagctcggggtgtttcggggactgcggccacaggcaggaaggcgctcctctcctgccccgccgacgcccggccagcccgcttcgccctgacctgtttcctcatgactgcccccggccctgctgccgacggacgtcgccccggcgtccggatttaacacggaaacccggatcggaggccgcgcggggaggaggagggcgacccggtcggtcctgcgaccctctcggcccggctcggcgcctcggcgggagccatgacctcgctgacccagcgcagctccggcctggtgcagcggcgcaccgaggcctcccgcaacgccgccgacaaggagcgggcggcgggcggcggcgccggcagcagcgaggacgacgcgcagagccgccgcgacgagcaggacgacgacgacaagggcgactccaaggaaacgcggctgaccctgatggaggaagtgctcctgctgggcctcaaggaccgcgagggttacacatcattttggaatgactgtatatcatctggattacgtggctgtatgttaattgaattagcattgagaggaaggttacaactagaggcttgtggaatgagacgtaaaagtctattaacaagaaaggtaatctgtaagtcagatgctccaacaggggatgttcttcttgatgaagctctgaagcatgttaaggaaactcagcctccagaaacggtccagaactggattgaattacttagtggtgagacatggaatccattaaaattgcattatcagttaagaaatgtacgggaacgattagctaaaaacctggtggaaaagggtgtattgacaacagagaaacagaacttcctactttttgacatgacaacacatcccctcaccaataacaacattaagcagcgcctcatcaagaaagtacaggaagccgttcttgacaaatgggtgaatgaccctcaccgcatggacaggcgcttgctggccctcatttacctggctcatgcctcggacgtcctggagaatgcttttgctcctcttctggacgagcagtatgatttggctaccaagagagtgcggcagcttctcgacttagaccctgaagtggaatgtctgaaggccaacaccaatgaggttctgtgggcggtggtggcggcgttcaccaagtaactctgctcggggtgaaccattctcctttctctcaagtaaaccagtagtttttcttctgttgacttctggttttctgtaatttgtactttcccacactataattggcttctgttttacaaaatggtgggtggctttttcttttttgtacgtgtacaggattctgctggtacgagaggccttcctctttctgtttttaaaaaaagttttactgccatattggcattccattccctgttgccatcctcactgttacctgttttgggtttctggtctactttgactttcaaagtacctccagcctcctcatacgcacagcttttggatgacctcagcttgagtttctccatatgtgcatgtacatctagcattctgcctacagttcagacagaagtcacaaaaaggccttcaactcaccaaaggtaaatatctgtatctattaggacattttttacatagacttcagttgagatgtatacttagcaaaattatttttaaattgaaacagcacagtaaatacttaatataaaatgtcccttggattttgcttcccatgtaaatctattgtattattacacttgttataattttaactataaaggtccaattgtttcacagagccagtttgggatgggctgcattccatttatgctgtatatagtttgaattatatataaattaccccttcttctggccacccctgctcccatcttagtattttgcaagatctaatcagttgtacacctggtgcccctcgcttgcttcaatcatggttatttgatggcaaaatcgacctcttgtcgctgaaggagagagaaaagatgtgtgtctgattggtcctgggattttttgagctgtgccatttatggtactctttgcctatgcatcccctttttagattttttttaaattttatcttactgtttttataatttctattgggaagaggcttgtgaccagtaccaatagaaattataaaaacagtaagataaaaaaaaaaa

SEQ ID NO: 307493 - DNA, 1382 bp, Homo sapiens
acctcagtgatgtgatagttggtgggtggctttttcttttttgtacgtgtacaggattctgctggtacgagaggccttcctctttctgtttttaaaaaaagttttactgccatattggcattccattccctgttgccatcctcactgttacctgttttgggtttctggtctactttgactttcaaagtacctccagcctcctcatacgcacagcttttggatgacctcagcttgagtttctccatatgtgcatgtacatctagcattctgcctacagttcagacagaagtcacaaaaaggccttcaactcaccaaaggtaaatatctgtatctattaggacattttttacatagacttcagttgagatgtatacttagcaaaattatttttaaattgaaacagcacagtaaatacttaatataaaatgtcccttggattttgcttcccatgtaaatctattgtattattacacttgttataattttaactataaaggtccaattgtttcacagagccagtttgggatgggctgcattccatttatgctgtatatagtttgaattatatataaattaccccttcttctggccacccctgctcccatcttagtattttgcaagatctaatcagttgtacacctggtgcccctcgcttgcttcaatcatggttatttgatggcaaaatcgacctcttgtcgctgaaggagagagaaaagatgtgtgtctgattggtcctgggattttttgagctgtgccatttatggtactctttgcctatgcatcccctttttagattttttttaaattttatcttactgtttttataatttctattgggaagaggcttgtgaccagtaccaatcttgagtttctttttctgtccacaagtaaattaatatctgctctgaaatgtcatttatctactcacacattcttggggaaaaaaatcaaatgtcagtcctagcagatgttgcatgtaaattggtagcaagtaatgattacaacccagaggattaagaattttgtaacagaaagctctatgttttaattttttatatacaattaggataattagcattgtcagactataaacctttgctttttaaagtttatttttactatttctttatcactttattgtatcatcaccattggtttcataatgtaaatactatatgttgaacaaattaaatgtcaaaattttttattaccatagtccatgttaatagtggggctttcaggtgtttagagattttttttgttgttgttaacattcattgcaaaagtactagatggtgtataactctagagttgaattttaagggattccctaatatgtatactatctttttatctgaagtaataaataaacaatgatcttg

SEQ ID NO: 307494 - DNA, 2699 bp, Homo sapiens
aatgcaggctgtcggccgggtttacggatcgccttggagctcggggtgtttcggggactgcggccacaggcaggaaggcgctcctctcctgccccgccgacgcccggccagcccgcttcgccctgacctgtttcctcatgactgcccccggccctgctgccgacggacgtcgccccggcgtccggatttaacacggaaacccggatcggaggccgcgcggggaggaggagggcgacccggtcggtcctgcgaccctctcggcccggctcggcgcctcggcgggagccatgacctcgctgacccagcgcagctccggcctggtgcagcggcgcaccgaggcctcccgcaacgccgccgacaaggagcgggcggcgggcggcggcgccggcagcagcgaggacgacgcgcagagccgccgcgacgagcaggacgacgacgacaagggcgactccaaggaaacgcggctgaccctgatggaggaagtgctcctgctgggcctcaaggaccgcgagggttacacatcattttggaatgactgtatatcatctggattacgtggctgtatgttaattgaattagcattgagaggaaggttacaactagaggcttgtggaatgagacgtaaaagtctattaacaagaaaggtaatctgtaagtcagatgctccaacaggggatgttcttcttgatgaagctctgaagcatgttaaggaaactcagcctccagaaacggtccagaactggattgaattacttagtggtgagacatggaatccattaaaattgcattatcagttaagaaatgtacgggaacgattagctaaaaacctggtggaaaagggtgtattgacaacagagaaacagaacttcctactttttgacatgacaacacatcccctcaccaataacaacattaagcagcgcctcatcaagaaagtacaggaagccgttcttgacaaatgggtgaatgaccctcaccgcatggacaggcgcttgctggccctcatttacctggctcatgcctcggacgtcctggagaatgcttttgctcctcttctggacgagcagtatgatttggctaccaagagagtgcggcagcttctcgacttagaccctgaagtggaatgtctgaaggccaacaccaatgaggttctgtgggcggtggtggcggcgttcaccaagtaactctgctcggggtgaaccattctcctttctctcaagtaaaccagtagtttttcttctgttgacttctggttttctgtaatttgtactttcccacactataattggcttctgttttacaaaatggtgggtggctttttcttttttgtacgtgtacaggattctgctggtacgagaggccttcctctttctgtttttaaaaaaagttttactgccatattggcattccattccctgttgccatcctcactgttacctgttttgggtttctggtctactttgactttcaaagtacctccagcctcctcatacgcacagcttttggatgacctcagcttgagtttctccatatgtgcatgtacatctagcattctgcctacagttcagacagaagtcacaaaaaggccttcaactcaccaaaggtaaatatctgtatctattaggacattttttacatagacttcagttgagatgtatacttagcaaaattatttttaaattgaaacagcacagtaaatacttaatataaaatgtcccttggattttgcttcccatgtaaatctattgtattattacacttgttataattttaactataaaggtccaattgtttcacagagccagtttgggatgggctgcattccatttatgctgtatatagtttgaattatatataaattaccccttcttctggccacccctgctcccatcttagtattttgcaagatctaatcagttgtacacctggtgcccctcgcttgcttcaatcatggttatttgatggcaaaatcgacctcttgtcgctgaaggagagagaaaagatgtgtgtctgattggtcctgggattttttgagctgtgccatttatggtactctttgcctatgcatcccctttttagattttttttaaattttatcttactgtttttataatttctattgggaagaggcttgtgaccagtaccaatcttgagtttctttttctgtccacaagtaaattaatatctgctctgaaatgtcatttatctactcacacattcttggggaaaaaaatcaaatgtcagtcctagcagatgttgcatgtaaattggtagcaagtaatgattacaacccagaggattaagaattttgtaacagaaagctctatgttttaattttttatatacaattaggataattagcattgtcagactataaacctttgctttttaaagtttatttttactatttctttatcactttattgtatcatcaccattggtttcataatgtaaatactatatgttgaacaaattaaatgtcaaaattttttattaccatagtccatgttaatagtggggctttcaggtgtttagagattttttttgttgttgttaacattcattgcaaaagtactagatggtgtataactctagagttgaattttaagggattccctaatatgtatactatctttttatctgaagtaataaataaacaatgatcttgaaagtgcctgaatcagagcaagcaaaaaaat

SEQ ID NO: 307495 - DNA, 2828 bp, Homo sapiens
cgtcagccggggccgccatattggaaaggcgccgccgccgcctccgccttggagctcggggtgtttcggggactgcggccacaggcaggaaggcgctcctctcctgccccgccgacgcccggccagcccgcttcgccctgacctgtttcctcatgactgcccccggccctgctgccgacggacgtcgccccggcgtccggatttaacacggaaacccggatcggaggccgcgcggggaggaggagggcgacccggtcggtcctgcgaccctctcggcccggctcggcgcctcggcgggagccatgacctcgctgacccagcgcagctccggcctggtgcagcggcgcaccgaggcctcccgcaacgccgccgacaaggagcgggcggcgggcggcggcgccggcagcagcgaggacgacgcgcagagccgccgcgacgagcaggacgacgacgacaagggcgactccaaggaaacgcggctgaccctgatggaggaagtgctcctgctgggcctcaaggaccgcgagggttacacatcattttggaatgactgtatatcatctggattacgtggctgtatgttaattgaattagcattgagaggaaggttacaactagaggcttgtggaatgagacgtaaaagtctattaacaagaaaggtaatctgtaagtcagatgctccaacaggggatgttcttcttgatgaagctctgaagcatgttaaggaaactcagcctccagaaacggtccagaactggattgaattacttagtggtgagacatggaatccattaaaattgcattatcagttaagaaatgtacgggaacgattagctaaaaacctggtggaaaagggtgtattgacaacagagaaacagaacttcctactttttgacatgacaacacatcccctcaccaataacaacattaagcagcgcctcatcaagaaagtacaggaagccgttcttgacaaatgggtgaatgaccctcaccgcatggacaggcgcttgctggccctcatttacctggctcatgcctcggacgtcctggagaatgcttttgctcctcttctggacgagcagtatgatttggctaccaagagagtgcggcagcttctcgacttagaccctgaagtggaatgtctgaaggccaacaccaatgaggttctgtgggcggtggtggcggcgttcaccaagtaactctgctcggggtgaaccattctcctttctctcaagtaaaccagtagtttttcttctgttgacttctggttttctgtaatttgtactttcccacactataattggcttctgttttacaaaatggtgggtggctttttcttttttgtacgtgtacaggattctgctggtacgagaggccttcctctttctgtttttaaaaaaagttttactgccatattggcattccattccctgttgccatcctcactgttacctgttttgggtttctggtctactttgactttcaaagtacctccagcctcctcatacgcacagcttttggatgacctcagcttgagtttctccatatgtgcatgtacatctagcattctgcctacagttcagacagaagtcacaaaaaggccttcaactcaccaaaggtaaatatctgtatctattaggacattttttacatagacttcagttgagatgtatacttagcaaaattatttttaaattgaaacagcacagtaaatacttaatataaaatgtcccttggattttgcttcccatgtaaatctattgtattattacacttgttataattttaactataaaggtccaattgtttcacagagccagtttgggatgggctgcattccatttatgctgtatatagtttgaattatatataaattaccccttcttctggccacccctgctcccatcttagtattttgcaagatctaatcagttgtacacctggtgcccctcgcttgcttcaatcatggttatttgatggcaaaatcgacctcttgtcgctgaaggagagagaaaagatgtgtgtctgattggtcctgggattttttgagctgtgccatttatggtactctttgcctatgcatcccctttttagattttttttaaattttatcttactgtttttataatttctattgggaagaggcttgtgaccagtaccaatcttgagtttctttttctgtccacaagtaaattaatatctgctctgaaatgtcatttatctactcacacattcttggggaaaaaaatcaaatgtcagtcctagcagatgttgcatgtaaattggtagcaagtaatgattacaacccagaggattaagaattttgtaacagaaagctctatgttttaattttttatatacaattaggataattagcattgtcagactataaacctttgctttttaaagtttatttttactatttctttatcactttattgtatcatcaccattggtttcataatgtaaatactatatgttgaacaaattaaatgtcaaaattttttattaccatagtccatgttaatagtggggctttcaggtgtttagagattttttttgttgttgttaacattcattgcaaaagtactagatggtgtataactctagagttgaattttaagggattccctaatatgtatactatctttttatctgaagtaataaataaacaatgatcttggagaagaaaaatgagaggaaaacttgggggggggccgggcaccaatttccccctatagtggatgggaaaaacaattcagtgcccgacgtttaacaccgttgtggcttggaaaacccctgctgtcccccaactttatccgccggga

SEQ ID NO: 307496 - DNA, 2551 bp, Homo sapiens
cgtcagccggggccgccatattggaaaggcgccgccgccgcctccgccttggagctcggggtgtttcggggactgcggccacaggcaggaaggcgctcctctcctgccccgccgacgcccggccagcccgcttcgccctgacctgtttcctcatgactgcccccggccctgctgccgacggacgtcgccccggcgtccggatttaacacggaaacccggatcggaggccgcgcggggaggaggagggcgacccggtcggtcctgcgaccctctcggcccggctcggcgcctcggcgggagccatgacctcgctgacccagcgcagctccggcctggtgcagcggcgcaccgaggcctcccgcaacgccgccgacaaggagcgggcggcgggcggcggcgccggcagcagcgaggacgacgcgcagagccgccgcgacgagcaggacgacgacgacaagggcgactccaaggaaacgcggctgaccctgatggaggaagtgctcctgctgggcctcaaggaccgcgaggtaatctgtaagtcagatgctccaacaggggatgttcttcttgatgaagctctgaagcatgttaaggaaactcagcctccagaaacggtccagaactggattgaattacttagtggtgagacatggaatccattaaaattgcattatcagttaagaaatgtacgggaacgattagctaaaaacctggtggaaaagggtgtattgacaacagagaaacagaacttcctactttttgacatgacaacacatcccctcaccaataacaacattaagcagcgcctcatcaagaaagtacaggaagccgttcttgacaaatgggtgaatgaccctcaccgcatggacaggcgcttgctggccctcatttacctggctcatgcctcggacgtcctggagaatgcttttgctcctcttctggacgagcagtatgatttggctaccaagagagtgcggcagcttctcgacttagaccctgaagtggaatgtctgaaggccaacaccaatgaggttctgtgggcggtggtggcggcgttcaccaagtaactctgctcggggtgaaccattctcctttctctcaagtaaaccagtagtttttcttctgttgacttctggttttctgtaatttgtactttcccacactataattggcttctgttttacaaaatggtgggtggctttttcttttttgtacgtgtacaggattctgctggtacgagaggccttcctctttctgtttttaaaaaaagttttactgccatattggcattccattccctgttgccatcctcactgttacctgttttgggtttctggtctactttgactttcaaagtacctccagcctcctcatacgcacagcttttggatgacctcagcttgagtttctccatatgtgcatgtacatctagcattctgcctacagttcagacagaagtcacaaaaaggccttcaactcaccaaaggtaaatatctgtatctattaggacattttttacatagacttcagttgagatgtatacttagcaaaattatttttaaattgaaacagcacagtaaatacttaatataaaatgtcccttggattttgcttcccatgtaaatctattgtattattacacttgttataattttaactataaaggtccaattgtttcacagagccagtttgggatgggctgcattccatttatgctgtatatagtttgaattatatataaattaccccttcttctggccacccctgctcccatcttagtattttgcaagatctaatcagttgtacacctggtgcccctcgcttgcttcaatcatggttatttgatggcaaaatcgacctcttgtcgctgaaggagagagaaaagatgtgtgtctgattggtcctgggattttttgagctgtgccatttatggtactctttgcctatgcatcccctttttagattttttttaaattttatcttactgtttttataatttctattgggaagaggcttgtgaccagtaccaatcttgagtttctttttctgtccacaagtaaattaatatctgctctgaaatgtcatttatctactcacacattcttggggaaaaaaatcaaatgtcagtcctagcagatgttgcatgtaaattggtagcaagtaatgattacaacccagaggattaagaattttgtaacagaaagctctatgttttaattttttatatacaattaggataattagcattgtcagactataaacctttgctttttaaagtttatttttactatttctttatcactttattgtatcatcaccattggtttcataatgtaaatactatatgttgaacaaattaaatgtcaaaattttttattaccatagtccatgttaatagtggggctttcaggtgtttagagattttttttgttgttgttaacattcattgcaaaagtactagatggtgtataactctagagttgaattttaagggattccctaatatgtatactatctttttatctgaagtaataaataaacaatgatcttg

SEQ ID NO: 307497 - DNA, 686 bp, Homo sapiens
gaagcttctgcacatgtagttcctagagctgctgcttattaaaatgtcaacatcttcatcttctagctgggacaacctcttagagtctctctctctcagcacagtatggaattggatacaagcaagttttttgggagagactagtgcacctcagcaaacaagtttgggactattagataatcttgctccagctgtgcaaatcatcttgaggatttctttcttgattttattgggaataggaatatatgccttatggaaacgaagtattcagtcaattcagaaaacattgttgtttgtaatcacactctacaaactttacaagaagggctcacatatttttgaggctttgctagccaacccagaaggaagtggtctccgaattcaagacaataataatcttttcctgtccttgggtctgcaagagaaaattttgaaaaaacttaagacagtggaaaacaaaatgaagaacctagaagggataatcgttgctcaaaaacctgccacgaagagggattgctcctctgagccctactgcagctgctctgactgccagagtcccttgtccacatcagggtttacttcccccatttgaaatgtgatggactccaatcttttccaggaaagcactgtttccctcatgtgtgcagtggtgtatcaataaagatagagaacgctattgaaattac

SEQ ID NO: 307498 - DNA, 565 bp, Homo sapiens
  misc_feature (44)..(44): n is a, c, g, or t
agcaccccactacgcccaaacaatcaaaaatacccacacttaantagagactctcgttctgtcaccaaggctggagcacaacatcagctcactgcaacctctgcctcccaggttcaagtgattctcctgcttcagcctcccaagtagctgggactacagaaaacattgttgtttgtaatcacactctacaaactttacaagaagggctcacatatttttgaggctttgctagccaacccagaaggaagtggtctccgaattcaagacaataataatcttttcctgtccttgggtctgcaagagaaaattttgaaaaaacttaagacagtggaaaacaaaatgaagaacctagaagggataatcgttgctcaaaaacctgccacgaagagggattgctcctctgagccctactgcagctgctctgactgccagagtcccttgtccacatcagggtttacttcccccatttgaaatgtgatggactccaatcttttccaggaaagcactgtttccctcatgtgtgcagtggtgtatcaataaagatagagaacgctattgaaattac

SEQ ID NO: 307499 - DNA, 1559 bp, Homo sapiens
gaagcttctgcacatgtagttcctagagctgctgcttattaaaatgtcaacatcttcatcttctagctgggacaacctcttagagtctctctctctcagcacagtatggaattggatacaagcaagttttttgggagagactagtgcacctcagcaaacaagtttgggactattagataatcttgctccagctgtgcaaatcatcttgaggatttctttcttgattttattgggaataggaatatatgccttatggaaacgaagtattcagtcaattcagaaaacattgttgtttgtaatcacactctacaaactttacaagaagggctcacatatttttgaggctttgctagccaacccagaaggaagtggtctccgaattcaagacaataataatcttttcctgtccttgggtctgcaagagaaaattttgaaaaaacttaagacagtggaaaacaaaatgaagaacctagaagggataatcgttgctcaaaaacctgccacgaagagggattgctcctctgagccctactgcagctgctctgactgccagagtcccttgtccacatcagggtttacttcccccatttgaaatgtgatggactccaatcttttccaggaaagcactgtttccctcatgtgtgcagtggtgtatcaataaagatagagaacgctattgaaattacaaaaaaaaaaaaaaaaaaaaaaaaaaaaaaaaaaaaaagggggggcggcgcgcccaaagattatccccccaaggggggccccaagtttatcgagtgctaaccccacgatttgctcgggtacacaagggggccccaaaagaggaggagccgaatataaagacgaagaacgcggggcagcaaggatataaaacaaacgctcggaagcgggaaaaaaagtcggcaaccgggggcaccattgggggcaaggggagaaccacataaaccacgagaggggggggaaccaaatgtggggcacaaacaacgctacccccacaagaagatcttaaacagcccccgaggggacaacataaaacacaccctcacaagcgataaacaggggtgtgcacacacaacaacgcgcgccaatagccgcacgcgcctaagcaaaaacagttggagcaccacagcaacaaagcaacaatctgaaggcagaaacatcttatccaccccgcggggaagccagcaggacaaaaacaatccccacacagagcagcccagaaagcgacaaacacaagccacctcacccaaacgaaaggaaagaagagaagaacagaagaagagagaaaggacaataacgatgccggacaggtgaaaaaaaggaaacagaaaacaacgagagagagagctagacagaggaacaaaggcggaaaagaagaagagaacggaaaaccaaaacaacaaacaggacagccaaagagacagaaacaacagagcgcgaaggaaacaacaagcaaacaaacagaagagaacacagcaagaaaacaagaaagcaggagaacagcagaaggacaaaaaaaaggaaggaaacacgcgaaaaaacagacgcagaacaaa

SEQ ID NO: 307500 - DNA, 2819 bp, Homo sapiens
agcccgcggagctgagcggcggcggcggcggcggcaggagcccgggaggcggaggcgggaggcggcggcggcgcgcggagacgcagcagcggcagcggcagcatgtcggccggcggagcgtcagtcccgccgcccccgaaccccgccgtgtccttcccgccgccccgggtcaccctgcccgccggccccgacatcctgcggacctactcgggcgccttcgtctgcctggagattctgttcgggggtcttgtctggattttggttgcctcctccaatgttcctctacctctactacaaggatgggtcatgtttgtgtccgtgacagcgtttttcttttcgctcctctttctgggcatgttcctctctggcatggtggctcaaattgatgctaactggaacttcctggattttgcctaccattttacagtatttgtcttctattttggagcctttttattggaagcagcagccacatccctgcatgatttgcattgcaatacaaccataaccgggcagccactcctgagtgataaccagtataacataaacgtagcagcctcaatttttgcctttatgacgacagcttgttatggttgcagtttgggtctggctttacgaagatggcgaccgtaacactccttagaaactggcagtcgtatgttagtttcacttgtctactttatatgtctgatcaatttggataccattttgtccagatgcaaaaacattccaaaagtaatgtgtttagtagagagagactctaagctcaagttctggtttatttcatggatggaatgttaattttattatgatattaaagaaatggccttttattttacatctctcccctttttccctttccccctttattttcctccttttctttctgaaagtttccttttatgtccataaaatacaaatatattgttcataaaaaattagtatcccttttgtttggttgctgagtcacctgaaccttaattttaattggtaattacagcccctaaaaaaaacacatttcaaataggcttcccactaaactctatattttagtgtaaaccaggaattggcacactttttttagaatgggccagatggtaaatatttatgcttcacggtccatacagtctctgtcacaactattcagttctgctagtatagcgtgaaagcagctatacacaatacagaaatgaatgagtgtggttatgttctaataaaacttatttataaaaacaaggggaggctgggtttagcctgtgggccatagtttgtcaaccactggtgtaaaaccttagttatatatgatctgcattttcttgaactgatcattgaaaacttataaacctaacagaaaagccacataatatttagtgtcattatgcaataatcacattgcctttgtgttaatagtcaaatacttacctttggagaatacttacctttggaggaatgtataaaatttctcaggcagagtcctggatataggaaaaagtaatttatgaagtaaacttcagttgcttaatcaaactaatgatagtctaacaactgagcaagatcctcatctgagagtgcttaaaatgggatccccagagaccattaaccaatactggaactggtatctagctactgatgtcttactttgagtttatttatgcttcagaatacagttgtttgccctgtgcatgaatatacccatatttgtgtgtggatatgtgaagcttttccaaatagagctctcagaagaattaagtttttacttctaattattttgcattactttgagttaaatttgaatagagtattaaatataaagttgtagattcttatgtgtttttgtattagcccagacatctgtaatgtttttgcactggtgacagacaaaatctgttttaaaatcatatccagcacaaaaactatttctggctgaatagcacagaaaagtattttaacctacctgtagagatcctcgtcatggaaaggtgccaaactgttttgaatggaaggacaagtaagagtgaggccacagttcccaccacacgagggcttttgtattgttctactttttcagccctttactttctggctgaagcatccccttggagtgccatgtataagttgggctattagagttcatggaacatagaacaaccatgaatgagtggcatgatccgtgcttaatgatcaagtgttacttatctaataatcctctagaaagaaccctgttagatcttggtttgtgataaaaatataaagacagaagacatgaggaaaaacaaaaggtttgaggaaatcaggcatatgactttatacttaacatcagatcttttctataatatcctactactttggttttcctagctccataccacacacctaaacctgtattatgaattacatattacaaagtcataaatgtgccatatggatatacagtacattctagttggaatcgtttactctgctagaatttaggtgtgagattttttgtttcccaggtatagcaggcttatgtttggtggcattaaattggtttctttaaaatgctttggtggcacttttgtaaacagattgcttctagattgttacaaaccaagcctaagacacatctgtgaatacttagatttgtagcttaatcacattctagacttgtgagttgaatgacaaagcagttgaacaaaaattatggcatttaagaatttaacatgtcttagctgtaaaaatgagaaagtgttggttggttttaaaatctggtaactccatgatgaaaagaaatttattttatacgtgttatgtctctaataaagtattcatttgataaa

SEQ ID NO: 307501 - DNA, 932 bp, Homo sapiens
agcccgcggagctgagcggcggcggcggcggcggcaggagcccgggaggcggaggcgggaggcggcggcggcgcgcggagacgcagcagcggcagcggcagcatgtcggccggcggagcgtcagtcccgccgcccccgaaccccgccgtgtccttcccgccgccccgggtcaccctgcccgccggccccgacatcctgcggacctactcgggcgccttcgtctgcctggagattctgttcgggggtcttgtctggattttggttgcctcctccaatgttcctctacctctactacaaggatgggtcatgtttgtgtccgtgacagcgtttttcttttcgctcctctttctgggcatgttcctctctggcatggtggctcaaattgatgctaactggaacttcctggattttgcctaccattttacagtatttgtcttctattttggagcctttttattggaagcagcagccacatccctgcatgatttgcattgcaatacaaccataaccgggcagccactcctgagtgataaccagtataacataaacgtagcagcctcaatttttgcctttatgacgacagcttgttatggttgcagtttgggtctggctttacgaagatggcgaccgtaacactccttagaaactggcagtcgtatgttagtttcacttgtctactttatatgtctgatcaatttggataccattttgtccagatgcaaaaacattccaaaagtaatgtgtttagtagagagagactctaagctcaagttctggtttatttcatggatggaatgttaattttattatgatattaaagaaatggccttttattttacatctctcccctttttccctttccccctttattttcctccttttctttctgaaagtttccttttatgtccataaaatacaaatatattgttcat

SEQ ID NO: 307502 - DNA, 598 bp, Homo sapiens
agcccgcggagctgagcggcggcggcggcggcggcaggagcccgggaggcggaggcgggaggcggcggcggcgcgcggagacgcagcagcggcagcggcagcatgtcggccggcggagcgtcagtcccgccgcccccgaaccccgccgtgtccttcccgccgccccgggtcaccctgcccgccggccccgacatcctgcggacctactcgggcgccttcgtctgcctggagattctgttcgggggtcttgtctggattttggttgcctcctccaatgttcctctacctctactacaaggatgggtcatgtttgtgtccgtgacagcgtttttcttttcgctcctctttctgggcatgttcctctctggcatggtggctcaaattgatgctaactggaacttcctggattttgcctaccattttacagtatttgtcttctattttggagcctttttattggaagcagcagccacatccctgcatgatttgcattgcaatacaaccataaccgggcagccactcctgagtgataaccagtataacataaacgtagcagcctcagtaagtattcatattcaatgagtaccattcaccagca

SEQ ID NO: 307503 - DNA, 2749 bp, Homo sapiens
cgagctcgggcctttatttaatagtatgtaagtgactgtggagataattaggatatctagatactgaaatgcaatgtacagactgtgagttctgtggtgacagaaaccaagtgtaacctgtttaccatttgattcccagcacctggcatagtgcctgaaatgtactgttcgggggtcttgtctggattttggttgcctcctccaatgttcctctacctctactacaaggatgggtcatgtttgtgtccgtgacagcgtttttcttttcgctcctctttctgggcatgttcctctctggcatggtggctcaaattgatgctaactggaacttcctggattttgcctaccattttacagtatttgtcttctattttggagcctttttattggaagcagcagccacatccctgcatgatttgcattgcaatacaaccataaccgggcagccactcctgagtgataaccagtataacataaacgtagcagcctcaatttttgcctttatgacgacagcttgttatggttgcagtttgggtctggctttacgaagatggcgaccgtaacactccttagaaactggcagtcgtatgttagtttcacttgtctactttatatgtctgatcaatttggataccattttgtccagatgcaaaaacattccaaaagtaatgtgtttagtagagagagactctaagctcaagttctggtttatttcatggatggaatgttaattttattatgatattaaagaaatggccttttattttacatctctcccctttttccctttccccctttattttcctccttttctttctgaaagtttccttttatgtccataaaatacaaatatattgttcataaaaaattagtatcccttttgtttggttgctgagtcacctgaaccttaattttaattggtaattacagcccctaaaaaaaacacatttcaaataggcttcccactaaactctatattttagtgtaaaccaggaattggcacactttttttagaatgggccagatggtaaatatttatgcttcacggtccatacagtctctgtcacaactattcagttctgctagtatagcgtgaaagcagctatacacaatacagaaatgaatgagtgtggttatgttctaataaaacttatttataaaaacaaggggaggctgggtttagcctgtgggccatagtttgtcaaccactggtgtaaaaccttagttatatatgatctgcattttcttgaactgatcattgaaaacttataaacctaacagaaaagccacataatatttagtgtcattatgcaataatcacattgcctttgtgttaatagtcaaatacttacctttggagaatacttacctttggaggaatgtataaaatttctcaggcagagtcctggatataggaaaaagtaatttatgaagtaaacttcagttgcttaatcaaactaatgatagtctaacaactgagcaagatcctcatctgagagtgcttaaaatgggatccccagagaccattaaccaatactggaactggtatctagctactgatgtcttactttgagtttatttatgcttcagaatacagttgtttgccctgtgcatgaatatacccatatttgtgtgtggatatgtgaagcttttccaaatagagctctcagaagaattaagtttttacttctaattattttgcattactttgagttaaatttgaatagagtattaaatataaagttgtagattcttatgtgtttttgtattagcccagacatctgtaatgtttttgcactggtgacagacaaaatctgttttaaaatcatatccagcacaaaaactatttctggctgaatagcacagaaaagtattttaacctacctgtagagatcctcgtcatggaaaggtgccaaactgttttgaatggaaggacaagtaagagtgaggccacagttcccaccacacgagggcttttgtattgttctactttttcagccctttactttctggctgaagcatccccttggagtgccatgtataagttgggctattagagttcatggaacatagaacaaccatgaatgagtggcatgatccgtgcttaatgatcaagtgttacttatctaataatcctctagaaagaaccctgttagatcttggtttgtgataaaaatataaagacagaagacatgaggaaaaacaaaaggtttgaggaaatcaggcatatgactttatacttaacatcagatcttttctataatatcctactactttggttttcctagctccataccacacacctaaacctgtattatgaattacatattacaaagtcataaatgtgccatatggatatacagtacattctagttggaatcgtttactctgctagaatttaggtgtgagattttttgtttcccaggtatagcaggcttatgtttggtggcattaaattggtttctttaaaatgctttggtggcacttttgtaaacagattgcttctagattgttacaaaccaagcctaagacacatctgtgaatacttagatttgtagcttaatcacattctagacttgtgagttgaatgacaaagcagttgaacaaaaattatggcatttaagaatttaacatgtcttagctgtaaaaatgagaaagtgttggttggttttaaaatctggtaactccatgatgaaaagaaatttattttatacgtgttatgtctctaataaagtattcatttgataaa

SEQ ID NO: 307504 - DNA, 1106 bp, Homo sapiens
aagctctccccaggtttgtactcgctaattattgagcatatacttattaggaaggtagataacttgagagattccagtagtatgtgatactatacaagtggtaggtattcttatgtgtttttgtattagcccagacatctgtaatgtttttgcactggtgacagacaaaatctgttttaaaatcatatccagcacaaaaactatttctggctgaatagcacagaaaagtattttaacctacctgtagagatcctcgtcatggaaaggtgccaaactgttttgaatggaaggacaagtaagagtgaggccacagttcccaccacacgagggcttttgtattgttctactttttcagccctttactttctggctgaagcatccccttggagtgccatgtataagttgggctattagagttcatggaacatagaacaaccatgaatgagtggcatgatccgtgcttaatgatcaagtgttacttatctaataatcctctagaaagaaccctgttagatcttggtttgtgataaaaatataaagacagaagacatgaggaaaaacaaaaggtttgaggaaatcaggcatatgactttatacttaacatcagatcttttctataatatcctactactttggttttcctagctccataccacacacctaaacctgtattatgaattacatattacaaagtcataaatgtgccatatggatatacagtacattctagttggaatcgtttactctgctagaatttaggtgtgagattttttgtttcccaggtatagcaggcttatgtttggtggcattaaattggtttctttaaaatgctttggtggcacttttgtaaacagattgcttctagattgttacaaaccaagcctaagacacatctgtgaatacttagatttgtagcttaatcacattctagacttgtgagttgaatgacaaagcagttgaacaaaaattatggcatttaagaatttaacatgtcttagctgtaaaaatgagaaagtgttggttggttttaaaatctggtaactccatgatgaaaagaaatttattttatacgtgttatgtctctaataaagtattcatttgataaa

SEQ ID NO: 307505 - DNA, 2765 bp, Homo sapiens
agcccgcggagctgagcggcggcggcggcggcggcaggagcccgggaggcggaggcgggaggcggcggcggcgcgcggagacgcagcagcggcagcggcagcatgtcggccggcggagcgtcagtcccgccgcccccgaaccccgccgtgtccttcccgccgccccgggtcaccctgcccgccggccccgacatcctgcggacctactcgggcgccttcgtctgcctggagattctgttcgggggtcttgtctggattttggttgcctcctccaatgttcctctacctctactacaaggatgggtcatgtttgtgtccgtgacagcgtttttcttttcgctcctctttctgggcatgttcctctctggcatggtggctcaaattgatgctaactggaacttcctggattttgcctaccattttacagtatttgtcttctattttggagcctttttattggaagcagcagccacatccctgcatgatttgcattgcaatacaaccataaccgggcagccactcctgagtgataaccagtataacataaacgtagcagcctcaatttttgcctttatgacgacagcttgttatggttgcagtttgggtctggctttacgaagatggcgaccgtaacactccttagaaactggcagtcgtatgttagtttcacttgtctactttatatgtctgatcaatttggataccattttgtccagatgcaaaaacattccaaaagtaatgtgtttagtagagagagactctaagctcaagttctggtttatttcatggatggaatgttaattttattatgatattaaagaaatggccttttattttacatctctcccctttttccctttccccctttattttcctccttttctttctgaaagtttccttttatgtccataaaatacaaatatattgttcataaaaaattagtatcccttttgtttggttgctgagtcacctgaaccttaattttaattggtaattacagcccctaaaaaaaacacatttcaaataggcttcccactaaactctatattttagtgtaaaccaggaattggcacactttttttagaatgggccagatggtaaatatttatgcttcacggtccatacagtctctgtcacaactattcagttctgctagtatagcgtgaaagcagctatacacaatacagaaatgaatgagtgtggttatgttctaataaaacttatttataaaaacaaggggaggctgggtttagcctgtgggccatagtttgtcaaccactggtgtaaaaccttagttatatatgatctgcattttcttgaactgatcattgaaaacttataaacctaacagaaaagccacataatatttagtgtcattatgcaataatcacattgcctttgtgttaatagtcaaatacttacctttggagaatacttacctttggaggaatgtataaaatttctcaggcagagtcctggatataggaaaaagtaatttatgaagtaaacttcagttgcttaatcaaactaatgatagtctaacaactgagcaagatcctcatctgagagtgcttaaaatgggatccccagagaccattaaccaatactggaactggtatctagctactgatgtcttactttgagtttatttatgcttcagaatacagttgtttgccctgtgcatgaatatacccatatttgtgtgtggatatgtgaagcttttccaaatagagctctcagaagaattaagtttttacttctaattattttgcattactttgagttaaatttgaatagagtattaaatataaagttgtagattcttatgtgtttttgtattagcccagacatctgtaatgtttttgcactggtgacagacaaaatctgttttaaaatcatatccagcacaaaaactatttctggctgaatagcacagaaaagtattttaacctacctgtagagatcctcgtcatggaaaggtgccaaactgttttgaatggaaggacaagtaagagtgaggccacagttcccaccacacgagggcttttgtattgttctactttttcagccctttactttctggctgaagcatccccttggagtgccatgtataagttgggctattagagttcatggaacatagaacaaccatgaatgagtggcatgatccgtgcttaatgatcaagtgttacttatctaataatcctctagaaagaaccctgttagatcttggtttgtgataaaaatataaagacagaagacatgaggaaaaacaaaaggtttgaggaaatcaggcatatgactttatacttaacatcagatcttttctataatatcctactactttggttttcctagctccataccacacacctaaacctgtattatgaattacatattacaaagtcataaatgtgccatatggatatacagtacattctagttggaatcgtttactctgctagaatttaggtgtgagattttttgtttcccaggtatagcaggcttatgtttggtggcattaaattggtttctttaaacctaagacacatctgtgaatacttagatttgtagcttaatcacattctagacttgtgagttgaatgacaaagcagttgaacaaaaattatggcatttaagaatttaacatgtcttagctgtaaaaatgagaaagtgttggttggttttaaaatctggtaactccatgatgaaaagaaatttattttatacgtgttatgtctctaataaagtattcatttgataaa

SEQ ID NO: 307506 - DNA, 1095 bp, Homo sapiens
tatttttagtagagacggggtttcaccatgttggccaggctggtctcgaactcctaacgtcaagtgatccacccgcctcagcctcccaaactgttggattacaggcgtgagctgccacgcccaaccacttttgttgttttagaacaaaaggtatcattcatcatgtagccgggcagatatctcaatatccaaagctgacattcgtgcaggtaccatagagacaagcgacatagcttattttgggctgcctcgtatgtgccagatttgtagaaagctgctttgtgcagggagatcccaggtgcactcaacacgttctccatgtatataagacctcccgaaagccttgggtggtttatctgttaccactttgaaaggtgggttaggacttcttcagcctgatctggccttgtgtcccaccagccacaggacacactgtgccttttccctaagggctgtcctttggagtttgccagaggttctgaaacaagaacaggatttctcatcatgtatgctgtatttcatcaactctcaggagccatgaaagctgcacagttactttatataccacgaggcaatcaaacggtacagggccaccacttcgaatttttcttacgctcttgttgaaagagcttttctaaataagaattcgatttttgtacacacacgtaaaaggaaaataggaccaagatgagttggttatgaccatgtcagttttgtcaccgtggccacctggccagtggtgactgagacatcactgaaattgcctcctaatttccaagacgttaaaggtgtcttagaatcgattagacacagcatttaccttacacattgttaaattttcagctttacctttaaatatcattttggggagattatttatcccaggcctgcatcccaagtcatttaaatttttacaaaggacactaggactttctgaagacccagcctatgcctgagacccatggggtcttggaggcggaggatataacactgaagaccagcgacaggctaccctctgagtgtggtgtgtgcacaagcctttcagggggcacattcacaagtacctgttgtgtccccttcagatgcaaaaaaaaa

SEQ ID NO: 307507 - DNA, 5037 bp, Homo sapiens
caggactggagggcttgaggaatgtggtggtccctctcttcgttgtttctgcccactgaggttgtgctttctcagggatatgcactctgcacttccattcctgcagtgaaattaactcgagcttggcagctcgagaggagaatgtggccactttccgaggctcagagtatctgtgctacgacctgtctcagaacccgatccagagcagcagtgatgaaatcaccctctcctttaagacctggcagcgtaacggcctcatcctgcacacgggcaagtcggctgactatgtcaacctggctctgaaggatggtgcggtctccttggtcattaacctggggtccggggcctttgaggccattgtggagccagtgaatggaaaattcaacgacaacgcctggcatgatgtcaaagtgacacgcaacctccggcaggtgacaatctctgtggatggcattcttaccacgacgggctacactcaagaggactataccatgctgggctcggacgacttcttctatgtaggaggaagcccaagtaccgctgacttgcctggctcccctgtcagcaacaacttcatgggctgccttaaagaggttgtttataagaataatgacatccgtctggagctgtctcgcctggcccggattgcggacaccaagatgaaaatctatggcgaagttgtgtttaagtgtgagaatgtggccacactggaccccatcaactttgagaccccagaggcttacatcagcttgcccaagtggaacactaaacgtatgggctccatctcctttgacttccgcaccacagagcccaatggcctgatcctcttcactcatggaaagccccaagagaggaaggatgctcggagccagaagaatacaaaagtagacttctttgccgtggaactcctcgatggcaacctgtacttgctgcttgacatgggctctggcaccatcaaagtgaaagccactcagaagaaagccaatgatggggaatggtaccatgtggacattcagcgagatggcagatcaggtactatatcagtgaacagcaggcgcacgccattcaccgccagtggggagagcgagatcctggacctggaaggagacatgtacctgggagggctgccggagaaccgtgctggccttattctccccaccgagctgtggactgccatgctcaactatggctacgtgggctgcatccgcgacctattcattgatgggcgcagcaagaacattcgacagctggcagagatgcagaatgctgcgggtgtcaagtcctcctgttcacggatgagtgccaagcagtgtgacagctacccctgcaagaataatgctgtgtgcaaggacggctggaaccgcttcatctgcgactgcaccggcaccggatactggggaagaacctgcgaaagggaggcatccatcctgagctatgatggtagcatgtacatgaagatcatcatgcccatggtcatgcatactgaggcagaggatgtgtccttccgcttcatgtcccagcgagcttatgggctgctggtggctacgacctccagggactctgccgacaccctgcgtctggagctggatggggggcgtgtcaagctcatggttaacttagactgtatcaggataaactgtaactccagcaaaggaccagagaccttgtatgcagggcagaagctcaatgacaacgagtggcacaccgttcgggtggtgcggagaggaaaaagccttaagttaaccgtggatgatgatgtggctgagggtacaatggtgggagaccatacccgtttggagttccacaacattgaaacgggaatcatgactgagaaacgctacatctccgttgtcccctccagctttattggccatctgcagagcctcatgtttaatggccttctctacattgacttgtgcaaaaatggtgacattgattattgtgagctgaaggctcgttttggactgaggaacatcatcgctgaccctgtcacctttaagaccaagagcagctacctgagccttgccactcttcaggcttacacctccatgcacctcttcttccagttcaagaccacctcaccagatggcttcattctcttcaatagtggtgatggcaatgacttcattgcagtcgagcttgtcaaggggtatatacactacgtttttgacctcggaaacggtcccaatgtgatcaaaggcaacagtgaccgccccctgaatgacaaccagtggcacaatgtcgtcatcactcgggacaatagtaacactcatagcctgaaagtggacaccaaagtggtcactcaggttatcaatggtgccaaaaatctggatttgaaaggtgatctctatatggctggtctggcccaaggcatgtacagcaacctcccaaagctcgtggcctctcgagatggctttcagggctgtctagcatcagtggacttgaatggacgcctgccagacctcatcaatgatgctcttcatcggagcggacagatcaagcgtggctgtgaaggacccagtaccacctgccaggaagattcatgtgccaaccagggggtctgcatgcaacaatgggagggcttcacctgtgattgttctatgacctcttattctggaaaccagtgcaatgatcctggcgctacgtacatctttgggaaaagtggtgggcttatcctctacacctggccagccaatgacaggcccagcacgcggtctgaccgccttgccgtgggcttcagcaccactgtgaaggatggcatcttggtccgcatcgacagtgctccaggacttggtgacttcctccagcttcacatagaacaggggaaaattggagttgtcttcaacattggcacagttgacatctccatcaaagaggagagaacccctgtaaatgacggcaaataccatgtggtacgcttcaccaggaacggcggcaacgccaccctgcaggtggacaactggccagtgaatgaacattatcctacaggccggcagttaaccatcttcaacactcaggcgcaaatagccattggtggaaaggacaaaggacgcctcttccaaggccaactctctgggctctattatgatggtttgaaagtactgaacatggcggctgagaacaaccccaatattaaaatcaatggaagtgttcggctggttggagaagtcccatcaattttgggaacaacacagacgacctccatgccaccagaaatgtctactactgtcatggaaaccactactacaatggcgactaccacaacccgtaagaatcgctctacagccagcattcagccaacatcagatgatcttgtttcatctgctgaatgttcaagtgatgatgaagactttgttgaatgtgagccgagtacagcaaaccccacggagccgggaatcagacgggttccgggggcctcagaggtgatccgggagtcgagcagcacaacagggatggtcgtcggcattgtggctgctgccgccctctgcatcttgatcctcctgtacgccatgtacaagtacaggaacagggacgaggggtcctatcaagtggacgagacgcggaactacatcagcaactccgcccagagcaacggcacgctcatgaaggagaagcagcagagctcgaagagcggccacaagaaacagaaaaacaaggacagggagtattacgtgtaaacatgcgaacactgctcacacgcgagttttcacagttatttctatccacgcctatgaatctttggacggtgagatctcacagatgtcagaactgctggaactatgaaatggggtatataaccacgactctggtggggaaaaccgttttttaaaggacacacacacacacagcgatgcatctctctctaaagctcagccacggctgcggcaaggtcccagcggtcgctgggagacagaaggttttgtgccctgctgtatcataaagcacacacttagcgctctggagccggacggtggctccaccacttccgcaggcctggaaacttccttctccggaggaccttttactaaaaggtagaagacttcatggcttacttgttccataactccaagtgagtctgtaatgtttgtgaagcttgactgtaaccatgttttttctgtttaattatgtaaaaaacaaaactacaacaacaaaaaaagaaaaaagttaaaaaagaaaaaaacaccaaaaaacaaaaacaaacaaaaaaaaaaacccacaacccttatctggttctgaccagtgtgcgtgtaactttatgatctgaggggaaaaatggcttttgggtttttgtttatttttttgataatgactggacatcagaagaggaaaaaaactcaaaacaaaagcgagagagactattgccatatgaactcaaaagctatcatggtgttcactctacatatcaggttatggtgtctctagaatctgttgtttgtttcctataagatgctttgctgaacacatagcaaaattcatgtgacggatgataaattgattcgaaaagctggtcccccaggatctaatttcagaatttaccacccaaacccggaacagatgggtttagggctggtgttatcagagctattggctttacgtaacaatattgttcctgtccattcacccagccaaattgtgttaaagaggaaagccccacaaactaaaacagcctttcctagggaagaggaaggggaggtgggctggatctgtgactgattgaaatgcatgcaaataaaaaagacaatattaaagtctgttatcaaaccagacagtaggggagttcaactcgtgatggaaccacaaaaggtcacacaagccaaccatgtcatgccagagtacaaaacacatagttctttccccgccccgaatgtgacaatggttttcatagtggtttaattttgtagcctgacatttatggataactctgtccttccatttgctcacttctctcttcacccatcttttttaaaaacaaataaatgaataaagctgctgtgacacacacacaaaggaatttaatagtataatatatatataaat

SEQ ID NO: 307508 - DNA, 2854 bp, Homo sapiens
ggaccgggatttctcgttttaccatttggaagcgtacaattatcagtgtgcctgtaggataatgttcattcactggccagttgtccgcctgcagagatggcgttgccgccgttccaaatggtaaaacagaaaatccccttcaaatataatcggcctgtagaggagtggctgcaggaaaaaggccggcagttaaccatcttcaacactcaggcgcaaatagccattggtggaaaggacaaaggacgcctcttccaaggccaactctctgggctctattatgatggtttgaaagtactgaacatggcggctgagaacaaccccaatattaaaatcaatggaagtgttcggctggttggagaagtcccatcaattttgggaacaacacagacgacctccatgccaccagaaatgtctactactgtcatggaaaccactactacaatggcgactaccacaacccgtaagaatcgctctacagccagcattcagccaacatcagatgatcttgtttcatctgctgaatgttcaagtgatgatgaagactttgttgaatgtgagccgagtacaggaggtgaattagttatccctcttcttgtagaagaccctttagctacccctcctattgctactcgtgcaccttccattacactcccccctacctttcgccccctcctcaccattattgagaccaccaaagattccctgtccatgacctctgaggcggggttaccttgcttgtcggaccaaggcagcgatggttgtgatgatgatggcttggtgatatctgggtatggctcaggggaaacctttgactctaacctgccccctactgatgatgaagatttttacaccaccttctccttggtaacagataagagtctttccacttcaatcttcgaaggtggctacaaagcacatgcgcccaagtgggaatccaaggactttagacctaacaaagtctccgaaactagtaggactactaccacatctttatcccctgagctgatccgcttcacagcttcctcctcgtctgggatggtgcccaaattgccagctggcaaaatgaataaccgtgatctcaaaccccagcctgatatagtcttgcttccgttgcccactgcctatgagctagacagcaccaaactgaagagcccactaattacttcccccatgttccgtaatgtgcccacagcaaaccccacggagccgggaatcagacgggttccgggggcctcagaggtgatccgggagtcgagcagcacaacagggatggtcgtcggcattgtggctgctgccgccctctgcatcttgatcctcctgtacgccatgtacaagtacaggaacagggacgaggggtcctatcaagtggacgagacgcggaactacatcagcaactccgcccagagcaacggcacgctcatgaaggagaagcagcagagctcgaagagcggccacaagaaacagaaaaacaaggacagggagtattacgtgtaaacatgcgaacactgctcacacgcgagttttcacagttatttctatccacgcctatgaatctttggacggtgagatctcacagatgtcagaactgctggaactatgaaatggggtatataaccacgactctggtggggaaaaccgttttttaaaggacacacacacacacagcgatgcatctctctctaaagctcagccacggctgcggcaaggtcccagcggtcgctgggagacagaaggttttgtgccctgctgtatcataaagcacacacttagcgctctggagccggacggtggctccaccacttccgcaggcctggaaacttccttctccggaggaccttttactaaaaggtagaagacttcatggcttacttgttccataactccaagtgagtctgtaatgtttgtgaagcttgactgtaaccatgttttttctgtttaattatgtaaaaaacaaaactacaacaacaaaaaaagaaaaaagttaaaaaagaaaaaaacaccaaaaaacaaaaacaaacaaaaaaaaaaacccacaacccttatctggttctgaccagtgtgcgtgtaactttatgatctgaggggaaaaatggcttttgggtttttgtttatttttttgataatgactggacatcagaagaggaaaaaaactcaaaacaaaagcgagagagactattgccatatgaactcaaaagctatcatggtgttcactctacatatcaggttatggtgtctctagaatctgttgtttgtttcctataagatgctttgctgaacacatagcaaaattcatgtgacggatgataaattgattcgaaaagctggtcccccaggatctaatttcagaatttaccacccaaacccggaacagatgggtttagggctggtgttatcagagctattggctttacgtaacaatattgttcctgtccattcacccagccaaattgtgttaaagaggaaagccccacaaactaaaacagcctttcctagggaagaggaaggggaggtgggctggatctgtgactgattgaaatgcatgcaaataaaaaagacaatattaaagtctgttatcaaaccagacagtaggggagttcaactcgtgatggaaccacaaaaggtcacacaagccaaccatgtcatgccagagtacaaaacacatagttctttccccgccccgaatgtgacaatggttttcatagtggtttaattttgtagcctgacatttatggataactctgtccttccatttgctcacttctctcttcacccatcttttttaaaaacaaataaatgaataaagctgctgtgacacacacacaaaggaatttaatagtataatatatatataaat

SEQ ID NO: 307509 - DNA, 2565 bp, Homo sapiens
caaaccccccaaagtaaaaatttgttaaagtgcagattttttttttctttttatgttatgtggtgtggatgtatgtgttgttgcctccctgtatcatcctctgttgtaaattattatatttgaaaaattagacattttgctcaaaagtttttaagaaatgacaacaaaaaaagcaagttacaagaatgtggcaattctatttgtccaagagcattcttacacaactttcttttgtaaatttttctttcatgccaaaaaacatgcgggcaatttgttgatgaggtgaattagttatccctcttcttgtagaagaccctttagctacccctcctattgctactcgtgcaccttccattacactcccccctacctttcgccccctcctcaccattattgagaccaccaaagattccctgtccatgacctctgaggcggggttaccttgcttgtcggaccaaggcagcgatggttgtgatgatgatggcttggtgatatctgggtatggctcaggggaaacctttgactctaacctgccccctactgatgatgaagatttttacaccaccttctccttggtaacagataagagtctttccacttcaatcttcgaaggtggctacaaagcacatgcgcccaagtgggaatccaaggactttagacctaacaaagtctccgaaactagtaggactactaccacatctttatcccctgagctgatccgcttcacagcttcctcctcgtctgggatggtgcccaaattgccagctggcaaaatgaataaccgtgatctcaaaccccagcctgatatagtcttgcttccgttgcccactgcctatgagctagacagcaccaaactgaagagcccactaattacttcccccatgttccgtaatgtgcccacagcaaaccccacggagccgggaatcagacgggttccgggggcctcagaggtgatccgggagtcgagcagcacaacagggatggtcgtcggcattgtggctgctgccgccctctgcatcttgatcctcctgtacgccatgtacaagtacaggaacagggacgaggggtcctatcaagtggacgagacgcggaactacatcagcaactccgcccagagcaacggcacgctcatgaaggagaagcagcagagctcgaagagcggccacaagaaacagaaaaacaaggacagggagtattacgtgtaaacatgcgaacactgctcacacgcgagttttcacagttatttctatccacgcctatgaatctttggacggtgagatctcacagatgtcagaactgctggaactatgaaatggggtatataaccacgactctggtggggaaaaccgttttttaaaggacacacacacacacagcgatgcatctctctctaaagctcagccacggctgcggcaaggtcccagcggtcgctgggagacagaaggttttgtgccctgctgtatcataaagcacacacttagcgctctggagccggacggtggctccaccacttccgcaggcctggaaacttccttctccggaggaccttttactaaaaggtagaagacttcatggcttacttgttccataactccaagtgagtctgtaatgtttgtgaagcttgactgtaaccatgttttttctgtttaattatgtaaaaaacaaaactacaacaacaaaaaaagaaaaaagttaaaaaagaaaaaaacaccaaaaaacaaaaacaaacaaaaaaaaaaacccacaacccttatctggttctgaccagtgtgcgtgtaactttatgatctgaggggaaaaatggcttttgggtttttgtttatttttttgataatgactggacatcagaagaggaaaaaaactcaaaacaaaagcgagagagactattgccatatgaactcaaaagctatcatggtgttcactctacatatcaggttatggtgtctctagaatctgttgtttgtttcctataagatgctttgctgaacacatagcaaaattcatgtgacggatgataaattgattcgaaaagctggtcccccaggatctaatttcagaatttaccacccaaacccggaacagatgggtttagggctggtgttatcagagctattggctttacgtaacaatattgttcctgtccattcacccagccaaattgtgttaaagaggaaagccccacaaactaaaacagcctttcctagggaagaggaaggggaggtgggctggatctgtgactgattgaaatgcatgcaaataaaaaagacaatattaaagtctgttatcaaaccagacagtaggggagttcaactcgtgatggaaccacaaaaggtcacacaagccaaccatgtcatgccagagtacaaaacacatagttctttccccgccccgaatgtgacaatggttttcatagtggtttaattttgtagcctgacatttatggataactctgtccttccatttgctcacttctctcttcacccatcttttttaaaaacaaataaatgaataaagctgctgtgacacacacacaaaggaatttaatagtataatatatatataaat

SEQ ID NO: 307510 - DNA, 381 bp, Homo sapiens
gatctctcttgatttttatttgcaagcttatgttgtataactttctgacaacacaagaaattggccaggagacaaaagaaattctgtagaaatatagaggcttttttggagcttgtgtgcacatcagatgtttcttcagatacctttttggttcctgtgtctcattgtttctcatgttgttttgggctatgtcctgaagcctctttttgggtcatttttccaggtgcccagtgagtgatggatggatactgtttgcaagattgattcacatggcacttttgtttggcttttgacaggttgtttataagaataatgacatccgtctggagctgtctcgcctggcccggattgcggacaccaagatgaaaatctatggcgaag

SEQ ID NO: 307511 - DNA, 1977 bp, Homo sapiens
  misc_feature (9)..(9): n is a, c, g, or t
agcggaggngtgcggcgcgctcctggcgaggacggagcgagcagatctcgcgtgcgctcgccgcccggcgcagcccagcccggcccccgcctggcgccgcgagccgaggtgtctcccgcgcccgcgcccgtgtcgccgccgtgcccgcgagcgggagccggagtcgccgccgcccgagcgcagccgagcgcacgccgagcccgtccgccgccgccatggccaccacggtgacctgcacccgcttcaccgacgagtaccagctctacgaggatattggcaagggggctttctctgtggtccgacgctgtgtcaagctctgcaccggccatgagtatgcagccaagatcatcaacaccaagaagctgtcagccagagatcaccagaagctggagagagaggctcggatctgccgccttctgaagcattccaacatcgtgcgtctccacgacagcatctccgaggagggcttccactacctggtcttcgatctggtcactggtggggagctctttgaagacattgtggcgagagagtactacagcgaggctgatgccagtcactgtatccagcagatcctggaggccgttctccattgtcaccaaatgggggtcgtccacagagacctcaagccggagaacctgcttctggccagcaagtgcaaaggggctgcagtgaagctggcagacttcggcctagctatcgaggtgcagggggaccagcaggcatggtttggtttcgctggcacaccaggctacctgtcccctgaggtccttcgcaaagaggcgtatggcaagcctgtggacatctgggcatgtggggtgatcctgtacatcctgctcgtgggctacccacccttctgggacgaggaccagcacaagctgtaccagcagatcaaggctggtgcctatgacttcccgtcccctgagtgggacaccgtcactcctgaagccaaaaacctcatcaaccagatgctgaccatcaaccctgccaagcgcatcacagcccatgaggccctgaagcacccgtgggtctgccaacgctccacggtagcatccatgatgcacagacaggagactgtggagtgtctgaaaaagttcaatgccaggagaaagctcaagggagccatcctcaccaccatgctggccacacggaatttctcagccaagagtttactcaacaagaaagcagatggagtcaaggagtcttctgacagtgccaataccaccatagaggatgaagacgctaaagcccggaagcaggagatcattaagaccacggagcagctcatcgaggccgtcaacaacggtgactttgaggcctacgcgaaaatctgtgacccagggctgacctcgtttgagcctgaagcactgggcaacctggttgaagggatggacttccacagattctacttcgagaacctgctggccaagaacagcaagccgatccacacgaccatcctgaacccacacgtgcacgtcattggagaggatgccgcctgcatcgcttacatccggctcacgcagtacattgacgggcagggccggccccgcaccagccagtctgaggagacccgcgtgtggcaccgccgcgacggcaagtggcagaacgtgcacttccactgctcgggcgcgcctgtggccccgctgcagtgaagagctgcgccctggtttcgccggacagagttggtgtttggagcccgactgccctcgggcacacggcctgcctgtcgcatgtttgtgtctgcctcgttccctcccctggtgcctgtgtctgcagaaaaacaagaccagatgtgatttgttaaaaaaaaacaaaaaaaaaaaaaacaggcttccacggacttcacgtcattattggctcaactttcctcactatctgcttcatccgccaactaatatttcaccttacatccaaacatcactttggcttcgaagccgccgcctgatactggcattttgtagatgtggtttgactatt

SEQ ID NO: 307512 - DNA, 4050 bp, Homo sapiens
  misc_feature (9)..(9): n is a, c, g, or t
agcggaggngtgcggcgcgctcctggcgaggacggagcgagcagatctcgcgtgcgctcgccgcccggcgcagcccagcccggcccccgcctggcgccgcgagccgaggtgtctcccgcgcccgcgcccgtgtcgccgccgtgcccgcgagcgggagccggagtcgccgccgcccgagcgcagccgagcgcacgccgagcccgtccgccgccgccatggccaccacggtgacctgcacccgcttcaccgacgagtaccagctctacgaggatattggcaagggggctttctctgtggtccgacgctgtgtcaagctctgcaccggccatgagtatgcagccaagatcatcaacaccaagaagctgtcagccagagatcaccagaagctggagagagaggctcggatctgccgccttctgaagcattccaacatcgtgcgtctccacgacagcatctccgaggagggcttccactacctggtcttcgatctggtcactggtggggagctctttgaagacattgtggcgagagagtactacagcgaggctgatgccagtcactgtatccagcagatcctggaggccgttctccattgtcaccaaatgggggtcgtccacagagacctcaagccggagaacctgcttctggccagcaagtgcaaaggggctgcagtgaagctggcagacttcggcctagctatcgaggtgcagggggaccagcaggcatggtttggtttcgctggcacaccaggctacctgtcccctgaggtccttcgcaaagaggcgtatggcaagcctgtggacatctgggcatgtggggtgatcctgtacatcctgctcgtgggctacccacccttctgggacgaggaccagcacaagctgtaccagcagatcaaggctggtgcctatgacttcccgtcccctgagtgggacaccgtcactcctgaagccaaaaacctcatcaaccagatgctgaccatcaaccctgccaagcgcatcacagcccatgaggccctgaagcacccgtgggtctgccaacgctccacggtagcatccatgatgcacagacaggagactgtggagtgtctgaaaaagttcaatgccaggagaaagctcaagggagccatcctcaccaccatgctggccacacggaatttctcagtgggcagacagaccaccgctccggccacaatgtccaccgcggcctccggcaccaccatggggctggtggaacaagccaagagtttactcaacaagaaagcagatggagtcaagccccagacgaatagcaccaaaaacagtgcagccgccaccagccccaaagggacgcttcctcctgccgccctggagcctcaaaccaccgtcatccataacccagtggacgggattaaggagtcttctgacagtgccaataccaccatagaggatgaagacgctaaagcccggaagcaggagatcattaagaccacggagcagctcatcgaggccgtcaacaacggtgactttgaggcctacgcgaaaatctgtgacccagggctgacctcgtttgagcctgaagcactgggcaacctggttgaagggatggacttccacagattctacttcgagaacctgctggccaagaacagcaagccgatccacacgaccatcctgaacccacacgtgcacgtcattggagaggatgccgcctgcatcgcttacatccggctcacgcagtacattgacgggcagggccggccccgcaccagccagtctgaggagacccgcgtgtggcaccgccgcgacggcaagtggcagaacgtgcacttccactgctcgggcgcgcctgtggccccgctgcagtgaagagctgcgccctggtttcgccggacagagttggtgtttggagcccgactgccctcgggcacacggcctgcctgtcgcatgtttgtgtctgcctcgttccctcccctggtgcctgtgtctgcagaaaaacaagaccagatgtgatttgttaaaaaaaaacaaaaaaaaaaaaaaaaaaaacaagatgacgacgacaaccacaaaaaaaattgacatcagatgaaatgaaaaaaaaaaaaaaacaaaaaaaactaaaggaaggaaaaagctgtaaaaatcactggcattcgtggggccactccccacccaagctccacgtgtgtccgtctgtgctcctggcctctgggggaccagctgggacatgaacttgtctgccaggcccccgtcgcgtgctgaacggtgttagtttgtaggtaacgcacacaccccacacctaaggtgtctgcatcctcctgccaacgcatgggctccacgtggtgtgctcgctggctgtcgtgactgtcagctgtctcttgggaggggctgtgggggcccgctgggctggcctcctttcccgctagttgtgcctgagagttgctgttgttcctgctttcccttcccttcctttcatcccctgaagggctaggtgtgggttttccgtgcccggtatccccacacacccagcacggacaacccttcggcagagcccaggccggcccctcaccccctggagtattgaaactggagtcccgtccccaaggccttcagagatgcccctacacacccagggctccagctctggtccttctgggggagtaaagtgcaaagaggggcacagcttagttttgggcctctcgccgagcaagagacagcactgctggctacagctccaacacagccagctgtggcaagaggactctgcctgggctggcccccctcctgtgtgaggtgtctgtcccttctctgctggccagcagcagatgcactggcagctcccaaccctgtttccgcccctcggccctcccccagcctgttcggcttctctgcagcccgcaagggggagcagacttttgacaaaggactgcgggcctcgctcaagtccctgagcccccagctgaagctgggaggggaggccaggctttgtgtctgggcatattcgtctgctgatggggtttggggaagcctggggcttggggtttggtcgggtggtgcagctagtggcagagcgggatcagaggtggtggctgcccagcttctgggctgagacaagggtctgtgcaggggtttactgaagtgggagtgcctttggaatctgggccgggagcagaagggagcaaaagctacagtgggagccagcctagggcacatgggaggcgtgagggcagtgctgcccgtgcagtgtcaggtgtgccagtgccttggcgggctgcagtgcgtgtgagggcaccttctaggtgggccagggatgcagctatggagataaggcgggctggggacagaaacaggtgggcacagggcccaggacaccagcggatggagggcagggtctagccctgtgctcctgagcgtcggctgcctgggttcgaggcggtgggtccccggccccttgtgatggtgtgtaccatgggggagctcggggacagggcaagcccgagcatggtggggctgcagggtgggtctgaagccaggttgggtgggggtggtcacaagccctgactgcagagggtcaggggctcctgccccagtgcctgcccactttcaattcacattgttttcaacaaggattttctttatcttcccctacaaatcaagccaagggaggggcacagaatggggaacaggacacaggatcctaaactccaaggggactgtccaccgatgaacactcagagtggacaccatcttccgtccacgctgtgcccaggacagctgtccccatccatgaacacagggtaaacatctgccgggctccgcaccagtggctccctgggccatgggacagcggcagggctcaccacggacagcacgtggcccagcagccggccaccctggcgtcctggggcctcctcccctcctctccctctcaccttgtcacctccacggagctgcctgtctgggataatttggggattttttttctgggggataattcttttgcatgacccctaaagagcaagccacaccggtctgctagctaggtgtccgcggtgtggtggtggcggccgct

SEQ ID NO: 307513 - DNA, 3975 bp, Homo sapiens
  misc_feature (9)..(9): n is a, c, g, or t
agcggaggngtgcggcgcgctcctggcgaggacggagcgagcagatctcgcgtgcgctcgccgcccggcgcagcccagcccggcccccgcctggcgccgcgagccgaggtgtctcccgcgcccgcgcccgtgtcgccgccgtgcccgcgagcgggagccggagtcgccgccgcccgagcgcagccgagcgcacgccgagcccgtccgccgccgccatggccaccacggtgacctgcacccgcttcaccgacgagtaccagctctacgaggatattggcaagggggctttctctgtggtccgacgctgtgtcaagctctgcaccggccatgagtatgcagccaagatcatcaacaccaagaagctgtcagccagagatcaccagaagctggagagagaggctcggatctgccgccttctgaagcattccaacatcgtgcgtctccacgacagcatctccgaggagggcttccactacctggtcttcgatctggtcactggtggggagctctttgaagacattgtggcgagagagtactacagcgaggctgatgccagtcactgtatccagcagatcctggaggccgttctccattgtcaccaaatgggggtcgtccacagagacctcaagccggagaacctgcttctggccagcaagtgcaaaggggctgcagtgaagctggcagacttcggcctagctatcgaggtgcagggggaccagcaggcatggtttggtttcgctggcacaccaggctacctgtcccctgaggtccttcgcaaagaggcgtatggcaagcctgtggacatctgggcatgtggggtgatcctgtacatcctgctcgtgggctacccacccttctgggacgaggaccagcacaagctgtaccagcagatcaaggctggtgcctatgacttcccgtcccctgagtgggacaccgtcactcctgaagccaaaaacctcatcaaccagatgctgaccatcaaccctgccaagcgcatcacagcccatgaggccctgaagcacccgtgggtctgccaacgctccacggtagcatccatgatgcacagacaggagactgtggagtgtctgaaaaagttcaatgccaggagaaagctcaagggagccatcctcaccaccatgctggccacacggaatttctcagccaagagtttactcaacaagaaagcagatggagtcaagccccagacgaatagcaccaaaaacagtgcagccgccaccagccccaaagggacgcttcctcctgccgccctggagcctcaaaccaccgtcatccataacccagtggacgggattaaggagtcttctgacagtgccaataccaccatagaggatgaagacgctaaagcccggaagcaggagatcattaagaccacggagcagctcatcgaggccgtcaacaacggtgactttgaggcctacgcgaaaatctgtgacccagggctgacctcgtttgagcctgaagcactgggcaacctggttgaagggatggacttccacagattctacttcgagaacctgctggccaagaacagcaagccgatccacacgaccatcctgaacccacacgtgcacgtcattggagaggatgccgcctgcatcgcttacatccggctcacgcagtacattgacgggcagggccggccccgcaccagccagtctgaggagacccgcgtgtggcaccgccgcgacggcaagtggcagaacgtgcacttccactgctcgggcgcgcctgtggccccgctgcagtgaagagctgcgccctggtttcgccggacagagttggtgtttggagcccgactgccctcgggcacacggcctgcctgtcgcatgtttgtgtctgcctcgttccctcccctggtgcctgtgtctgcagaaaaacaagaccagatgtgatttgttaaaaaaaaacaaaaaaaaaaaaaaaaaaaacaagatgacgacgacaaccacaaaaaaaattgacatcagatgaaatgaaaaaaaaaaaaaaacaaaaaaaactaaaggaaggaaaaagctgtaaaaatcactggcattcgtggggccactccccacccaagctccacgtgtgtccgtctgtgctcctggcctctgggggaccagctgggacatgaacttgtctgccaggcccccgtcgcgtgctgaacggtgttagtttgtaggtaacgcacacaccccacacctaaggtgtctgcatcctcctgccaacgcatgggctccacgtggtgtgctcgctggctgtcgtgactgtcagctgtctcttgggaggggctgtgggggcccgctgggctggcctcctttcccgctagttgtgcctgagagttgctgttgttcctgctttcccttcccttcctttcatcccctgaagggctaggtgtgggttttccgtgcccggtatccccacacacccagcacggacaacccttcggcagagcccaggccggcccctcaccccctggagtattgaaactggagtcccgtccccaaggccttcagagatgcccctacacacccagggctccagctctggtccttctgggggagtaaagtgcaaagaggggcacagcttagttttgggcctctcgccgagcaagagacagcactgctggctacagctccaacacagccagctgtggcaagaggactctgcctgggctggcccccctcctgtgtgaggtgtctgtcccttctctgctggccagcagcagatgcactggcagctcccaaccctgtttccgcccctcggccctcccccagcctgttcggcttctctgcagcccgcaagggggagcagacttttgacaaaggactgcgggcctcgctcaagtccctgagcccccagctgaagctgggaggggaggccaggctttgtgtctgggcatattcgtctgctgatggggtttggggaagcctggggcttggggtttggtcgggtggtgcagctagtggcagagcgggatcagaggtggtggctgcccagcttctgggctgagacaagggtctgtgcaggggtttactgaagtgggagtgcctttggaatctgggccgggagcagaagggagcaaaagctacagtgggagccagcctagggcacatgggaggcgtgagggcagtgctgcccgtgcagtgtcaggtgtgccagtgccttggcgggctgcagtgcgtgtgagggcaccttctaggtgggccagggatgcagctatggagataaggcgggctggggacagaaacaggtgggcacagggcccaggacaccagcggatggagggcagggtctagccctgtgctcctgagcgtcggctgcctgggttcgaggcggtgggtccccggccccttgtgatggtgtgtaccatgggggagctcggggacagggcaagcccgagcatggtggggctgcagggtgggtctgaagccaggttgggtgggggtggtcacaagccctgactgcagagggtcaggggctcctgccccagtgcctgcccactttcaattcacattgttttcaacaaggattttctttatcttcccctacaaatcaagccaagggaggggcacagaatggggaacaggacacaggatcctaaactccaaggggactgtccaccgatgaacactcagagtggacaccatcttccgtccacgctgtgcccaggacagctgtccccatccatgaacacagggtaaacatctgccgggctccgcaccagtggctccctgggccatgggacagcggcagggctcaccacggacagcacgtggcccagcagccggccaccctggcgtcctggggcctcctcccctcctctccctctcaccttgtcacctccacggagctgcctgtctgggataatttggggattttttttctgggggataattcttttgcatgacccctaaagagcaagccacaccggtctgctagctaggtgtccgcggtgtggtggtggcggccgct

SEQ ID NO: 307514 - DNA, 3930 bp, Homo sapiens
  misc_feature (9)..(9): n is a, c, g, or t
agcggaggngtgcggcgcgctcctggcgaggacggagcgagcagatctcgcgtgcgctcgccgcccggcgcagcccagcccggcccccgcctggcgccgcgagccgaggtgtctcccgcgcccgcgcccgtgtcgccgccgtgcccgcgagcgggagccggagtcgccgccgcccgagcgcagccgagcgcacgccgagcccgtccgccgccgccatggccaccacggtgacctgcacccgcttcaccgacgagtaccagctctacgaggatattggcaagggggctttctctgtggtccgacgctgtgtcaagctctgcaccggccatgagtatgcagccaagatcatcaacaccaagaagctgtcagccagagatcaccagaagctggagagagaggctcggatctgccgccttctgaagcattccaacatcgtgcgtctccacgacagcatctccgaggagggcttccactacctggtcttcgatctggtcactggtggggagctctttgaagacattgtggcgagagagtactacagcgaggctgatgccagtcactgtatccagcagatcctggaggccgttctccattgtcaccaaatgggggtcgtccacagagacctcaagccggagaacctgcttctggccagcaagtgcaaaggggctgcagtgaagctggcagacttcggcctagctatcgaggtgcagggggaccagcaggcatggtttggtttcgctggcacaccaggctacctgtcccctgaggtccttcgcaaagaggcgtatggcaagcctgtggacatctgggcatgtggggtgatcctgtacatcctgctcgtgggctacccacccttctgggacgaggaccagcacaagctgtaccagcagatcaaggctggtgcctatgacttcccgtcccctgagtgggacaccgtcactcctgaagccaaaaacctcatcaaccagatgctgaccatcaaccctgccaagcgcatcacagcccatgaggccctgaagcacccgtgggtctgccaacgctccacggtagcatccatgatgcacagacaggagactgtggagtgtctgaaaaagttcaatgccaggagaaagctcaagggagccatcctcaccaccatgctggccacacggaatttctcagccaagagtttactcaacaagaaagcagatggagtcaagccccagacgaatagcaccaaaaacagtgcagccgccaccagccccaaagggacgcttcctcctgccgccctggagtcttctgacagtgccaataccaccatagaggatgaagacgctaaagcccggaagcaggagatcattaagaccacggagcagctcatcgaggccgtcaacaacggtgactttgaggcctacgcgaaaatctgtgacccagggctgacctcgtttgagcctgaagcactgggcaacctggttgaagggatggacttccacagattctacttcgagaacctgctggccaagaacagcaagccgatccacacgaccatcctgaacccacacgtgcacgtcattggagaggatgccgcctgcatcgcttacatccggctcacgcagtacattgacgggcagggccggccccgcaccagccagtctgaggagacccgcgtgtggcaccgccgcgacggcaagtggcagaacgtgcacttccactgctcgggcgcgcctgtggccccgctgcagtgaagagctgcgccctggtttcgccggacagagttggtgtttggagcccgactgccctcgggcacacggcctgcctgtcgcatgtttgtgtctgcctcgttccctcccctggtgcctgtgtctgcagaaaaacaagaccagatgtgatttgttaaaaaaaaacaaaaaaaaaaaaaaaaaaaacaagatgacgacgacaaccacaaaaaaaattgacatcagatgaaatgaaaaaaaaaaaaaaacaaaaaaaactaaaggaaggaaaaagctgtaaaaatcactggcattcgtggggccactccccacccaagctccacgtgtgtccgtctgtgctcctggcctctgggggaccagctgggacatgaacttgtctgccaggcccccgtcgcgtgctgaacggtgttagtttgtaggtaacgcacacaccccacacctaaggtgtctgcatcctcctgccaacgcatgggctccacgtggtgtgctcgctggctgtcgtgactgtcagctgtctcttgggaggggctgtgggggcccgctgggctggcctcctttcccgctagttgtgcctgagagttgctgttgttcctgctttcccttcccttcctttcatcccctgaagggctaggtgtgggttttccgtgcccggtatccccacacacccagcacggacaacccttcggcagagcccaggccggcccctcaccccctggagtattgaaactggagtcccgtccccaaggccttcagagatgcccctacacacccagggctccagctctggtccttctgggggagtaaagtgcaaagaggggcacagcttagttttgggcctctcgccgagcaagagacagcactgctggctacagctccaacacagccagctgtggcaagaggactctgcctgggctggcccccctcctgtgtgaggtgtctgtcccttctctgctggccagcagcagatgcactggcagctcccaaccctgtttccgcccctcggccctcccccagcctgttcggcttctctgcagcccgcaagggggagcagacttttgacaaaggactgcgggcctcgctcaagtccctgagcccccagctgaagctgggaggggaggccaggctttgtgtctgggcatattcgtctgctgatggggtttggggaagcctggggcttggggtttggtcgggtggtgcagctagtggcagagcgggatcagaggtggtggctgcccagcttctgggctgagacaagggtctgtgcaggggtttactgaagtgggagtgcctttggaatctgggccgggagcagaagggagcaaaagctacagtgggagccagcctagggcacatgggaggcgtgagggcagtgctgcccgtgcagtgtcaggtgtgccagtgccttggcgggctgcagtgcgtgtgagggcaccttctaggtgggccagggatgcagctatggagataaggcgggctggggacagaaacaggtgggcacagggcccaggacaccagcggatggagggcagggtctagccctgtgctcctgagcgtcggctgcctgggttcgaggcggtgggtccccggccccttgtgatggtgtgtaccatgggggagctcggggacagggcaagcccgagcatggtggggctgcagggtgggtctgaagccaggttgggtgggggtggtcacaagccctgactgcagagggtcaggggctcctgccccagtgcctgcccactttcaattcacattgttttcaacaaggattttctttatcttcccctacaaatcaagccaagggaggggcacagaatggggaacaggacacaggatcctaaactccaaggggactgtccaccgatgaacactcagagtggacaccatcttccgtccacgctgtgcccaggacagctgtccccatccatgaacacagggtaaacatctgccgggctccgcaccagtggctccctgggccatgggacagcggcagggctcaccacggacagcacgtggcccagcagccggccaccctggcgtcctggggcctcctcccctcctctccctctcaccttgtcacctccacggagctgcctgtctgggataatttggggattttttttctgggggataattcttttgcatgacccctaaagagcaagccacaccggtctgctagctaggtgtccgcggtgtggtggtggcggccgct

SEQ ID NO: 307515 - DNA, 4102 bp, Homo sapiens
  misc_feature (9)..(9): n is a, c, g, or t
agcggaggngtgcggcgcgctcctggcgaggacggagcgagcagatctcgcgtgcgctcgccgcccggcgcagcccagcccggcccccgcctggcgccgcgagccgaggtgtctcccgcgcccgcgcccgtgtcgccgccgtgcccgcgagcgggagccggagtcgccgccgcccgagcgcagccgagcgcacgccgagcccgtccgccgccgccatggccaccacggtgacctgcacccgcttcaccgacgagtaccagctctacgaggatattggcaagggggctttctctgtggtccgacgctgtgtcaagctctgcaccggccatgagtatgcagccaagatcatcaacaccaagaagctgtcagccagagatcaccagaagctggagagagaggctcggatctgccgccttctgaagcattccaacatcgtgcgtctccacgacagcatctccgaggagggcttccactacctggtcttcgatctggtcactggtggggagctctttgaagacattgtggcgagagagtactacagcgaggctgatgccagtcactgtatccagcagatcctggaggccgttctccattgtcaccaaatgggggtcgtccacagagacctcaagccggagaacctgcttctggccagcaagtgcaaaggggctgcagtgaagctggcagacttcggcctagctatcgaggtgcagggggaccagcaggcatggtttggtttcgctggcacaccaggctacctgtcccctgaggtccttcgcaaagaggcgtatggcaagcctgtggacatctgggcatgtggggtgatcctgtacatcctgctcgtgggctacccacccttctgggacgaggaccagcacaagctgtaccagcagatcaaggctggtgcctatgacttcccgtcccctgagtgggacaccgtcactcctgaagccaaaaacctcatcaaccagatgctgaccatcaaccctgccaagcgcatcacagcccatgaggccctgaagcacccgtgggtctgccaacgctccacggtagcatccatgatgcacagacaggagactgtggagtgtctgaaaaagttcaatgccaggagaaagctcaagggagccatcctcaccaccatgctggccacacggaatttctcagtgggcagacagaccaccgctccggccacaatgtccaccgcggcctccggcaccaccatggggctggtggaacaagccaagagtttactcaacaagaaagcagatggagtcaagccccagacgaatagcaccaaaaacagtgcagccgccaccagccccaaagggacgcttcctcctgccgccctggagcctcaaaccaccgtcatccataacccagtggacgggattaaggagtcttctgacagtgccaataccaccatagaggatgaagacgctaaagcccggaagcaggagatcattaagaccacggagcagctcatcgaggccgtcaacaacggtgactttgaggcctacgcgaaaatctgtgacccagggctgacctcgtttgagcctgaagcactgggcaacctggttgaagggatggacttccacagattctacttcgagaacctgctggccaagaacagcaagccgatccacacgaccatcctgaacccacacgtgcacgtcattggagaggatgccgcctgcatcgcttacatccggctcacgcagtacattgacgggcagggccggccccgcaccagccagtctgaggagacccgcgtgtggcaccgccgcgacggcaagtggcagaacgtgcacttccactgctcgggcgcgcctgtggccccgctgcagtgaagagctgcgccctggtttcgccggacagagttggtgtttggagcccgactgccctcgggcacacggcctgcctgtcgcatgtttgtgtctgcctcgttccctcccctggtgcctgtgtctgcagaaaaacaagaccagatgtgatttgttaaaaaaaaacaaaaaaaaaaaaaaaaaaaacaagatgacgacgacaaccacaaaaaaaattgacatcagatgaaatgaaaaaaaaaaaaaaacaaaaaaaactaaaggaaggaaaaagctgtaaaaatcactggcattcgtggggccactccccacccaagctccacgtgtgtccgtctgtgctcctggcctctgggggaccagctgggacatgaacttgtctgccaggcccccgtcgcgtgctgaacggtgttagtttgtaggtaacgcacacaccccacacctaaggtgtctgcatcctcctgccaacgcatgggctccacgtggtgtgctcgctggctgtcgtgactgtcagctgtctcttgggaggggctgtgggggcccgctgggctggcctcctttcccgctagttgtgcctgagagttgctgttgttcctgctttcccttcccttcctttcatcccctgaagggctaggtgtgggttttccgtgcccggtatccccacacacccagcacggacaacccttcggcagagcccaggccggcccctcaccccctggagtattgaaactggagtcccgtccccaaggccttcagagatgcccctacacacccagggctccagctctggtccttctgggggagtaaagtgcaaagaggggcacagcttagttttgggcctctcgccgagcaagagacagcactgctggctacagctccaacacagccagctgtggcaagaggactctgcctgggctggcccccctcctgtgtgaggtgtctgtcccttctctgctggccagcagcagatgcactggcagctcccaaccctgtttccgcccctcggccctcccccagcctgttcggcttctctgcagcccgcaagggggagcagacttttgacaaaggactgcgggcctcgctcaagtccctgagcccccagctgaagctgggaggggaggccaggctttgtgtctgggcatattcgtctgctgatggggtttggggaagcctggggcttggggtttggtcgggtggtgcagctagtggcagagcgggatcagaggtggtggctgcccagcttctgggctgagacaagggtctgtgcaggggtttactgaagtgggagtgcctttggaatctgggccgggagcagaagggagcaaaagctacagtgggagccagcctagggcacatgggaggcgtgagggcagtgctgcccgtgcagtgtcaggtgtgccagtgccttggcgggctgcagtgcgtgtgagggcaccttctaggtgggccagggatgcagctatggagataaggcgggctggggacagaaacaggtgggcacagggcccaggacaccagcggatggagggcagggtctagccctgtgctcctgagcgtcggctgcctgggttcgaggcggtgggtccccggccccttgtgatggtgtgtaccatgggggagctcggggacagggcaagcccgagcatggtggggctgcagggtgggtctgaagccaggttgggtgggggtggtcacaagccctgactgcagagggtcaggggctcctgccccagtgcctgcccactttcaattcacattgttttcaacaaggattttctttatcttcccctacaaatcaagccaagggaggggcacagaatggggaacaggacacaggatcctaaactccaaggggactgtccaccgatgaacactcagagtggacaccatcttccgtccacgctgtgcccaggacagctgtccccatccatgaacacagggtaaacatctgccgggctccgcaccagtggctccctgggccatgggacagcggcagggctcaccacggacagcacgtggcccagcagccggccaccctggcgtcctggggcctcctcccctcctctccctctcaccttgtcacctccacggagctgcctgtctgggataatttggggattttttttctgggggataattcttttgcatgacccctaaagagcaagccacaccggtctgctagctaggtgttccccaagagtgggggggaggaaggcccctttggccaaccccctttaaagggggttagggttttgcccacacggagg

SEQ ID NO: 307516 - DNA, 4416 bp, Homo sapiens
  misc_feature (9)..(9): n is a, c, g, or t
agcggaggngtgcggcgcgctcctggcgaggacggagcgagcagatctcgcgtgcgctcgccgcccggcgcagcccagcccggcccccgcctggcgccgcgagccgaggtgtctcccgcgcccgcgcccgtgtcgccgccgtgcccgcgagcgggagccggagtcgccgccgcccgagcgcagccgagcgcacgccgagcccgtccgccgccgccatggccaccacggtgacctgcacccgcttcaccgacgagtaccagctctacgaggatattggcaagggggctttctctgtggtccgacgctgtgtcaagctctgcaccggccatgagtatgcagccaagatcatcaacaccaagaagctgtcagccagagatcaccagaagctggagagagaggctcggatctgccgccttctgaagcattccaacatcgtgcgtctccacgacagcatctccgaggagggcttccactacctggtcttcgatctggtcactggtggggagctctttgaagacattgtggcgagagagtactacagcgaggctgatgccagtcactgtatccagcagatcctggaggccgttctccattgtcaccaaatgggggtcgtccacagagacctcaagccggagaacctgcttctggccagcaagtgcaaaggggctgcagtgaagctggcagacttcggcctagctatcgaggtgcagggggaccagcaggcatggtttggtttcgctggcacaccaggctacctgtcccctgaggtccttcgcaaagaggcgtatggcaagcctgtggacatctgggcatgtggggtgatcctgtacatcctgctcgtgggctacccacccttctgggacgaggaccagcacaagctgtaccagcagatcaaggctggtgcctatgacttcccgtcccctgagtgggacaccgtcactcctgaagccaaaaacctcatcaaccagatgctgaccatcaaccctgccaagcgcatcacagcccatgaggccctgaagcacccgtgggtctgccaacgctccacggtagcatccatgatgcacagacaggagactgtggagtgtctgaaaaagttcaatgccaggagaaagctcaagggagccatcctcaccaccatgctggccacacggaatttctcagtgggcagacagaccaccgctccggccacaatgtccaccgcggcctccggcaccaccatggggctggtggaacaagccaagagtttactcaacaagaaagcagatggagtcaagccccagacgaatagcaccaaaaacagtgcagccgccaccagccccaaagggacgcttcctcctgccgccctggagcctcaaaccaccgtcatccataacccagtggacgggattaaggagtcttctgacagtgccaataccaccatagaggatgaagacgctaaagcccccagggtccccgacatcctgagctcagtgaggaggggctcgggagccagaagccgaggggcccctgcctgcccatctccggctccctttagccccctgccagccccatcccccaggatctctgacatcctgaactctgtgagaaggggttcaggaaccccagaagccgagggccccctctcagcggggcccccgccctgcctgtctccggctctcctaggccccctgtcctccccgtcccccaggatctctgacatcctgaactctgtgaggaggggctcagggaccccagaagccgaggcccctcgccagtggcccccgccctgcccatctccgactatccctggccccctgcccaccccatcccggaagcaggagatcattaagaccacggagcagctcatcgaggccgtcaacaacggtgactttgaggcctacgcgaaaatctgtgacccagggctgacctcgtttgagcctgaagcactgggcaacctggttgaagggatggacttccacagattctacttcgagaacctgctggccaagaacagcaagccgatccacacgaccatcctgaacccacacgtgcacgtcattggagaggatgccgcctgcatcgcttacatccggctcacgcagtacattgacgggcagggccggccccgcaccagccagtctgaggagacccgcgtgtggcaccgccgcgacggcaagtggcagaacgtgcacttccactgctcgggcgcgcctgtggccccgctgcagtgaagagctgcgccctggtttcgccggacagagttggtgtttggagcccgactgccctcgggcacacggcctgcctgtcgcatgtttgtgtctgcctcgttccctcccctggtgcctgtgtctgcagaaaaacaagaccagatgtgatttgttaaaaaaaaacaaaaaaaaaaaaaaaaaaaacaagatgacgacgacaaccacaaaaaaaattgacatcagatgaaatgaaaaaaaaaaaaaaacaaaaaaaactaaaggaaggaaaaagctgtaaaaatcactggcattcgtggggccactccccacccaagctccacgtgtgtccgtctgtgctcctggcctctgggggaccagctgggacatgaacttgtctgccaggcccccgtcgcgtgctgaacggtgttagtttgtaggtaacgcacacaccccacacctaaggtgtctgcatcctcctgccaacgcatgggctccacgtggtgtgctcgctggctgtcgtgactgtcagctgtctcttgggaggggctgtgggggcccgctgggctggcctcctttcccgctagttgtgcctgagagttgctgttgttcctgctttcccttcccttcctttcatcccctgaagggctaggtgtgggttttccgtgcccggtatccccacacacccagcacggacaacccttcggcagagcccaggccggcccctcaccccctggagtattgaaactggagtcccgtccccaaggccttcagagatgcccctacacacccagggctccagctctggtccttctgggggagtaaagtgcaaagaggggcacagcttagttttgggcctctcgccgagcaagagacagcactgctggctacagctccaacacagccagctgtggcaagaggactctgcctgggctggcccccctcctgtgtgaggtgtctgtcccttctctgctggccagcagcagatgcactggcagctcccaaccctgtttccgcccctcggccctcccccagcctgttcggcttctctgcagcccgcaagggggagcagacttttgacaaaggactgcgggcctcgctcaagtccctgagcccccagctgaagctgggaggggaggccaggctttgtgtctgggcatattcgtctgctgatggggtttggggaagcctggggcttggggtttggtcgggtggtgcagctagtggcagagcgggatcagaggtggtggctgcccagcttctgggctgagacaagggtctgtgcaggggtttactgaagtgggagtgcctttggaatctgggccgggagcagaagggagcaaaagctacagtgggagccagcctagggcacatgggaggcgtgagggcagtgctgcccgtgcagtgtcaggtgtgccagtgccttggcgggctgcagtgcgtgtgagggcaccttctaggtgggccagggatgcagctatggagataaggcgggctggggacagaaacaggtgggcacagggcccaggacaccagcggatggagggcagggtctagccctgtgctcctgagcgtcggctgcctgggttcgaggcggtgggtccccggccccttgtgatggtgtgtaccatgggggagctcggggacagggcaagcccgagcatggtggggctgcagggtgggtctgaagccaggttgggtgggggtggtcacaagccctgactgcagagggtcaggggctcctgccccagtgcctgcccactttcaattcacattgttttcaacaaggattttctttatcttcccctacaaatcaagccaagggaggggcacagaatggggaacaggacacaggatcctaaactccaaggggactgtccaccgatgaacactcagagtggacaccatcttccgtccacgctgtgcccaggacagctgtccccatccatgaacacagggtaaacatctgccgggctccgcaccagtggctccctgggccatgggacagcggcagggctcaccacggacagcacgtggcccagcagccggccaccctggcgtcctggggcctcctcccctcctctccctctcaccttgtcacctccacggagctgcctgtctgggataatttggggattttttttctgggggataattcttttgcatgacccctaaagagcaagccacaccggtctgctagctaggtgtccgcggtgtggtggtggcggccgct

SEQ ID NO: 307517 - DNA, 3886 bp, Homo sapiens
  misc_feature (9)..(9): n is a, c, g, or t
agcggaggngtgcggcgcgctcctggcgaggacggagcgagcagatctcgcgtgcgctcgccgcccggcgcagcccagcccggcccccgcctggcgccgcgagccgaggtgtctcccgcgcccgcgcccgtgtcgccgccgtgcccgcgagcgggagccggagtcgccgccgcccgagcgcagccgagcgcacgccgagcccgtccgccgccgccatggccaccacggtgacctgcacccgcttcaccgacgagtaccagctctacgaggatattggcaagggggctttctctgtggtccgacgctgtgtcaagctctgcaccggccatgagtatgcagccaagatcatcaacaccaagaagctgtcagccagagatcaccagaagctggagagagaggctcggatctgccgccttctgaagcattccaacatcgtgcgtctccacgacagcatctccgaggagggcttccactacctggtcttcgatctggtcactggtggggagctctttgaagacattgtggcgagagagtactacagcgaggctgatgccagtcactgtatccagcagatcctggaggccgttctccattgtcaccaaatgggggtcgtccacagagacctcaagccggagaacctgcttctggccagcaagtgcaaaggggctgcagtgaagctggcagacttcggcctagctatcgaggtgcagggggaccagcaggcatggtttggtttcgctggcacaccaggctacctgtcccctgaggtccttcgcaaagaggcgtatggcaagcctgtggacatctgggcatgtggggtgatcctgtacatcctgctcgtgggctacccacccttctgggacgaggaccagcacaagctgtaccagcagatcaaggctggtgcctatgacttcccgtcccctgagtgggacaccgtcactcctgaagccaaaaacctcatcaaccagatgctgaccatcaaccctgccaagcgcatcacagcccatgaggccctgaagcacccgtgggtctgccaacgctccacggtagcatccatgatgcacagacaggagactgtggagtgtctgaaaaagttcaatgccaggagaaagctcaagggagccatcctcaccaccatgctggccacacggaatttctcagtgggcagacagaccaccgctccggccacaatgtccaccgcggcctccggcaccaccatggggctggtggaacaagccaagagtttactcaacaagaaagcagatggagtcaaggagcctcaaaccaccgtcatccataacccagtggacgggattaaggagtcttctgacagtgccaataccaccatagaggatgaagacgctaaagcccggaagcaggagatcattaagaccacggagcagctcatcgaggccgtcaacaacggtgactttgaggcctacgcacctgctggccaagaacagcaagccgatccacacgaccatcctgaacccacacgtgcacgtcattggagaggatgccgcctgcatcgcttacatccggctcacgcagtacattgacgggcagggccggccccgcaccagccagtctgaggagacccgcgtgtggcaccgccgcgacggcaagtggcagaacgtgcacttccactgctcgggcgcgcctgtggccccgctgcagtgaagagctgcgccctggtttcgccggacagagttggtgtttggagcccgactgccctcgggcacacggcctgcctgtcgcatgtttgtgtctgcctcgttccctcccctggtgcctgtgtctgcagaaaaacaagaccagatgtgatttgttaaaaaaaaacaaaaaaaaaaaaaaaaaaaacaagatgacgacgacaaccacaaaaaaaattgacatcagatgaaatgaaaaaaaaaaaaaaacaaaaaaaactaaaggaaggaaaaagctgtaaaaatcactggcattcgtggggccactccccacccaagctccacgtgtgtccgtctgtgctcctggcctctgggggaccagctgggacatgaacttgtctgccaggcccccgtcgcgtgctgaacggtgttagtttgtaggtaacgcacacaccccacacctaaggtgtctgcatcctcctgccaacgcatgggctccacgtggtgtgctcgctggctgtcgtgactgtcagctgtctcttgggaggggctgtgggggcccgctgggctggcctcctttcccgctagttgtgcctgagagttgctgttgttcctgctttcccttcccttcctttcatcccctgaagggctaggtgtgggttttccgtgcccggtatccccacacacccagcacggacaacccttcggcagagcccaggccggcccctcaccccctggagtattgaaactggagtcccgtccccaaggccttcagagatgcccctacacacccagggctccagctctggtccttctgggggagtaaagtgcaaagaggggcacagcttagttttgggcctctcgccgagcaagagacagcactgctggctacagctccaacacagccagctgtggcaagaggactctgcctgggctggcccccctcctgtgtgaggtgtctgtcccttctctgctggccagcagcagatgcactggcagctcccaaccctgtttccgcccctcggccctcccccagcctgttcggcttctctgcagcccgcaagggggagcagacttttgacaaaggactgcgggcctcgctcaagtccctgagcccccagctgaagctgggaggggaggccaggctttgtgtctgggcatattcgtctgctgatggggtttggggaagcctggggcttggggtttggtcgggtggtgcagctagtggcagagcgggatcagaggtggtggctgcccagcttctgggctgagacaagggtctgtgcaggggtttactgaagtgggagtgcctttggaatctgggccgggagcagaagggagcaaaagctacagtgggagccagcctagggcacatgggaggcgtgagggcagtgctgcccgtgcagtgtcaggtgtgccagtgccttggcgggctgcagtgcgtgtgagggcaccttctaggtgggccagggatgcagctatggagataaggcgggctggggacagaaacaggtgggcacagggcccaggacaccagcggatggagggcagggtctagccctgtgctcctgagcgtcggctgcctgggttcgaggcggtgggtccccggccccttgtgatggtgtgtaccatgggggagctcggggacagggcaagcccgagcatggtggggctgcagggtgggtctgaagccaggttgggtgggggtggtcacaagccctgactgcagagggtcaggggctcctgccccagtgcctgcccactttcaattcacattgttttcaacaaggattttctttatcttcccctacaaatcaagccaagggaggggcacagaatggggaacaggacacaggatcctaaactccaaggggactgtccaccgatgaacactcagagtggacaccatcttccgtccacgctgtgcccaggacagctgtccccatccatgaacacagggtaaacatctgccgggctccgcaccagtggctccctgggccatgggacagcggcagggctcaccacggacagcacgtggcccagcagccggccaccctggcgtcctggggcctcctcccctcctctccctctcaccttgtcacctccacggagctgcctgtctgggataatttggggattttttttctgggggataattcttttgcatgacccctaaagagcaagccacaccggtctgctagctaggtgtccgcggtgtggtggtggcggccgct

SEQ ID NO: 307518 - DNA, 3774 bp, Homo sapiens
  misc_feature (9)..(9): n is a, c, g, or t
agcggaggngtgcggcgcgctcctggcgaggacggagcgagcagatctcgcgtgcgctcgccgcccggcgcagcccagcccggcccccgcctggcgccgcgagccgaggtgtctcccgcgcccgcgcccgtgtcgccgccgtgcccgcgagcgggagccggagtcgccgccgcccgagcgcagccgagcgcacgccgagcccgtccgccgccgccatggccaccacggtgacctgcacccgcttcaccgacgagtaccagctctacgaggatattggcaagggggctttctctgtggtccgacgctgtgtcaagctctgcaccggccatgagtatgcagccaagatcatcaacaccaagaagctgtcagccagagatcaccagaagctggagagagaggctcggatctgccgccttctgaagcattccaacatcgtgcgtctccacgacagcatctccgaggagggcttccactacctggtcttcgatctggtcactggtggggagctctttgaagacattgtggcgagagagtactacagcgaggctgatgccagtcactgtatccagcagatcctggaggccgttctccattgtcaccaaatgggggtcgtccacagagacctcaagccggagaacctgcttctggccagcaagtgcaaaggggctgcagtgaagctggcagacttcggcctagctatcgaggtgcagggggaccagcaggcatggtttggtttcgctggcacaccaggctacctgtcccctgaggtccttcgcaaagaggcgtatggcaagcctgtggacatctgggcatgtggggtgatcctgtacatcctgctcgtgggctacccacccttctgggacgaggaccagcacaagctgtaccagcagatcaaggctggtgcctatgacttcccgtcccctgagtgggacaccgtcactcctgaagccaaaaacctcatcaaccagatgctgaccatcaaccctgccaagcgcatcacagcccatgaggccctgaagcacccgtgggtctgccaacgctccacggtagcatccatgatgcacagacaggagactgtggagtgtctgaaaaagttcaatgccaggagaaagctcaagggagccatcctcaccaccatgctggccacacggaatttctcagcccggaagcaggagatcattaagaccacggagcagctcatcgaggccgtcaacaacggtgactttgaggcctacgcgaaaatctgtgacccagggctgacctcgtttgagcctgaagcactgggcaacctggttgaagggatggacttccacagattctacttcgagaaccacctgctggccaagaacagcaagccgatccacacgaccatcctgaacccacacgtgcacgtcattggagaggatgccgcctgcatcgcttacatccggctcacgcagtacattgacgggcagggccggccccgcaccagccagtctgaggagacccgcgtgtggcaccgccgcgacggcaagtggcagaacgtgcacttccactgctcgggcgcgcctgtggccccgctgcagtgaagagctgcgccctggtttcgccggacagagttggtgtttggagcccgactgccctcgggcacacggcctgcctgtcgcatgtttgtgtctgcctcgttccctcccctggtgcctgtgtctgcagaaaaacaagaccagatgtgatttgttaaaaaaaaacaaaaaaaaaaaaaaaaaaaacaagatgacgacgacaaccacaaaaaaaattgacatcagatgaaatgaaaaaaaaaaaaaaacaaaaaaaactaaaggaaggaaaaagctgtaaaaatcactggcattcgtggggccactccccacccaagctccacgtgtgtccgtctgtgctcctggcctctgggggaccagctgggacatgaacttgtctgccaggcccccgtcgcgtgctgaacggtgttagtttgtaggtaacgcacacaccccacacctaaggtgtctgcatcctcctgccaacgcatgggctccacgtggtgtgctcgctggctgtcgtgactgtcagctgtctcttgggaggggctgtgggggcccgctgggctggcctcctttcccgctagttgtgcctgagagttgctgttgttcctgctttcccttcccttcctttcatcccctgaagggctaggtgtgggttttccgtgcccggtatccccacacacccagcacggacaacccttcggcagagcccaggccggcccctcaccccctggagtattgaaactggagtcccgtccccaaggccttcagagatgcccctacacacccagggctccagctctggtccttctgggggagtaaagtgcaaagaggggcacagcttagttttgggcctctcgccgagcaagagacagcactgctggctacagctccaacacagccagctgtggcaagaggactctgcctgggctggcccccctcctgtgtgaggtgtctgtcccttctctgctggccagcagcagatgcactggcagctcccaaccctgtttccgcccctcggccctcccccagcctgttcggcttctctgcagcccgcaagggggagcagacttttgacaaaggactgcgggcctcgctcaagtccctgagcccccagctgaagctgggaggggaggccaggctttgtgtctgggcatattcgtctgctgatggggtttggggaagcctggggcttggggtttggtcgggtggtgcagctagtggcagagcgggatcagaggtggtggctgcccagcttctgggctgagacaagggtctgtgcaggggtttactgaagtgggagtgcctttggaatctgggccgggagcagaagggagcaaaagctacagtgggagccagcctagggcacatgggaggcgtgagggcagtgctgcccgtgcagtgtcaggtgtgccagtgccttggcgggctgcagtgcgtgtgagggcaccttctaggtgggccagggatgcagctatggagataaggcgggctggggacagaaacaggtgggcacagggcccaggacaccagcggatggagggcagggtctagccctgtgctcctgagcgtcggctgcctgggttcgaggcggtgggtccccggccccttgtgatggtgtgtaccatgggggagctcggggacagggcaagcccgagcatggtggggctgcagggtgggtctgaagccaggttgggtgggggtggtcacaagccctgactgcagagggtcaggggctcctgccccagtgcctgcccactttcaattcacattgttttcaacaaggattttctttatcttcccctacaaatcaagccaagggaggggcacagaatggggaacaggacacaggatcctaaactccaaggggactgtccaccgatgaacactcagagtggacaccatcttccgtccacgctgtgcccaggacagctgtccccatccatgaacacagggtaaacatctgccgggctccgcaccagtggctccctgggccatgggacagcggcagggctcaccacggacagcacgtggcccagcagccggccaccctggcgtcctggggcctcctcccctcctctccctctcaccttgtcacctccacggagctgcctgtctgggataatttggggattttttttctgggggataattcttttgcatgacccctaaagagcaagccacaccggtctgctagctaggtgtccgcggtgtggtggtggcggccgct

SEQ ID NO: 307519 - DNA, 3731 bp, Homo sapiens
gaggctgcgttcattatgtgcactcttctgtgttatgtgagagcgaggggtcggcagcagcaagtggcctgcgtgcgcgaggggggctttctctgtggtccgacgctgtgtcaagctctgcaccggccatgagtatgcagccaagatcatcaacaccaagaagctgtcagccagagatcaccagaagctggagagagaggctcggatctgccgccttctgaagcattccaacatcgtgcgtctccacgacagcatctccgaggagggcttccactacctggtcttcgatctggtcactggtggggagctctttgaagacattgtggcgagagagtactacagcgaggctgatgccagtcactgtatccagcagatcctggaggccgttctccattgtcaccaaatgggggtcgtccacagagacctcaagccggagaacctgcttctggccagcaagtgcaaaggggctgcagtgaagctggcagacttcggcctagctatcgaggtgcagggggaccagcaggcatggtttggtttcgctggcacaccaggctacctgtcccctgaggtccttcgcaaagaggcgtatggcaagcctgtggacatctgggcatgtggggtgatcctgtacatcctgctcgtgggctacccacccttctgggacgaggaccagcacaagctgtaccagcagatcaaggctggtgcctatgacttcccgtcccctgagtgggacaccgtcactcctgaagccaaaaacctcatcaaccagatgctgaccatcaaccctgccaagcgcatcacagcccatgaggccctgaagcacccgtgggtctgccaacgctccacggtagcatccatgatgcacagacaggagactgtggagtgtctgaaaaagttcaatgccaggagaaagctcaagggagccatcctcaccaccatgctggccacacggaatttctcagccaagagtttactcaacaagaaagcagatggagtcaagccccagacgaatagcaccaaaaacagtgcagccgccaccagccccaaagggacgcttcctcctgccgccctggagtcttctgacagtgccaataccaccatagaggatgaagacgctaaagcccggaagcaggagatcattaagaccacggagcagctcatcgaggccgtcaacaacggtgactttgaggcctacgcgaaaatctgtgacccagggctgacctcgtttgagcctgaagcactgggcaacctggttgaagggatggacttccacagattctacttcgagaacctgctggccaagaacagcaagccgatccacacgaccatcctgaacccacacgtgcacgtcattggagaggatgccgcctgcatcgcttacatccggctcacgcagtacattgacgggcagggccggccccgcaccagccagtctgaggagacccgcgtgtggcaccgccgcgacggcaagtggcagaacgtgcacttccactgctcgggcgcgcctgtggccccgctgcagtgaagagctgcgccctggtttcgccggacagagttggtgtttggagcccgactgccctcgggcacacggcctgcctgtcgcatgtttgtgtctgcctcgttccctcccctggtgcctgtgtctgcagaaaaacaagaccagatgtgatttgttaaaaaaaaacaaaaaaaaaaaaaaaaaaaacaagatgacgacgacaaccacaaaaaaaattgacatcagatgaaatgaaaaaaaaaaaaaaacaaaaaaaactaaaggaaggaaaaagctgtaaaaatcactggcattcgtggggccactccccacccaagctccacgtgtgtccgtctgtgctcctggcctctgggggaccagctgggacatgaacttgtctgccaggcccccgtcgcgtgctgaacggtgttagtttgtaggtaacgcacacaccccacacctaaggtgtctgcatcctcctgccaacgcatgggctccacgtggtgtgctcgctggctgtcgtgactgtcagctgtctcttgggaggggctgtgggggcccgctgggctggcctcctttcccgctagttgtgcctgagagttgctgttgttcctgctttcccttcccttcctttcatcccctgaagggctaggtgtgggttttccgtgcccggtatccccacacacccagcacggacaacccttcggcagagcccaggccggcccctcaccccctggagtattgaaactggagtcccgtccccaaggccttcagagatgcccctacacacccagggctccagctctggtccttctgggggagtaaagtgcaaagaggggcacagcttagttttgggcctctcgccgagcaagagacagcactgctggctacagctccaacacagccagctgtggcaagaggactctgcctgggctggcccccctcctgtgtgaggtgtctgtcccttctctgctggccagcagcagatgcactggcagctcccaaccctgtttccgcccctcggccctcccccagcctgttcggcttctctgcagcccgcaagggggagcagacttttgacaaaggactgcgggcctcgctcaagtccctgagcccccagctgaagctgggaggggaggccaggctttgtgtctgggcatattcgtctgctgatggggtttggggaagcctggggcttggggtttggtcgggtggtgcagctagtggcagagcgggatcagaggtggtggctgcccagcttctgggctgagacaagggtctgtgcaggggtttactgaagtgggagtgcctttggaatctgggccgggagcagaagggagcaaaagctacagtgggagccagcctagggcacatgggaggcgtgagggcagtgctgcccgtgcagtgtcaggtgtgccagtgccttggcgggctgcagtgcgtgtgagggcaccttctaggtgggccagggatgcagctatggagataaggcgggctggggacagaaacaggtgggcacagggcccaggacaccagcggatggagggcagggtctagccctgtgctcctgagcgtcggctgcctgggttcgaggcggtgggtccccggccccttgtgatggtgtgtaccatgggggagctcggggacagggcaagcccgagcatggtggggctgcagggtgggtctgaagccaggttgggtgggggtggtcacaagccctgactgcagagggtcaggggctcctgccccagtgcctgcccactttcaattcacattgttttcaacaaggattttctttatcttcccctacaaatcaagccaagggaggggcacagaatggggaacaggacacaggatcctaaactccaaggggactgtccaccgatgaacactcagagtggacaccatcttccgtccacgctgtgcccaggacagctgtccccatccatgaacacagggtaaacatctgccgggctccgcaccagtggctccctgggccatgggacagcggcagggctcaccacggacagcacgtggcccagcagccggccaccctggcgtcctggggcctcctcccctcctctccctctcaccttgtcacctccacggagctgcctgtctgggataatttggggattttttttctgggggataattcttttgcatgacccctaaagagcaagccacaccggtctgctagctaggtgtccgcggtgtggtggtggcggccgct

SEQ ID NO: 307520 - DNA, 3730 bp, Homo sapiens
gaggctgcgttcattatgtgcactcttctgtgttatgtgagagcgaggggtcggcagcagcaagtggcctgcgtgcgcgaggggggctttctctgtggtccgacgctgtgtcaagctctgcaccggccatgagtatgcagccaagatcatcaacaccaagaagctgtcagccagagatcaccagaagctggagagagaggctcggatctgccgccttctgaagcattccaacatcgtcactgtatccagcagatcctggaggccgttctccattgtcaccaaatgggggtcgtccacagagacctcaagccggagaacctgcttctggccagcaagtgcaaaggggctgcagtgaagctggcagacttcggcctagctatcgaggtgcagggggaccagcaggcatggtttggtttcgctggcacaccaggctacctgtcccctgaggtccttcgcaaagaggcgtatggcaagcctgtggacatctgggcatgtggggtgatcctgtacatcctgctcgtgggctacccacccttctgggacgaggaccagcacaagctgtaccagcagatcaaggctggtgcctatgacttcccgtcccctgagtgggacaccgtcactcctgaagccaaaaacctcatcaaccagatgctgaccatcaaccctgccaagcgcatcacagcccatgaggccctgaagcacccgtgggtctgccaacgctccacggtagcatccatgatgcacagacaggagactgtggagtgtctgaaaaagttcaatgccaggagaaagctcaagggagccatcctcaccaccatgctggccacacggaatttctcagtgggcagacagaccaccgctccggccacaatgtccaccgcggcctccggcaccaccatggggctggtggaacaagccaagagtttactcaacaagaaagcagatggagtcaagccccagacgaatagcaccaaaaacagtgcagccgccaccagccccaaagggacgcttcctcctgccgccctggagcctcaaaccaccgtcatccataacccagtggacgggattaaggagtcttctgacagtgccaataccaccatagaggatgaagacgctaaagcccggaagcaggagatcattaagaccacggagcagctcatcgaggccgtcaacaacggtgactttgaggcctacgcgaaaatctgtgacccagggctgacctcgtttgagcctgaagcactgggcaacctggttgaagggatggacttccacagattctacttcgagaacctgctggccaagaacagcaagccgatccacacgaccatcctgaacccacacgtgcacgtcattggagaggatgccgcctgcatcgcttacatccggctcacgcagtacattgacgggcagggccggccccgcaccagccagtctgaggagacccgcgtgtggcaccgccgcgacggcaagtggcagaacgtgcacttccactgctcgggcgcgcctgtggccccgctgcagtgaagagctgcgccctggtttcgccggacagagttggtgtttggagcccgactgccctcgggcacacggcctgcctgtcgcatgtttgtgtctgcctcgttccctcccctggtgcctgtgtctgcagaaaaacaagaccagatgtgatttgttaaaaaaaaacaaaaaaaaaaaaaaaaaaaacaagatgacgacgacaaccacaaaaaaaattgacatcagatgaaatgaaaaaaaaaaaaaaacaaaaaaaactaaaggaaggaaaaagctgtaaaaatcactggcattcgtggggccactccccacccaagctccacgtgtgtccgtctgtgctcctggcctctgggggaccagctgggacatgaacttgtctgccaggcccccgtcgcgtgctgaacggtgttagtttgtaggtaacgcacacaccccacacctaaggtgtctgcatcctcctgccaacgcatgggctccacgtggtgtgctcgctggctgtcgtgactgtcagctgtctcttgggaggggctgtgggggcccgctgggctggcctcctttcccgctagttgtgcctgagagttgctgttgttcctgctttcccttcccttcctttcatcccctgaagggctaggtgtgggttttccgtgcccggtatccccacacacccagcacggacaacccttcggcagagcccaggccggcccctcaccccctggagtattgaaactggagtcccgtccccaaggccttcagagatgcccctacacacccagggctccagctctggtccttctgggggagtaaagtgcaaagaggggcacagcttagttttgggcctctcgccgagcaagagacagcactgctggctacagctccaacacagccagctgtggcaagaggactctgcctgggctggcccccctcctgtgtgaggtgtctgtcccttctctgctggccagcagcagatgcactggcagctcccaaccctgtttccgcccctcggccctcccccagcctgttcggcttctctgcagcccgcaagggggagcagacttttgacaaaggactgcgggcctcgctcaagtccctgagcccccagctgaagctgggaggggaggccaggctttgtgtctgggcatattcgtctgctgatggggtttggggaagcctggggcttggggtttggtcgggtggtgcagctagtggcagagcgggatcagaggtggtggctgcccagcttctgggctgagacaagggtctgtgcaggggtttactgaagtgggagtgcctttggaatctgggccgggagcagaagggagcaaaagctacagtgggagccagcctagggcacatgggaggcgtgagggcagtgctgcccgtgcagtgtcaggtgtgccagtgccttggcgggctgcagtgcgtgtgagggcaccttctaggtgggccagggatgcagctatggagataaggcgggctggggacagaaacaggtgggcacagggcccaggacaccagcggatggagggcagggtctagccctgtgctcctgagcgtcggctgcctgggttcgaggcggtgggtccccggccccttgtgatggtgtgtaccatgggggagctcggggacagggcaagcccgagcatggtggggctgcagggtgggtctgaagccaggttgggtgggggtggtcacaagccctgactgcagagggtcaggggctcctgccccagtgcctgcccactttcaattcacattgttttcaacaaggattttctttatcttcccctacaaatcaagccaagggaggggcacagaatggggaacaggacacaggatcctaaactccaaggggactgtccaccgatgaacactcagagtggacaccatcttccgtccacgctgtgcccaggacagctgtccccatccatgaacacagggtaaacatctgccgggctccgcaccagtggctccctgggccatgggacagcggcagggctcaccacggacagcacgtggcccagcagccggccaccctggcgtcctggggcctcctcccctcctctccctctcaccttgtcacctccacggagctgcctgtctgggataatttggggattttttttctgggggataattcttttgcatgacccctaaagagcaagccacaccggtctgctagctaggtgtccgcggtgtggtggtggcggccgct

SEQ ID NO: 307521 - DNA, 3782 bp, Homo sapiens
  misc_feature (9)..(9): n is a, c, g, or t
agcggaggngtgcggcgcgctcctggcgaggacggagcgagcagatctcgcgtgcgctcgccgcccggcgcagcccagcccggcccccgcctggcgccgcgagccgaggtgtctcccgcgcccgcgcccgtgtcgccgccgtgcccgcgagcgggagccggagtcgccgccgcccgagcgcagccgagcgcacgccgagcccgtccgccgccgccatggccaccacggtgacctgcacccgcttcaccgacgagtaccagctctacgaggatattggcaagggggctttctctgtggtccgacgctgtgtcaagctctgcaccggccatgagtatgcagccaagatcatcaacaccaagaagctgtcagccagagatcaccagaagctggagagagaggctcggatctgccgccttctgaagcattccaacatcgtgcgtctccacgacagcatctccgaggagggcttccactacctggtcttcgatctggtcactggtggggagctctttgaagacattgtggcgagagagtactacagcgaggctgatgccagtcactgtatccagcagatcctggaggccgttctccattgtcaccaaatgggggtcgtccacagagacctcaagccggagaacctgcttctggccagcaagtgcaaaggggctgcagtgaagctggcagacttcggcctagctatcgaggtgcagggggaccagcaggcatggtttggtttcgctggcacaccaggctacctgtcccctgaggtccttcgcaaagaggcgtatggcaagcctgtggacatctgggcatgtggggtgatcctgtacatcctgctcgtgggctacccacccttctgggacgaggaccagcacaagctgtaccagcagatcaaggctggtgcctatgacttcccgtcccctgagtgggacaccgtcactcctgaagccaaaaacctcatcaaccagatgctgaccatcaaccctgccaagcgcatcacagcccatgaggccctgaagcacccgtgggtctgccaacgctccacggtagcatccatgatgcacagacaggagactgtggagtgtctgaaaaagttcaatgccaggagaaagctcaagggagccatcctcaccaccatgctggccacacggaatttctcagtgggcagacagaccaccgctccggccacaatgtccaccgcggcctccggcaccaccatggggctggtggaacaagccaagagtttactcaacaagaaagcagatggagtcaagccccagacgaatagcaccaaaaacagtgcagccgccaccagccccaaagggacgcttcctcctgccgccctggagcctcaaaccaccgtcatccataacccagtggacgggattaaggagtcttctgacagtgccaataccaccatagaggatgaagacgctaaagcccggaagcaggagatcattaagaccacggagcagctcatcgaggccgtcaacaacggtgactttgaggcctacgcgaaaatctgtgacccagggctgacctcgtttgagcctgaagcactgggcaacctggttgaagggatggacttccacagattctacttcgagaacctgctggccaagaacagcaagccgatccacacgaccatcctgaacccacacgtgcacgtcattggagaggatgccgcctgcatcgcttacatccggctcacgcagtacattgacgggcagggccggccccgcaccagccagtctgaggagacccgcgtgtggcaccgccgcgacggcaagtggcagaacgtgcacttccactgctcgggcgcgcctgtggccccgctgcagtgaagagctgcgccctggtttcgccggacagagttggtgtttggagcccgactgccctcgggcacacggcctgcctgtcgcatgtttgtgtctgcctcgttccctcccctggtgcctgtgtctgcagaaaaacaagaccagatgtgatttgttaaaaaaaaacaaaaaaaaaaaaaaaaaaaacaagatgacgacgacaaccacaaaaaaaattgacatcagatgaaatgaaaaaaaaaaaaaaacaaaaaaaactaaaggaaggaaaaagctgtaaaaatcactggcattcgtggggccactccccacccaagctccacgtgtgtccgtctgtgctcctggcctctgggggaccagctgggacatgaacttgtctgccaggcccccgtcgcgtgctgaacggtgttagtttgtaggtaacgcacacaccccacacctaaggtgtctgcatcctcctgccaacgcatgggctccacgtggtgtgctcgctggctgtcgtgactgtcagctgtctcttgggaggggctgtgggggcccgctgggctggcctcctttcccgctagttgtgcctgagagttgctgttgttcctgctttcccttcccttcctttcatcccctgaagggctaggtgtgggttttccgtgcccggtatccccacacacccagcacggacaacccttcggcagagcccaggccggcccctcaccccctggagtattgaaactggagtcccgtccccaaggccttcagagatgcccctacacacccagggctccagctctggtccttctgggggagtaaagtgcaaagaggggcacagcttagttttgggcctctcgccgagcaagagacagcactgctggctacagctccaacacagccagctgtggcaagaggactctgcctgggctggcccccctcctgtgtgaggtgtctgtcccttctctgctggccagcagcagatgcactggcagctcccaaccctgtttccgcccctcggccctcccccagcctgttcggcttctctgcagcccgcaagggggagcagacttttgacaaaggactgcgggcctcgctcaagtccctgagcccccagctgaagctgggaggggaggccaggctttgtgtctgggcatattcgtctgctgatggggtttggggaagcctggggcttggggtttggtcgggtggtgcagctagtggcagagcgggatcagaggtggtggctgcccagcttctgggctgagacaagggtctgtgcaggggtttactgaagtgggagtgcctttggaatctgggccgggagcagaagggagcaaaagctacagtgggagccagcctagggcacatgggaggcgtgagggcagtgctgcccgtgcagtgtcaggtgtgccagtgccttggcgggctgcagtgcgtgtgagggcaccttctaggtgggccagggatgcagctatggagataaggcgggctggggacagaaacaggtgggcacagggcccaggacaccagcggatggagggcagggtctagccctgtgctcctgagcgtcggctgcctgggttcgaggcggtgggtccccggccccttgtgatggtgtgtaccatgggggagctcggggacagggcaagcccgagcatggtggggctgcagggtgggtctgaagccaggttgggtgggggtggtcacaagccctgactgcagagggtcaggggctcctgccccagtgcctgcccactttcaattcacattgttttcaacaaggattttctttatcttcccctacaaatcaagccaagggaggggcacagaatggggaacaggacacaggatcctaaactccaaggggactgtccaccgatgaacactcagagtggacaccatcttccgtccacgctgtgcccaggacagctgttaccattctgatgttggagcggccgc

SEQ ID NO: 307522 - DNA, 2692 bp, Homo sapiens
gacaccagactgggggtggtgtggagatactcttagagaagaggctgctgggcacgggtcggcatggcagggcagtggctagcccggaagcaggagatcattaagaccacggagcagctcatcgaggccgtcaacaacggtgactttgaggcctacgcgaaaatctgtgacccagggctgacctcgtttgagcctgaagcactgggcaacctggttgaagggatggacttccacagattctacttcgagaacctgctggccaagaacagcaagccgatccacacgaccatcctgaacccacacgtgcacgtcattggagaggatgccgcctgcatcgcttacatccggctcacgcagtacattgacgggcagggccggccccgcaccagccagtctgaggagacccgcgtgtggcaccgccgcgacggcaagtggcagaacgtgcacttccactgctcgggcgcgcctgtggccccgctgcagtgaagagctgcgccctggtttcgccggacagagttggtgtttggagcccgactgccctcgggcacacggcctgcctgtcgcatgtttgtgtctgcctcgttccctcccctggtgcctgtgtctgcagaaaaacaagaccagatgtgatttgttaaaaaaaaacaaaaaaaaaaaaaaaaaaaacaagatgacgacgacaaccacaaaaaaaattgacatcagatgaaatgaaaaaaaaaaaaaaacaaaaaaaactaaaggaaggaaaaagctgtaaaaatcactggcattcgtggggccactccccacccaagctccacgtgtgtccgtctgtgctcctggcctctgggggaccagctgggacatgaacttgtctgccaggcccccgtcgcgtgctgaacggtgttagtttgtaggtaacgcacacaccccacacctaaggtgtctgcatcctcctgccaacgcatgggctccacgtggtgtgctcgctggctgtcgtgactgtcagctgtctcttgggaggggctgtgggggcccgctgggctggcctcctttcccgctagttgtgcctgagagttgctgttgttcctgctttcccttcccttcctttcatcccctgaagggctaggtgtgggttttccgtgcccggtatccccacacacccagcacggacaacccttcggcagagcccaggccggcccctcaccccctggagtattgaaactggagtcccgtccccaaggccttcagagatgcccctacacacccagggctccagctctggtccttctgggggagtaaagtgcaaagaggggcacagcttagttttgggcctctcgccgagcaagagacagcactgctggctacagctccaacacagccagctgtggcaagaggactctgcctgggctggcccccctcctgtgtgaggtgtctgtcccttctctgctggccagcagcagatgcactggcagctcccaaccctgtttccgcccctcggccctcccccagcctgttcggcttctctgcagcccgcaagggggagcagacttttgacaaaggactgcgggcctcgctcaagtccctgagcccccagctgaagctgggaggggaggccaggctttgtgtctgggcatattcgtctgctgatggggtttggggaagcctggggcttggggtttggtcgggtggtgcagctagtggcagagcgggatcagaggtggtggctgcccagcttctgggctgagacaagggtctgtgcaggggtttactgaagtgggagtgcctttggaatctgggccgggagcagaagggagcaaaagctacagtgggagccagcctagggcacatgggaggcgtgagggcagtgctgcccgtgcagtgtcaggtgtgccagtgccttggcgggctgcagtgcgtgtgagggcaccttctaggtgggccagggatgcagctatggagataaggcgggctggggacagaaacaggtgggcacagggcccaggacaccagcggatggagggcagggtctagccctgtgctcctgagcgtcggctgcctgggttcgaggcggtgggtccccggccccttgtgatggtgtgtaccatgggggagctcggggacagggcaagcccgagcatggtggggctgcagggtgggtctgaagccaggttgggtgggggtggtcacaagccctgactgcagagggtcaggggctcctgccccagtgcctgcccactttcaattcacattgttttcaacaaggattttctttatcttcccctacaaatcaagccaagggaggggcacagaatggggaacaggacacaggatcctaaactccaaggggactgtccaccgatgaacactcagagtggacaccatcttccgtccacgctgtgcccaggacagctgtccccatccatgaacacagggtaaacatctgccgggctccgcaccagtggctccctgggccatgggacagcggcagggctcaccacggacagcacgtggcccagcagccggccaccctggcgtcctggggcctcctcccctcctctccctctcaccttgtcacctccacggagctgcctgtctgggataatttggggattttttttctgggggataattcttttgcatgacccctaaagagcaagccacaccggtctgctagctaggtgtccgcggtgtggtggtggcggccgct

SEQ ID NO: 307523 - DNA, 3847 bp, Homo sapiens
  misc_feature (9)..(9): n is a, c, g, or t
agcggaggngtgcggcgcgctcctggcgaggacggagcgagcagatctcgcgtgcgctcgccgcccggcgcagcccagcccggcccccgcctggcgccgcgagccgaggtgtctcccgcgcccgcgcccgtgtcgccgccgtgcccgcgagcgggagccggagtcgccgccgcccgagcgcagccgagcgcacgccgagcccgtccgccgccgccatggccaccacggtgacctgcacccgcttcaccgacgagtaccagctctacgaggatattggcaagggggctttctctgtggtccgacgctgtgtcaagctctgcaccggccatgagtatgcagccaagatcatcaacaccaagaagctgtcagccagagatcaccagaagctggagagagaggctcggatctgccgccttctgaagcattccaacatcgtgcgtctccacgacagcatctccgaggagggcttccactacctggtcttcgatctggtcactggtggggagctctttgaagacattgtggcgagagagtactacagcgaggctgatgccagtcactgtatccagcagatcctggaggccgttctccattgtcaccaaatgggggtcgtccacagagacctcaagccggagaacctgcttctggccagcaagtgcaaaggggctgcagtgaagctggcagacttcggcctagctatcgaggtgcagggggaccagcaggcatggtttggtttcgctggcacaccaggctacctgtcccctgaggtccttcgcaaagaggcgtatggcaagcctgtggacatctgggcatgtggggtgatcctgtacatcctgctcgtgggctacccacccttctgggacgaggaccagcacaagctgtaccagcagatcaaggctggtgcctatgacttcccgtcccctgagtgggacaccgtcactcctgaagccaaaaacctcatcaaccagatgctgaccatcaaccctgccaagcgcatcacagcccatgaggccctgaagcacccgtgggtctgccaacgctccacggtagcatccatgatgcacagacaggagactgtggagtgtctgaaaaagttcaatgccaggagaaagctcaagggagccatcctcaccaccatgctggccacacggaatttctcagtgggcagacagaccaccgctccggccacaatgtccaccgcggcctccggcaccaccatggggctggtggaacaagccaagagtttactcaacaagaaagcagatggagtcaagccccagacgaatagcaccaaaaacagtgcagccgccaccagccccaaagggacgcttcctcctgccgccctggagcctcaaaccaccgtcatccataacccagtggacgggattaaggagtcttctgacagtgccaataccaccatagaggatgaagacgctaaagcccggaagcaggagatcattaagaccacggagcagctcatcgaggccgtcaacaacggtgactttgaggcctacgcgaaaatctgtgacccagggctgacctcgtttgagcctgaagcactgggcaacctggttgaagggatggacttccacagattctacttcgagaacctgctggccaagaacagcaagccgatccacacgaccatcctgaacccacacgtgcacgtcattggagaggatgccgcctgcatcgcttacatccggctcacgcagtacattgacgggcagggccggccccgcaccagccagtctgaggagacccgcgtgtggcaccgccgcgacggcaagtggcagaacgtgcacttccactgctcgggcgcgcctgtggccccgctgcagtgaagagctgcgccctggtttcgccggacagagttggtgtttggagcccgactgccctcgggcacacggcctgcctgtcgcatgtttgtgtctgcctcgttccctcccctggtgcctgtgtctgcagaaaaacaagaccagatgtgatttgttaaaaaaaaacaaaaaaaaaaaaaaaaaaaacaagatgacgacgacaaccacaaaaaaaattgacatcagatgaaatgaaaaaaaaaaaaaaacaaaaaaaactaaaggaaggaaaaagctgtaaaaatcactggcattcgtggggccactccccacccaagctccacgtgtgtccgtctgtgctcctggcctctgggggaccagctgggacatgaacttgtctgccaggcccccgtcgcgtgctgaacggtgttagtttgtaggtaacgcacacaccccacacctaaggtgtctgcatcctcctgccaacgcatgggctccacgtggtgtgctcgctggctgtcgtgactgtcagctgtctcttgggaggggctgtgggggcccgctgggctggcctcctttcccgctagttgtgcctgagagttgctgttgttcctgctttcccttcccttcctttcatcccctgaagggctaggtgtgggttttccgtgcccggtatccccacacacccagcacggacaacccttcggcagagcccaggccggcccctcaccccctggagtattgaaactggagtcccgtccccaaggccttcagagatgcccctacacacccagggctccagctctggtccttctgggggagtaaagtgcaaagaggggcacagcttagttttgggcctctcgccgagcaagagacagcactgctggctacagctccaacacagccagctgtggcaagaggactctgcctgggctggcccccctcctgtgtgaggtgtctgtcccttctctgctggccagcagcagatgcactggcagctcccaaccctgtttccgcccctcggccctcccccagcctgttcggcttctctgcagcccgcaagggggagcagacttttgacaaaggactgcgggcctcgctcaagtccctgagcccccagctgaagctgggaggggaggccaggctttgtgtctgggcatattcgtctgctgatggggtttggggaagcctggggcttggggtttggtcgggtggtgcagctagtggcagagcgggatcagaggtggtggctgcccagcttctgggctgagacaagggtctgtgcaggggtttactgaagtgggagtgcctttggaatctgggccgggagcagaagggagcaaaagctacagtgggagccagcctagggcacatgggaggcgtgagggcagtgctgcccgtgcagtgtcaggtgtgccagtgccttggcgggctgcagtgcgtgtgagggcaccttctaggtgggccagggatgcagctatggagataaggcgggctggggacagaaacaggtgggcacagggcccaggacaccagcggatggagggcagggtctagccctgtgctcctgagcgtcggctgcctgggttcgaggcggtgggtccccggccccttgtgatggtgtgtaccatgggggagctcggggacagggcaagcccgagcatggtggggctgcagggtgggtctgaagccaggttgggtgggggtggtcacaagccctgactgcagagggtcaggggctcctgccccagtgcctgcccactttcaattcacattgttttcaacaaggattttctttatcttcccctacaaatcaagccaagggaggggcacagaatggggaacaggacacaggatcctaaactccaaggggactgtccaccgatgaacactcagagtggacaccatcttccgtccacgctgtgcccaggacagctgtccccatccatgaacacagggtaaacatctgccgggctccgcaccagtggagctgcgccctggtttcgccggacagagttggtgtttgggcc

SEQ ID NO: 307524 - DNA, 2672 bp, Homo sapiens
  misc_feature (9)..(9): n is a, c, g, or t
agcggaggngtgcggcgcgctcctggcgaggacggagcgagcagatctcgcgtgcgctcgccgcccggcgcagcccagcccggcccccgcctggcgccgcgagccgaggtgtctcccgcgcccgcgcccgtgtcgccgccgtgcccgcgagcgggagccggagtcgccgccgcccgagcgcagccgagcgcacgccgagcccgtccgccgccgccatggccaccacggtgacctgcacccgcttcaccgacgagtaccagctctacgaggatattggcaagggggctttctctgtggtccgacgctgtgtcaagctctgcaccggccatgagtatgcagccaagatcatcaacaccaagaagctgtcagccagagatcaccagaagctggagagagaggctcggatctgccgccttctgaagcattccaacatcgtgcgtctccacgacagcatctccgaggagggcttccactacctggtcttcgatctggtcactggtggggagctctttgaagacattgtggcgagagagtactacagcgaggctgatgccagtcactgtatccagcagatcctggaggccgttctccattgtcaccaaatgggggtcgtccacagagacctcaagccggagaacctgcttctggccagcaagtgcaaaggggctgcagtgaagctggcagacttcggcctagctatcgaggtgcagggggaccagcaggcatggtttggtttcgctggcacaccaggctacctgtcccctgaggtccttcgcaaagaggcgtatggcaagcctgtggacatctgggcatgtggggtgatcctgtacatcctgctcgtgggctacccacccttctgggacgaggaccagcacaagctgtaccagcagatcaaggctggtgcctatgacttcccgtcccctgagtgggacaccgtcactcctgaagccaaaaacctcatcaaccagatgctgaccatcaaccctgccaagcgcatcacagcccatgaggccctgaagcacccgtgggtctgccaacgctccacggtagcatccatgatgcacagacaggagactgtggagtgtctgaaaaagttcaatgccaggagaaagctcaagggagccatcctcaccaccatgctggccacacggaatttctcagtgggcagacagaccaccgctccggccacaatgtccaccgcggcctccggcaccaccatggggctggtggaacaagccaagagtttactcaacaagaaagcagatggagtcaagccccagacgaatagcaccaaaaacagtgcagccgccaccagccccaaagggacgcttcctcctgccgccctggagcctcaaaccaccgtcatccataacccagtggacgggattaaggagtcttctgacagtgccaataccaccatagaggatgaagacgctaaagcccggaagcaggagatcattaagaccacggagcagctcatcgaggccgtcaacaacggtgactttgaggcctacgcgaaaatctgtgacccagggctgacctcgtttgagcctgaagcactgggcaacctggttgaagggatggacttccacagattctacttcgagaacctgctggccaagaacagcaagccgatccacacgaccatcctgaacccacacgtgcacgtcattggagaggatgccgcctgcatcgcttacatccggctcacgcagtacattgacgggcagggccggccccgcaccagccagtctgaggagacccgcgtgtggcaccgccgcgacggcaagtggcagaacgtgcacttccactgctcgggcgcgcctgtggccccgctgcagtgaagagctgcgccctggtttcgccggacagagttggtgtttggagcccgactgccctcgggcacacggcctgcctgtcgcatgtttgtgtctgcctcgttccctcccctggtgcctgtgtctgcagaaaaacaagaccagatgtgatttgttaaaaaaaaacaaaaaaaaaaaaaaaaaaaacaagatgacgacgacaaccacaaaaaaaattgacatcagatgaaatgaaaaaaaaaaaaaaacaaaaaaaactaaaggaaggaaaaagctgtaaaaatcactggcattcgtggggccactccccacccaagctccacgtgtgtccgtctgtgctcctggcctctgggggaccagctgggacatgaacttgtctgccaggcccccgtcgcgtgctgaacggtgttagtttgtagccaagggaggggcacagaatggggaacaggacacaggatcctaaactccaaggggactgtccaccgatgaacactcagagtggacaccatcttccgtccacgctgtgcccaggacagctgtccccatccatgaacacagggtaaacatctgccgggctccgcaccagtggctccctgggccatgggacagcggcagggctcaccacggacagcacgtggcccagcagccggccaccctggcgtcctggggcctcctcccctcctctccctctcaccttgtcacctccacggagctgcctgtctgggataatttggggattttttttctgggggataattcttttgcatgacccctaaagagcaagccacaccggtctgctagctaggtgtccgcggtgtggtggtggcggccgct

SEQ ID NO: 307525 - DNA, 2535 bp, Homo sapiens
aataaccaagaggaaacaaattctttggactattaaaaaacagaacaaactttgataaaaaataagatttccaaaagatataatttaaaaaacccttgctggccaagaacagcaagccgatccacacgaccatcctgaacccacacgtgcacgtcattggagaggatgccgcctgcatcgcttacatccggctcacgcagtacattgacgggcagggccggccccgcaccagccagtctgaggagacccgcgtgtggcaccgccgcgacggcaagtggcagaacgtgcacttccactgctcgggcgcgcctgtggccccgctgcagtgaagagctgcgccctggtttcgccggacagagttggtgtttggagcccgactgccctcgggcacacggcctgcctgtcgcatgtttgtgtctgcctcgttccctcccctggtgcctgtgtctgcagaaaaacaagaccagatgtgatttgttaaaaaaaaacaaaaaaaaaaaaaaaaaaaacaagatgacgacgacaaccacaaaaaaaattgacatcagatgaaatgaaaaaaaaaaaaaaacaaaaaaaactaaaggaaggaaaaagctgtaaaaatcactggcattcgtggggccactccccacccaagctccacgtgtgtccgtctgtgctcctggcctctgggggaccagctgggacatgaacttgtctgccaggcccccgtcgcgtgctgaacggtgttagtttgtaggtaacgcacacaccccacacctaaggtgtctgcatcctcctgccaacgcatgggctccacgtggtgtgctcgctggctgtcgtgactgtcagctgtctcttgggaggggctgtgggggcccgctgggctggcctcctttcccgctagttgtgcctgagagttgctgttgttcctgctttcccttcccttcctttcatcccctgaagggctaggtgtgggttttccgtgcccggtatccccacacacccagcacggacaacccttcggcagagcccaggccggcccctcaccccctggagtattgaaactggagtcccgtccccaaggccttcagagatgcccctacacacccagggctccagctctggtccttctgggggagtaaagtgcaaagaggggcacagcttagttttgggcctctcgccgagcaagagacagcactgctggctacagctccaacacagccagctgtggcaagaggactctgcctgggctggcccccctcctgtgtgaggtgtctgtcccttctctgctggccagcagcagatgcactggcagctcccaaccctgtttccgcccctcggccctcccccagcctgttcggcttctctgcagcccgcaagggggagcagacttttgacaaaggactgcgggcctcgctcaagtccctgagcccccagctgaagctgggaggggaggccaggctttgtgtctgggcatattcgtctgctgatggggtttggggaagcctggggcttggggtttggtcgggtggtgcagctagtggcagagcgggatcagaggtggtggctgcccagcttctgggctgagacaagggtctgtgcaggggtttactgaagtgggagtgcctttggaatctgggccgggagcagaagggagcaaaagctacagtgggagccagcctagggcacatgggaggcgtgagggcagtgctgcccgtgcagtgtcaggtgtgccagtgccttggcgggctgcagtgcgtgtgagggcaccttctaggtgggccagggatgcagctatggagataaggcgggctggggacagaaacaggtgggcacagggcccaggacaccagcggatggagggcagggtctagccctgtgctcctgagcgtcggctgcctgggttcgaggcggtgggtccccggccccttgtgatggtgtgtaccatgggggagctcggggacagggcaagcccgagcatggtggggctgcagggtgggtctgaagccaggttgggtgggggtggtcacaagccctgactgcagagggtcaggggctcctgccccagtgcctgcccactttcaattcacattgttttcaacaaggattttctttatcttcccctacaaatcaagccaagggaggggcacagaatggggaacaggacacaggatcctaaactccaaggggactgtccaccgatgaacactcagagtggacaccatcttccgtccacgctgtgcccaggacagctgtccccatccatgaacacagggtaaacatctgccgggctccgcaccagtggctccctgggccatgggacagcggcagggctcaccacggacagcacgtggcccagcagccggccaccctggcgtcctggggcctcctcccctcctctccctctcaccttgtcacctccacggagctgcctgtctgggataatttggggattttttttctgggggataattcttttgcatgacccctaaagagcaagccacaccggtctgctagctaggtgtccgcggtgtggtggtggcggccgct

SEQ ID NO: 307526 - DNA, 2463 bp, Homo sapiens
cacagtcctgggcaccatgccctgtttgtgaggactgttagagccccagatgggcgttccccaggtggtgggtgcagcgggcccagagcccagttttacagggatagtagtaattgggttgggcaccttgaacctctctcccgagtgggcccttttctggactttaaccctctctgcagtgccgcatggcagacagcagagcctgggggtggatgggagagggggctgctgaggagctgacccacccgccccatttcagagctgcgccctggtttcgccggacagagttggtgtttggagcccgactgccctcgggcacacggcctgcctgtcgcatgtttgtgtctgcctcgttccctcccctggtgcctgtgtctgcagaaaaacaagaccagatgtgatttgttaaaaaaaaacaaaaaaaaaaaaaaaaaaaacaagatgacgacgacaaccacaaaaaaaattgacatcagatgaaatgaaaaaaaaaaaaaaacaaaaaaaactaaaggaaggaaaaagctgtaaaaatcactggcattcgtggggccactccccacccaagctccacgtgtgtccgtctgtgctcctggcctctgggggaccagctgggacatgaacttgtctgccaggcccccgtcgcgtgctgaacggtgttagtttgtaggtaacgcacacaccccacacctaaggtgtctgcatcctcctgccaacgcatgggctccacgtggtgtgctcgctggctgtcgtgactgtcagctgtctcttgggaggggctgtgggggcccgctgggctggcctcctttcccgctagttgtgcctgagagttgctgttgttcctgctttcccttcccttcctttcatcccctgaagggctaggtgtgggttttccgtgcccggtatccccacacacccagcacggacaacccttcggcagagcccaggccggcccctcaccccctggagtattgaaactggagtcccgtccccaaggccttcagagatgcccctacacacccagggctccagctctggtccttctgggggagtaaagtgcaaagaggggcacagcttagttttgggcctctcgccgagcaagagacagcactgctggctacagctccaacacagccagctgtggcaagaggactctgcctgggctggcccccctcctgtgtgaggtgtctgtcccttctctgctggccagcagcagatgcactggcagctcccaaccctgtttccgcccctcggccctcccccagcctgttcggcttctctgcagcccgcaagggggagcagacttttgacaaaggactgcgggcctcgctcaagtccctgagcccccagctgaagctgggaggggaggccaggctttgtgtctgggcatattcgtctgctgatggggtttggggaagcctggggcttggggtttggtcgggtggtgcagctagtggcagagcgggatcagaggtggtggctgcccagcttctgggctgagacaagggtctgtgcaggggtttactgaagtgggagtgcctttggaatctgggccgggagcagaagggagcaaaagctacagtgggagccagcctagggcacatgggaggcgtgagggcagtgctgcccgtgcagtgtcaggtgtgccagtgccttggcgggctgcagtgcgtgtgagggcaccttctaggtgggccagggatgcagctatggagataaggcgggctggggacagaaacaggtgggcacagggcccaggacaccagcggatggagggcagggtctagccctgtgctcctgagcgtcggctgcctgggttcgaggcggtgggtccccggccccttgtgatggtgtgtaccatgggggagctcggggacagggcaagcccgagcatggtggggctgcagggtgggtctgaagccaggttgggtgggggtggtcacaagccctgactgcagagggtcaggggctcctgccccagtgcctgcccactttcaattcacattgttttcaacaaggattttctttatcttcccctacaaatcaagccaagggaggggcacagaatggggaacaggacacaggatcctaaactccaaggggactgtccaccgatgaacactcagagtggacaccatcttccgtccacgctgtgcccaggacagctgtccccatccatgaacacagggtaaacatctgccgggctccgcaccagtggctccctgggccatgggacagcggcagggctcaccacggacagcacgtggcccagcagccggccaccctggcgtcctggggcctcctcccctcctctccctctcaccttgtcacctccacggagctgcctgtctgggataatttggggattttttttctgggggataattcttttgcatgacccctaaagagcaagccacaccggtctgctagctaggtgtccgcggtgtggtggtggcggccgct

SEQ ID NO: 307527 - DNA, 2186 bp, Homo sapiens
  misc_feature (9)..(9): n is a, c, g, or t
agcggaggngtgcggcgcgctcctggcgaggacggagcgagcagatctcgcgtgcgctcgccgcccggcgcagcccagcccggcccccgcctggcgccgcgagccgaggtgtctcccgcgcccgcgcccgtgtcgccgccgtgcccgcgagcgggagccggagtcgccgccgcccgagcgcagccgagcgcacgccgagcccgtccgccgccgccatggccaccacggtgacctgcacccgcttcaccgacgagtaccagctctacgaggatattggcaagggggctttctctgtggtccgacgctgtgtcaagctctgcaccggccatgagtatgcagccaagatcatcaacaccaagaagctgtcagccagagatcaccagaagctggagagagaggctcggatctgccgccttctgaagcattccaacatcgtgcgtctccacgacagcatctccgaggagggcttccactacctggtcttcgatctggtcactggtggggagctctttgaagacattgtggcgagagagtactacagcgaggctgatgccagtcactgtatccagcagatcctggaggccgttctccattgtcaccaaatgggggtcgtccacagagacctcaagccggagaacctgcttctggccagcaagtgcaaaggggctgcagtgaagctggcagacttcggcctagctatcgaggtgcagggggaccagcaggcatggtttggtttcgctggcacaccaggctacctgtcccctgaggtccttcgcaaagaggcgtatggcaagcctgtggacatctgggcatgtggggtgatcctgtacatcctgctcgtgggctacccacccttctgggacgaggaccagcacaagctgtaccagcagatcaaggctggtgcctatgacttcccgtcccctgagtgggacaccgtcactcctgaagccaaaaacctcatcaaccagatgctgaccatcaaccctgccaagcgcatcacagcccatgaggccctgaagcacccgtgggtctgccaacgctccacggtagcatccatgatgcacagacaggagactgtggagtgtctgaaaaagttcaatgccaggagaaagctcaagggagccatcctcaccaccatgctggccacacggaatttctcagccaagagtttactcaacaagaaagcagatggagtcaagccccagacgaatagcaccaaaaacagtgcagccgccaccagccccaaagggacgcttcctcctgccgccctggagcctcaaaccaccgtcatccataacccagtggacgggattaaggagtcttctgacagtgccaataccaccatagaggatgaagacgctaaagcccggaagcaggagatcattaagaccacggagcagctcatcgaggccgtcaacaacggtgactttgaggcctacgcgaaaatctgtgacccagggctgacctcgtttgagcctgaagcactgggcaacctggttgaagggatggacttccacagattctacttcgagaacctgctggccaagaacagcaagccgatccacacgaccatcctgaacccacacgtgcacgtcattggagaggatgccgcctgcatcgcttacatccggctcacgcagtacattgacgggcagggccggccccgcaccagccagtctgaggagacccgcgtgtggcaccgccgcgacggcaagtggcagaacgtgcacttccactgctcgggcgcgcctgtggccccgctgcagtgaagccaagggaggggcacagaatggggaacaggacacaggatcctaaactccaaggggactgtccaccgatgaacactcagagtggacaccatcttccgtccacgctgtgcccaggacagctgtccccatccatgaacacagggtaaacatctgccgggctccgcaccagtggctccctgggccatgggacagcggcagggctcaccacggacagcacgtggcccagcagccggccaccctggcgtcctggggcctcctcccctcctctccctctcaccttgtcacctccacggagctgcctgtctgggataatttggggattttttttctgggggataattcttttgcatgacccctaaagagcaagccacaccggtctgctagctaggtgtccgcggtgtggtggtggcggccgct

SEQ ID NO: 307528 - DNA, 1271 bp, Homo sapiens
  misc_feature (9)..(9): n is a, c, g, or t
agcggaggngtgcggcgcgctcctggcgaggacggagcgagcagatctcgcgtgcgctcgccgcccggcgcagcccagcccggcccccgcctggcgccgcgagccgaggtgtctcccgcgcccgcgcccgtgtcgccgccgtgcccgcgagcgggagccggagtcgccgccgcccgagcgcagccgagcgcacgccgagcccgtccgccgccgccatggccaccacggtgacctgcacccgcttcaccgacgagtaccagctctacgaggatattggcaagggggctttctctgtggtccgacgctgtgtcaagctctgcaccggccatgagtatgcagccaagatcatcaacaccaagaagctgtcagccagagatcaccagaagctggagagagaggctcggatctgccgccttctgaagcattccaacatcgtgcgtctccacgacagcatctccgaggagggcttccactacctggtcttcgatctggtcactggtggggagctctttgaagacattgtggcgagagagtactacagcgaggctgatgccagtcactgtatccagcagatcctggaggccgttctccattgtcaccaaatgggggtcgtccacagagacctcaagccggagaacctgcttctggccagcaagtgcaaaggggctgcagtgaagctggcagacttcggcctagctatcgaggtgcagggggaccagcaggcatggtttggtttcgctggcacaccaggctacctgtcccctgaggtccttcgcaaagaggcgtatggcaagcctgtggacatctgggcatgtggggtgatcctgtacatcctgctcgtgggctacccacccttctgggacgaggaccagcacaagctgtaccagcagatcaaggctggtgcctatgacttcccgtcccctgagtgggacaccgtcactcctgaagccaaaaacctcatcaaccagatgctgaccatcaaccctgccaagcgcatcacagcccatgaggccctgaagcacccgtgggtctgccaacgctccacggtagcatccatgatgcacagacaggagactgtggagtgtctgaaaaagttcaatgccaggagaaagctcaagggagccatcctcaccaccatgctggccacacggaatttctcagcagccaagagtttactcaacaagaaagcaggatgatcaggacagcaggatgatcaggacagcaggatgatcaggacagcaggatgatcaggacagcaggatgatcaggac

SEQ ID NO: 307529 - DNA, 406 bp, Homo sapiens
ctgccgccttctgaagcattccaacatcggtgagcagcctggggtagggagcggggatgggtccccaccttctcccggacagcagcccattccggtttctctatcagactttcaaagagatgcagaaagacttccttttcttctctgttgaaatatcccaccagaagcccctgaggacgccccctcttctcccctgaccttgaggactttgtcgtatgtgacatgattcccgggggtgctcagagccggggcagccccaaggtggggctctgggtgcccagctccacccgactggacaggtccctttcccatcccactctgtcctttgggtcttgtcggtggcattggtgcagaggaaggtaaaggacacattcctcacagagccctctgctgagccagtgcccag

SEQ ID NO: 307530 - DNA, 251 bp, Homo sapiens
ttactcaacaagaaagcagatggagtcaaggtgaggctccagccgggccctgtggtgccggggagcccagagcctgcagcttcacccccacgccctggggctcctgctctggagtccccctccccccatgccctgagagacacgggacagggaatggcgagtgaggggcttctcccacctaagagttcctcttccctctctccacagccccagacgaatagcaccaaaaacagtgcagccgccaccagccc

SEQ ID NO: 307531 - DNA, 683 bp, Homo sapiens
gtcgagctattgtacttctacatggatgtgatcagctaccatgttttacctcattgacaagtcctgcgatgtccctcgtcgctttcgtgtcccctagtggaaaatattctcaataatgtaaaataattaaggtctatacatgggttgtatttttctggttcacaacagcacaaagtgtctttcatttttttgttggttttcttttaagatcttttttaccctgaagtcagtgaatacttttctagtttatttgatactctttctgtgtatatattaagcttttgctgtagattgcctagtaaaattactaaggataggttgtttttacatatggtctatttaagtctgatgtttacgggggaaagtgtagttactaaaaatgtttaacataatttggaagaagagtatgaacaaccaataccaatacctattgcgtttggattcttaagaccccagtttgttattccactaaactagttatcttaaccatatcatctggttttgtgggccattatttaccttcccttatgtcttatagaataatggttaatatttttaggtcaaaattacttttggaaagtaactttcccacaattaactgtttttgagcacctgacaaaatttagtgtttaccttgcgtgccattttgtgtcatccttcattaaaaaagcaattggaggttt

SEQ ID NO: 307532 - DNA, 1235 bp, Homo sapiens
cactgaatggcacgaatgccaattaggatgacagtgatgaacaggaagatgatgacagtgaggaggatgaggaggatgccgaggactagtttgaggacgtgactgcttagaaaactgcacagcatctgatgaaattagcgaataagaacatcaaccatgtcttacactccaggagttggtggtgaccccgcccagttggcccagaggatctcttctaacatccagaagatcacacagtgttctgtggaaatacaaagaactctgaatcaacttggaacacctcaagattcacctgaattgaggcaacagttgcaacagaagcagcagtatactaaccagcttgccaaagaaacagataagtacattaaagagtttggatctctgcccaccacccccagtgaacagcgtcaaaggaaaatacagaaggatcgcttagtggcagagttcacaacatcactgacaaacttccagaaggtccagaggcaggctgctgagcgagagaaagagtttgttgctcgagtaagagccagttccagagtgtctggcagttttcctgaggacagctcaaaagaaaggaatcttgtatcctgggaaagccaaactcaacctcaagtgcaggtgcaggatgaagaaattacagaggatgacctccgtcttattcatgagagagaatcttctatcaggcaacttgaagctgatattatggatattaatgaaatatttaaagatttgggaatgatgattcatgaacaaggagatgtaatagatagcatagaagccaatgtggaaaatgcagaggtgcacgttcagcaagcaaatcagcagctgtcaagggcagcagattatcagaaaaaggattcctgcatgttgatgtgaggtacaaacgccattaaagaaatctacaactgaaccaggaatgaagaacggaacaaaattcttaaccattcggttttcaatgacagcattatgattttgtttgctctgtggttttgtttgttgagattttgaatgtagtttcccattaatattaaagaatgagaatgattttggaaactcattccaaaatcattgtattttggaaacaagaaatatgtgtgaggggctgggcgtggtggctcacgcctgtaatcccagcactgtgggaggccgaagtgggcagatcatgaggtgaggagaatgggaccatcctggccaacatggtgaaactccgtctctactaaaaatacaaaaaaaaa

SEQ ID NO: 307533 - DNA, 963 bp, Homo sapiens
cacgagggccgctgtcactcagccccgcgggccaatagaaaaggggtgaaccccgccttcttcctgagttgtgctgcgggcatgcgcactgggcgtccccacgccaccgcccatcagctgagaattgcagctgagggctccggggtaggtgggtgacggcggtcggaggtgtaggagggagccgtggaggtccaggtgactgcttagaaaactgcacagcatctgatgaaattagcgaataagaacatcaaccatgtcttacactccaggagttggtggtgaccccgcccagttggcccagaggatctcttctaacatccagaagatcacacagtgttctgtggaaatacaaagaactctgaatcaacttggaacacctcaagattcacctgaattgaggcaacagttgcaacagaagcagcagtatactaaccagcttgccaaagaaacagataagtacattaaagagtttggatctctgcccaccacccccagtgaacagcgtcaaaggaaaatacagaaggatcgcttagtggcagagttcacaacatcactgacaaacttccagaaggtccagaggcaggctgctgagcgagagaaagagtttgttgctcgagtaagagccagttccagagtgtctggcagttttcctgaggacagtcaaagacaagaaattccagaggatgactccgtcttatttcatggaagagagaatctcctatcagagcaactggaaagcctgtattatggtcttcactgacctcttcacagcttggcaatgatgattcacggaacaggagatgtcttagaagcttagacgcctgtggaaatgcgaggggccgtcgaaagaaatcagaggtcggggcgagatataggcaatcagaaaccggggtaccatcttcggccgggcgcatccgcccaagtggtgcccgagttaagaccgtgccacggtattgagaccgc

SEQ ID NO: 307534 - DNA, 386 bp, Homo sapiens
aatctctctatccttaatctctctatccttaatcctctatccttaatctcctatcttaatctctctatccttaatctctctatccttaacctctctatcctcaatctctcaatcctcaatctctctatccttaatctctctatccttaatctctctatccttaatctctctatccttaatctctctatccttaatctctctatccttaatccggggtaggtgggtgacggcggtcggaggtgtaggagggagccgtggaggtccaggtgactgcttagaaaactgcacagcatctgatgaaattagcgaataagaacattttagctattgttattttttttcagctgtgggtagtgatggtggtgttttgaagattaaggatagag

SEQ ID NO: 307535 - DNA, 3875 bp, Homo sapiens
cacgagggccgctgtcactcagccccgcgggccaatagaaaaggggtgaaccccgccttcttcctgagttgtgctgcgggcatgcgcactgggcgtccccacgccaccgcccatcagctgagaattgcagctgagggctccggggtaggtgggtgacggcggtcggaggtgtaggagggagccgtggaggtccaggtgactgcttagaaaactgcacagcatctgatgaaattagcgaataagaacatcaaccatgtcttacactccaggagttggtggtgaccccgcccagttggcccagaggatctcttctaacatccagaagatcacacagtgttctgtggaaatacaaagaactctgaatcaacttggaacacctcaagattcacctgaattgaggcaacagttgcaacagaagcagcagtatactaaccagcttgccaaagaaacagataagtacattaaagagtttggatctctgcccaccacccccagtgaacagcgtcaaaggaaaatacagaaggatcgcttagtggcagagttcacaacatcactgacaaacttccagaaggtccagaggcaggctgctgagcgagagaaagagtttgttgctcgagtaagagccagttccagagtgtctggcagttttcctgaggacagctcaaaagaaaggaatcttgtatcctgggaaagccaaactcaacctcaagtgcaggtgcaggatgaagaaattacagaggatgacctccgtcttattcatgagagagaatcttctatcaggcaacttgaagctgatattatggatattaatgaaatatttaaagatttgggaatgatgattcatgaacaaggagatgtaatagatagcatagaagccaatgtggaaaatgcagaggtgcacgttcagcaagcaaatcagcagctgtcaagggcagcagattatcagcgcaaatccagaaaaaccctgtgcatcatcattcttatccttgtcattggagttgcgattatcagtctcatcatatggggattgaaccactgaagttataaaggagcacactgtcgcactacattgtctaaattatgtaggaagattcctgtaatcatgtttttttaattattattttaaagctattgtataaaggatggttcccatactttgttatttttattgggggggttggggtggttcctttggattaaatctgatattttctaatactgaaagattttctaaatgtcactgctgacataactcccttggtcttcaatttaatagttgttaagtttttgcccacattgcatatgcctttcatttataatttatttaccctgcttgacttagttttgggaattcgtaaatttaaaggtgtgtgtattctgtttgcatctccctgtcactgtgacacacctagatgtgtgttacttcaattaaaattctcaaatttaattttgatttgcttcagcagggaaaatattctcaataatgtaaaataattaaggtctatacatgggttgtatttttctggttcacaacagcacaaagtgtctttcatttttttgttggttttcttttaagatcttttttaccctgaagtcagtgaatacttttctagtttatttgatactctttctgtgtatatattaagcttttgctgtagattgcctagtaaaattactaaggataggttgtttttacatatggtctatttaagtctgatgtttacgggggaaagtgtagttactaaaaatgtttaacataatttggaagaagagtatgaacaaccaataccaatacctattgcgtttggattcttaagaccccagtttgttattccactaaactagttatcttaaccatatcatctggttttgtgggccattatttaccttcccttatgtcttatagaataatggttaatatttttaggtcaaaattacttttggaaagtaactttcccacaattaactgtttttgagcacctgacaaaatttagtgtttaccttgcgtgccattttgtgtcatccttcattaaaaaagcaattggaggtttgccagttatctcacttccctttttaaatcaatgttgttttaatgcactaatctgaattctgtaaagaggattatcttagtttatactttgtattttataatgttcttgtatagcagttcggtactgaaggcggtgtttaacttggcaagctctgagacttcaaatgggaacaaatagtaagtagctaagtaaaccacatctttgcaaccaaaataaagatgagttaaaaggtatctggttaggcctatttcatgaggactatgctctggtgggaccacaggtcacctgatacttagtgctgtgctgcctgaaacctcagcatggagacatcaccacatgcactgtggccattcagcatctttctggagcaccagttcactccaggtttttattttagggtgtcatcgattttacctactttgtcagactggtagaagttgctttgcatatcagaaaaactccatttttttccacaaaagggattacagaaaactcttttgtgagtgagtgattggaacttagagactcctgttgccagaatcagactgccctagaacagaatggacaatgcagggaggagaattcacacaaacagcacctgttctgaggcctgtgccagcccaccaggcctgctcaaatgtggtctttacttcaagtgcacagaggcacatgaggtttctggtgataaaccagcgtcttaccgctgttttaaagtcccatccccatggctttcacaatcagttccgttttttttgctgtacttgataaaatgtttattctcatacaggtcaagtacatttacttctattcacagtgagtacccaataacaacaaaagcgcttacaaatttggggggcgtgattttagtacctttatttgaagtgtaatcattttaaattattattattttaactggggcagttatcagtggtttaaacaggaactttagtggcttcaattcgtttaagaaacatattaagtttgagggaaaaatttcccatgaaatatttggaacgtaagagtagtattgattagagaaaattaaataagaaacatagtatggtagccaaattttttaaaaaatcttgaacttttctgtaggtcagttttagaactgctgtgaaaagtgaaggttgccctgtggagattaaaattagagttgttttcataactgacagcatggtgaatccatttgagtcaaagtgaagaatttcctcatcaagtgactatacatttgtttttgtgtgctcaaaagaaatactcaaacacagactgatattaaccagccaggtaaattgaacgacaatgtggcattaggtatttggctgtttattggtcgttaaatactatggttttgcaatatgattgatggtaaaagagtgatgtcatattgatactagagtagcttgtttttttagtaggtgtgggaccatctcttttacaagtgcaactcagtctaggacagccatggatgcagtgtctggagttggaccctctgagcccgctggctgccccagtagcatctgcattggtgaccaaggacactgcactttgaagaggtcgccactgggttatttagtgtcttcactgcttttgttaaaaattgtaaaattttgtacacaaaaagttgtgtttttgaatatcaattgtttagacacacctacaatgataaataagtgcctttaaaggcccctctttccatgaaatacatctgtggtttagcaaggaaagtacaaaatagtttatgtagttggtataatttttatttgtgtcttcatgtagaaaaaatgaatgtcataataaaatataaaacttacgtaaaga

SEQ ID NO: 307536 - DNA, 6318 bp, Homo sapiens
  misc_feature (4787)..(4787): n is a, c, g, or t
cacgagggccgctgtcactcagccccgcgggccaatagaaaaggggtgaaccccgccttcttcctgagttgtgctgcgggcatgcgcactgggcgtccccacgccaccgcccatcagctgagaattgcagctgagggctccggggtaggtgggtgacggcggtcggaggtgtaggagggagccgtggaggtccaggtgactgcttagaaaactgcacagcatctgatgaaattagcgaataagaacatcaaccatgtcttacactccaggagttggtggtgaccccgcccagttggcccagaggatctcttctaacatccagaagatcacacagtgttctgtggaaatacaaagaactctgaatcaacttggaacacctcaagattcacctgaattgaggcaacagttgcaacagaagcagcagtatactaaccagcttgccaaagaaacagataagtacattaaagagtttggatctctgcccaccacccccagtgaacagcgtcaaaggaaaatacagaaggatcgcttagtggcagagttcacaacatcactgacaaacttccagaaggtccagaggcaggctgctgagcgagagaaagagtttgttgctcgagtaagagccagttccagagtgtctggcagttttcctgaggacagctcaaaagaaaggaatcttgtatcctgggaaagccaaactcaacctcaagtgcaggtgcaggatgaagaaattacagaggatgacctccgtcttattcatgagagagaatcttctatcaggcaacttgaagctgatattatggatattaatgaaatatttaaagatttgggaatgatgattcatgaacaaggagatgtaatagatagcatagaagccaatgtggaaaatgcagaggtgcacgttcagcaagcaaatcagcagctgtcaagggcagcagattatcagcgcaaatccagaaaaaccctgtgcatcatcattcttatccttgtcattggagttgcgattatcagtctcatcatatggggattgaaccactgaagttataaaggagcacactgtcgcactacattgtctaaattatgtaggaagattcctgtaatcatgtttttttaattattattttaaagctattgtataaaggatggttcccatactttgttatttttattgggggggttggggtggttcctttggattaaatctgatattttctaatactgaaagattttctaaatgtcactgctgacataactcccttggtcttcaatttaatagttgttaagtttttgcccacattgcatatgcctttcatttataatttatttaccctgcttgacttagttttgggaattcgtaaatttaaaggtgtgtgtattctgtttgcatctccctgtcactgtgacacacctagatgtgtgttacttcaattaaaattctcaaatttaattttgatttgcttcagcagggaaaatattctcaataatgtaaaataattaaggtctatacatgggttgtatttttctggttcacaacagcacaaagtgtctttcatttttttgttggttttcttttaagatcttttttaccctgaagtcagtgaatacttttctagtttatttgatactctttctgtgtatatattaagcttttgctgtagattgcctagtaaaattactaaggataggttgtttttacatatggtctatttaagtctgatgtttacgggggaaagtgtagttactaaaaatgtttaacataatttggaagaagagtatgaacaaccaataccaatacctattgcgtttggattcttaagaccccagtttgttattccactaaactagttatcttaaccatatcatctggttttgtgggccattatttaccttcccttatgtcttatagaataatggttaatatttttaggtcaaaattacttttggaaagtaactttcccacaattaactgtttttgagcacctgacaaaatttagtgtttaccttgcgtgccattttgtgtcatccttcattaaaaaagcaattggaggtttgccagttatctcacttccctttttaaatcaatgttgttttaatgcactaatctgaattctgtaaagaggattatcttagtttatactttgtattttataatgttcttgtatagcagttcggtactgaaggcggtgtttaacttggcaagctctgagacttcaaatgggaacaaatagtaagtagctaagtaaaccacatctttgcaaccaaaataaagatgagttaaaaggtatctggttaggcctatttcatgaggactatgctctggtgggaccacaggtcacctgatacttagtgctgtgctgcctgaaacctcagcatggagacatcaccacatgcactgtggccattcagcatctttctggagcaccagttcactccaggtttttattttagggtgtcatcgattttacctactttgtcagactggtagaagttgctttgcatatcagaaaaactccatttttttccacaaaagggattacagaaaactcttttgtgagtgagtgattggaacttagagactcctgttgccagaatcagactgccctagaacagaatggacaatgcagggaggagaattcacacaaacagcacctgttctgaggcctgtgccagcccaccaggcctgctcaaatgtggtctttacttcaagtgcacagaggcacatgaggtttctggtgataaaccagcgtcttaccgctgttttaaagtcccatccccatggctttcacaatcagttccgttttttttgctgtacttgataaaatgtttattctcatacaggtcaagtacatttacttctattcacagtgagtacccaataacaacaaaagcgcttacaaatttggggggcgtgattttagtacctttatttgaagtgtaatcattttaaattattattattttaactggggcagttatcagtggtttaaacaggaactttagtggcttcaattcgtttaagaaacatattaagtttgagggaaaaatttcccatgaaatatttggaacgtaagagtagtattgattagagaaaattaaataagaaacatagtatggtagccaaattttttaaaaaatcttgaacttttctgtaggtcagttttagaactgctgtgaaaagtgaaggttgccctgtggagattaaaattagagttgttttcataactgacagcatggtgaatccatttgagtcaaagtgaagaatttcctcatcaagtgactatacatttgtttttgtgtgctcaaaagaaatactcaaacacagactgatattaaccagccaggtaaattgaacgacaatgtggcattaggtatttggctgtttattggtcgttaaatactatggttttgcaatatgattgatggtaaaagagtgatgtcatattgatactagagtagcttgtttttttagtaggtgtgggaccatctcttttacaagtgcaactcagtctaggacagccatggatgcagtgtctggagttggaccctctgagcccgctggctgccccagtagcatctgcattggtgaccaaggacactgcactttgaagaggtcgccactgggttatttagtgtcttcactgcttttgttaaaaattgtaaaattttgtacacaaaaagttgtgtttttgaatatcaattgtttagacacacctacaatgataaataagtgcctttaaaggcccctctttccatgaaatacatctgtggtttagcaaggaaagtacaaaatagtttatgtagttggtataatttttatttgtgtcttcatgtagaaaaaatgaatgtcataataaaatataaaacttacgtaaagaaaataaagtcattgtccaccttaatagctaaggtccacaagggtaacttatgcagcatttattttttttgaaagtcaaaattgaatttatttctttcacatggctggtttgctgcaatatgaagtttcagaatgggctgaagtaagttgattgagggatttgagttgaatgacattttcaagttcatttaaatatgataaaaattcattggtggtaaataacatctgtctttcctggaaaaaaaaaagttgtgtattttcatgattcagttaaaacaaaaaatgagcctgtgaatcccaggcctttttagtcctccataacatttgaacagtttgacttgtcagcaaagaaatacacttatcaaattttaaaccaatgggagcctgaaagtgttacagtgtactgcttctttgacaaaattctgtttaacaactaccctaacataatttataaatcaattaagataaaaccatttttttctgagtatttaggaatttgtgtcctcaaaatactgtgacatgaaagataggaaagaaattacctggttgccagacatgcacgattatctttcctcatttcagctggattttccaaagtcagtagattggataaagcagcatctcattcactgaggtcacaagataggtaggaaacttctttaatgtgaattttgcatattttaacaattcagttagaaaaacagaaaccacttgatggattataagtgtaaagtgttttaacatagggaattagacatcaaaagggtgggtgaggaaggtgtctgcggccccaaagtgggtggatctcaggagctggcccaggcactgctgtgactcttgagaacatccagaaggctgtgctgttggcgtgcagcactgacagtgtgtctcagggagctgtccccagctgtcngctgttaatagctccaaagccagtgccttgcaagagattttgaaactgctgtgaaactcatgtcctctgcccgcctacacttctgtctgcagtggcctctgaggaaagatggtctctccttttctcatggtcaactctcaacttagaaccagagacagaaggagtttgtgggaagtgtggtttctggtctacctgcactgcagaggacattctagaaagagaagtgagttgacagtctagcataattgtgaaacaaacactgagatgtacagttcaaaccacgtgaagtggaagcctcagaattttcctcactttcattaaagattctttgatggaaaaatttagaagcattggctctagatggtaagcaagtcatttttttccaaccaaaataaaaaatacatatactaagcttctggggccccaggacttaacacagtttccttccttccttcccttcttccttccctcccgtagtagttgcttaataaatacttaatttggcacttatttggggccggctttttgccaggctactacatgcctgggcatagtgttctaagagtgaaccaaaagaataagcttcctgccctcagggagtttatgttttgttatttggcatataaaaagaacttggtgtgttaaaagaagggaaatagctgtgtgaaaggaatgaggcaaggaaaaaggggaatgtctaaatataaatctccgtttggaccagcctcctgtttatccagttttccttactaagtaactgaatttcattttcttttcttaattgacagactaccagaaaattgctagttttctaaagagaaactactgatttgagtgatgatctgtgtgtaatggctccaaaaaggagccgttctcttggtggcagcagttggattcagagcttgggcatcctgatcatcaggacagacatttacaggatatgtatagaattactgccccaaatagagggcaaagcactagacagaagggtgagatccaaggggaatttggaatctatatttcatcagaatgcactcaaagcaaaaacagtaagtatgctccatataaagaaatgtttcttaaaatgtttttaatttaaccctacccatcccttggcaaatctttttcttttaaatcaaataggaataaagaagaaaatcttcctaaaggcccattttctcattattcaaataccatatcaatacaccaattttaattctttgtttttgtaatcatttggttaacatgaatattatgtaatatttttctccaaataatcctaattttaaatgcagaaatagagctaaataacacactaaataggtttttgtagacactgtagcttctggcaagtttttaagaggttggtcacttaattgcttagagtgggattcccgtaggttttgtgtagtgatggcatttatgcttaaaatgtaagtggtggaaggcaaaaccagatttcctgtccagtcgttacacgcacaacacctctacttgttgacgagggagttttctagaactgaattgaatc

SEQ ID NO: 307537 - DNA, 5263 bp, Homo sapiens
cacgagggccgctgtcactcagccccgcgggccaatagaaaaggggtgaaccccgccttcttcctgagttgtgctgcgggcatgcgcactgggcgtccccacgccaccgcccatcagctgagaattgcagctgagggctccggggtaggtgggtgacggcggtcggaggtgtaggagggagccgtggaggtccaggtgactgcttagaaaactgcacagcatctgatgaaattagcgaataagaacatcaaccatgtcttacactccaggagttggtggtgaccccgcccagttggcccagaggatctcttctaacatccagaagatcacacagtgttctgtggaaatacaaagaactctgaatcaacttggaacacctcaagattcacctgaattgaggcaacagttgcaacagaagcagcagtatactaaccagcttgccaaagaaacagataagtacattaaagagtttggatctctgcccaccacccccagtgaacagcgtcaaaggaaaatacagaaggatcgcttagtggcagagttcacaacatcactgacaaacttccagaaggtccagaggcaggctgctgagcgagagaaagagtttgttgctcgagtaagagccagttccagagtgtctggcagttttcctgaggacagctcaaaagaaaggaatcttgtatcctgggaaagccaaactcaacctcaagtgcaggtgcaggatgaagaaattacagaggatgacctccgtcttattcatgagagagaatcttctatcaggcaacttgaagctgatattatggatattaatgaaatatttaaagatttgggaatgatgattcatgaacaaggagatgtaatagatagcatagaagccaatgtggaaaatgcagaggtgcacgttcagcaagcaaatcagcagctgtcaagggcagcagattatcagcgcaaatccagaaaaaccctgtgcatcatcattcttatccttgtcattggagttgcgattatcagtctcatcatatggggattgaaccactgaagttataaaggagcacactgtcgcactacattgtctaaattatgtaggaagattcctgtaatcatgtttttttaattattattttaaagctattgtataaaggatggttcccatactttgttatttttattgggggggttggggtggttcctttggattaaatctgatattttctaatactgaaagattttctaaatgtcactgctgacataactcccttggtcttcaatttaatagttgttaagtttttgcccacattgcatatgcctttcatttataatttatttaccctgcttgacttagttttgggaattcgtaaatttaaaggtgtgtgtattctgtttgcatctccctgtcactgtgacacacctagatgtgtgttacttcaattaaaattctcaaatttaattttgatttgcttcagcagggaaaatattctcaataatgtaaaataattaaggtctatacatgggttgtatttttctggttcacaacagcacaaagtgtctttcatttttttgttggttttcttttaagatcttttttaccctgaagtcagtgaatacttttctagtttatttgatactctttctgtgtatatattaagcttttgctgtagattgcctagtaaaattactaaggataggttgtttttacatatggtctatttaagtctgatgtttacgggggaaagtgtagttactaaaaatgtttaacataatttggaagaagagtatgaacaaccaataccaatacctattgcgtttggattcttaagaccccagtttgttattccactaaactagttatcttaaccatatcatctggttttgtgggccattatttaccttcccttatgtcttatagaataatggttaatatttttaggtcaaaattacttttggaaagtaactttcccacaattaactgtttttgagcacctgacaaaatttagtgtttaccttgcgtgccattttgtgtcatccttcattaaaaaagcaattggaggtttgccagttatctcacttccctttttaaatcaatgttgttttaatgcactaatctgaattctgtaaagaggattatcttagtttatactttgtattttataatgttcttgtatagcagttcggtactgaaggcggtgtttaacttggcaagctctgagacttcaaatgggaacaaatagtaagtagctaagtaaaccacatctttgcaaccaaaataaagatgagttaaaaggtatctggttaggcctatttcatgaggactatgctctggtgggaccacaggtcacctgatacttagtgctgtgctgcctgaaacctcagcatggagacatcaccacatgcactgtggccattcagcatctttctggagcaccagttcactccaggtttttattttagggtgtcatcgattttacctactttgtcagactggtagaagttgctttgcatatcagaaaaactccatttttttccacaaaagggattacagaaaactcttttgtgagtgagtgattggaacttagagactcctgttgccagaatcagactgccctagaacagaatggacaatgcagggaggagaattcacacaaacagcacctgttctgaggcctgtgccagcccaccaggcctgctcaaatgtggtctttacttcaagtgcacagaggcacatgaggtttctggtgataaaccagcgtcttaccgctgttttaaagtcccatccccatggctttcacaatcagttccgttttttttgctgtacttgataaaatgtttattctcatacaggtcaagtacatttacttctattcacagtgagtacccaataacaacaaaagcgcttacaaatttggggggcgtgattttagtacctttatttgaagtgtaatcattttaaattattattattttaactggggcagttatcagtggtttaaacaggaactttagtggcttcaattcgtttaagaaacatattaagtttgagggaaaaatttcccatgaaatatttggaacgtaagagtagtattgattagagaaaattaaataagaaacatagtatggtagccaaattttttaaaaaatcttgaacttttctgtaggtcagttttagaactgctgtgaaaagtgaaggttgccctgtggagattaaaattagagttgttttcataactgacagcatggtgaatccatttgagtcaaagtgaagaatttcctcatcaagtgactatacatttgtttttgtgtgctcaaaagaaatactcaaacacagactgatattaaccagccaggtaaattgaacgacaatgtggcattaggtatttggctgtttattggtcgttaaatactatggttttgcaatatgattgatggtaaaagagtgatgtcatattgatactagagtagcttgtttttttagtaggtgtgggaccatctcttttacaagtgcaactcagtctaggacagccatggatgcagtgtctggagttggaccctctgagcccgctggctgccccagtagcatctgcattggtgaccaaggacactgcactttgaagaggtcgccactgggttatttagtgtcttcactgcttttgttaaaaattgtaaaattttgtacacaaaaagttgtgtttttgaatatcaattgtttagacacacctacaatgataaataagtgcctttaaaggcccctctttccatgaaatacatctgtggtttagcaaggaaagtacaaaatagtttatgtagttggtataatttttatttgtgtcttcatgtagaaaaaatgaatgtcataataaaatataaaacttacgtaaagaaaataaagtcattgtccaccttaatagctaaggtccacaagggtaacttatgcagcatttattttttttgaaagtcaaaattgaatttatttctttcacatggctggtttgctgcaatatgaagtttcagaatgggctgaagtaagttgattgagggatttgagttgaatgacattttcaagttcatttaaatatgataaaaattcattggtggtaaataacatctgtctttcctggaaaaaaaaaagttgtgtattttcatgattcagttaaaacaaaaaatgagcctgtgaatcccaggcctttttagtcctccataacatttgaacagtttgacttgtcagcaaagaaatacacttatcaaattttaaaccaatgggagcctgaaagtgttacagtgtactgcttctttgacaaaattctgtttaacaactaccctaacataatttataaatcaattaagataaaaccatttttttctgagtatttaggaatttgtgtcctcaaaatactgtgacatgaaagataggaaagaaattacctggttgccagacatgcacgattatctttcctcatttcagctggattttccaaagtcagtagattggataaagcagcatctcattcactgaggtcacaagatagactaccagaaaattgctagttttctaaagagaaactactgatttgagtgatgatctgtgtgtaatggctccaaaaaggagccgttctcttggtggcagcagttggattcagagcttgggcatcctgatcatcaggacagacatttacaggatatgtatagaattactgccccaaatagagggcaaagcactagacagaagggtgagatccaaggggaatttggaatctatatttcatcagaatgcactcaaagcaaaaacagtaagtatgctccatataaagaaatgtttcttaaaatgtttttaatttaaccctacccatcccttggcaaatctttttcttttaaatcaaataggaataaagaagaaaatcttcctaaaggcccattttctcattattcaaataccatatcaatacaccaattttaattctttgtttttgtaatcatttggttaacatgaatattatgtaatatttttctccaaataatcctaattttaaatgcagaaatagagctaaataacacactaaataggtttttgtagacactgtagcttctggcaagtttttaagaggttggtcacttaattgcttagagtgggattcccgtaggttttgtgtagtgatggcatttatgcttaaaatgtaagtggtggaaggcaaaaccagatttcctgtccagtcgttacacgcacaacacctctacttgttgacgagggagttttctagaactgaattgaatc

SEQ ID NO: 307538 - DNA, 3820 bp, Homo sapiens
cacgagggccgctgtcactcagccccgcgggccaatagaaaaggggtgaaccccgccttcttcctgagttgtgctgcgggcatgcgcactgggcgtccccacgccaccgcccatcagctgagaattgcagctgagggctccggggtaggtgggtgacggcggtcggaggtgtaggagggagccgtggaggtccaggtgactgcttagaaaactgcacagcatctgatgaaattagcgaataagaacatcaaccatgtcttacactccaggagttggtggtgaccccgcccagttggcccagaggatctcttctaacatccagaagatcacacagtgttctgtggaaatacaaagaactctgaatcaacttggaacacctcaagattcacctgaattgaggcaacagttgcaacagaagcagcagtatactaaccagcttgccaaagaaacagataagtacattaaagagtttggatctctgcccaccacccccagtgaacagcgtcaaaggaaaatacagaaggatcgcttagtggcagagttcacaacatcactgacaaacttccagaaggtccagaggcaggctgctgagcgagagaaagagtttgttgctcgagtaagagccagttccagagtgtctggcagttttcctgaggacagctcaaaagaaaggaatcttgtatcctgggaaagccaaactcaacctcaagtgcaggtgcaggatgaagaaattacagaggatgacctccgtcttattcatgagagagaatcttctatcaggcaacttgaagctgatattatggatattaatgaaatatttaaagatttgggaatgatgattcatgaacaaggagatgtaatagatagcatagaagccaatgtggaaaatgcagaggtgcacgttcagcaagcaaatcagcagctgtcaagggcagcagattatcagcgattatcagtctcatcatatggggattgaaccactgaagttataaaggagcacactgtcgcactacattgtctaaattatgtaggaagattcctgtaatcatgtttttttaattattattttaaagctattgtataaaggatggttcccatactttgttatttttattgggggggttggggtggttcctttggattaaatctgatattttctaatactgaaagattttctaaatgtcactgctgacataactcccttggtcttcaatttaatagttgttaagtttttgcccacattgcatatgcctttcatttataatttatttaccctgcttgacttagttttgggaattcgtaaatttaaaggtgtgtgtattctgtttgcatctccctgtcactgtgacacacctagatgtgtgttacttcaattaaaattctcaaatttaattttgatttgcttcagcagggaaaatattctcaataatgtaaaataattaaggtctatacatgggttgtatttttctggttcacaacagcacaaagtgtctttcatttttttgttggttttcttttaagatcttttttaccctgaagtcagtgaatacttttctagtttatttgatactctttctgtgtatatattaagcttttgctgtagattgcctagtaaaattactaaggataggttgtttttacatatggtctatttaagtctgatgtttacgggggaaagtgtagttactaaaaatgtttaacataatttggaagaagagtatgaacaaccaataccaatacctattgcgtttggattcttaagaccccagtttgttattccactaaactagttatcttaaccatatcatctggttttgtgggccattatttaccttcccttatgtcttatagaataatggttaatatttttaggtcaaaattacttttggaaagtaactttcccacaattaactgtttttgagcacctgacaaaatttagtgtttaccttgcgtgccattttgtgtcatccttcattaaaaaagcaattggaggtttgccagttatctcacttccctttttaaatcaatgttgttttaatgcactaatctgaattctgtaaagaggattatcttagtttatactttgtattttataatgttcttgtatagcagttcggtactgaaggcggtgtttaacttggcaagctctgagacttcaaatgggaacaaatagtaagtagctaagtaaaccacatctttgcaaccaaaataaagatgagttaaaaggtatctggttaggcctatttcatgaggactatgctctggtgggaccacaggtcacctgatacttagtgctgtgctgcctgaaacctcagcatggagacatcaccacatgcactgtggccattcagcatctttctggagcaccagttcactccaggtttttattttagggtgtcatcgattttacctactttgtcagactggtagaagttgctttgcatatcagaaaaactccatttttttccacaaaagggattacagaaaactcttttgtgagtgagtgattggaacttagagactcctgttgccagaatcagactgccctagaacagaatggacaatgcagggaggagaattcacacaaacagcacctgttctgaggcctgtgccagcccaccaggcctgctcaaatgtggtctttacttcaagtgcacagaggcacatgaggtttctggtgataaaccagcgtcttaccgctgttttaaagtcccatccccatggctttcacaatcagttccgttttttttgctgtacttgataaaatgtttattctcatacaggtcaagtacatttacttctattcacagtgagtacccaataacaacaaaagcgcttacaaatttggggggcgtgattttagtacctttatttgaagtgtaatcattttaaattattattattttaactggggcagttatcagtggtttaaacaggaactttagtggcttcaattcgtttaagaaacatattaagtttgagggaaaaatttcccatgaaatatttggaacgtaagagtagtattgattagagaaaattaaataagaaacatagtatggtagccaaattttttaaaaaatcttgaacttttctgtaggtcagttttagaactgctgtgaaaagtgaaggttgccctgtggagattaaaattagagttgttttcataactgacagcatggtgaatccatttgagtcaaagtgaagaatttcctcatcaagtgactatacatttgtttttgtgtgctcaaaagaaatactcaaacacagactgatattaaccagccaggtaaattgaacgacaatgtggcattaggtatttggctgtttattggtcgttaaatactatggttttgcaatatgattgatggtaaaagagtgatgtcatattgatactagagtagcttgtttttttagtaggtgtgggaccatctcttttacaagtgcaactcagtctaggacagccatggatgcagtgtctggagttggaccctctgagcccgctggctgccccagtagcatctgcattggtgaccaaggacactgcactttgaagaggtcgccactgggttatttagtgtcttcactgcttttgttaaaaattgtaaaattttgtacacaaaaagttgtgtttttgaatatcaattgtttagacacacctacaatgataaataagtgcctttaaaggcccctctttccatgaaatacatctgtggtttagcaaggaaagtacaaaatagtttatgtagttggtataatttttatttgtgtcttcatgtagaaaaaatgaatgtcataataaaatataaaacttacgtaaaga

SEQ ID NO: 307539 - DNA, 3778 bp, Homo sapiens
cactgaatggcacgaatgccaattaggatgacagtgatgaacaggaagatgatgacagtgaggaggatgaggaggatgccgaggactagtttgaggacgtgactgcttagaaaactgcacagcatctgatgaaattagcgaataagaacatcaaccatgtcttacactccaggagttggtggtgaccccgcccagttggcccagaggatctcttctaacatccagaagatcacacagtgttctgtggaaatacaaagaactctgaatcaacttggaacacctcaagattcacctgaattgaggcaacagttgcaacagaagcagcagtatactaaccagcttgccaaagaaacagataagtacattaaagagtttggatctctgcccaccacccccagtgaacagcgtcaaaggaaaatacagaaggatcgcttagtggcagagttcacaacatcactgacaaacttccagaaggtccagaggcaggctgctgagcgagagaaagagtttgttgctcgagtaagagccagttccagagtgtctggcagttttcctgaggacagctcaaaagaaaggaatcttgtatcctgggaaagccaaactcaacctcaagtgcaggtgcaggatgaagaaattacagaggatgacctccgtcttattcatgagagagaatcttctatcaggcaacttgaagctgatattatggatattaatgaaatatttaaagatttgggaatgatgattcatgaacaaggagatgtaatagatagcatagaagccaatgtggaaaatgcagaggtgcacgttcagcaagcaaatcagcagctgtcaagggcagcagattatcagcgcaaatccagaaaaaccctgtgcatcatcattcttatccttgtcattggagttgcgattatcagtctcatcatatggggattgaaccactgaagttataaaggagcacactgtcgcactacattgtctaaattatgtaggaagattcctgtaatcatgtttttttaattattattttaaagctattgtataaaggatggttcccatactttgttatttttattgggggggttggggtggttcctttggattaaatctgatattttctaatactgaaagattttctaaatgtcactgctgacataactcccttggtcttcaatttaatagttgttaagtttttgcccacattgcatatgcctttcatttataatttatttaccctgcttgacttagttttgggaattcgtaaatttaaaggtgtgtgtattctgtttgcatctccctgtcactgtgacacacctagatgtgtgttacttcaattaaaattctcaaatttaattttgatttgcttcagcagggaaaatattctcaataatgtaaaataattaaggtctatacatgggttgtatttttctggttcacaacagcacaaagtgtctttcatttttttgttggttttcttttaagatcttttttaccctgaagtcagtgaatacttttctagtttatttgatactctttctgtgtatatattaagcttttgctgtagattgcctagtaaaattactaaggataggttgtttttacatatggtctatttaagtctgatgtttacgggggaaagtgtagttactaaaaatgtttaacataatttggaagaagagtatgaacaaccaataccaatacctattgcgtttggattcttaagaccccagtttgttattccactaaactagttatcttaaccatatcatctggttttgtgggccattatttaccttcccttatgtcttatagaataatggttaatatttttaggtcaaaattacttttggaaagtaactttcccacaattaactgtttttgagcacctgacaaaatttagtgtttaccttgcgtgccattttgtgtcatccttcattaaaaaagcaattggaggtttgccagttatctcacttccctttttaaatcaatgttgttttaatgcactaatctgaattctgtaaagaggattatcttagtttatactttgtattttataatgttcttgtatagcagttcggtactgaaggcggtgtttaacttggcaagctctgagacttcaaatgggaacaaatagtaagtagctaagtaaaccacatctttgcaaccaaaataaagatgagttaaaaggtatctggttaggcctatttcatgaggactatgctctggtgggaccacaggtcacctgatacttagtgctgtgctgcctgaaacctcagcatggagacatcaccacatgcactgtggccattcagcatctttctggagcaccagttcactccaggtttttattttagggtgtcatcgattttacctactttgtcagactggtagaagttgctttgcatatcagaaaaactccatttttttccacaaaagggattacagaaaactcttttgtgagtgagtgattggaacttagagactcctgttgccagaatcagactgccctagaacagaatggacaatgcagggaggagaattcacacaaacagcacctgttctgaggcctgtgccagcccaccaggcctgctcaaatgtggtctttacttcaagtgcacagaggcacatgaggtttctggtgataaaccagcgtcttaccgctgttttaaagtcccatccccatggctttcacaatcagttccgttttttttgctgtacttgataaaatgtttattctcatacaggtcaagtacatttacttctattcacagtgagtacccaataacaacaaaagcgcttacaaatttggggggcgtgattttagtacctttatttgaagtgtaatcattttaaattattattattttaactggggcagttatcagtggtttaaacaggaactttagtggcttcaattcgtttaagaaacatattaagtttgagggaaaaatttcccatgaaatatttggaacgtaagagtagtattgattagagaaaattaaataagaaacatagtatggtagccaaattttttaaaaaatcttgaacttttctgtaggtcagttttagaactgctgtgaaaagtgaaggttgccctgtggagattaaaattagagttgttttcataactgacagcatggtgaatccatttgagtcaaagtgaagaatttcctcatcaagtgactatacatttgtttttgtgtgctcaaaagaaatactcaaacacagactgatattaaccagccaggtaaattgaacgacaatgtggcattaggtatttggctgtttattggtcgttaaatactatggttttgcaatatgattgatggtaaaagagtgatgtcatattgatactagagtagcttgtttttttagtaggtgtgggaccatctcttttacaagtgcaactcagtctaggacagccatggatgcagtgtctggagttggaccctctgagcccgctggctgccccagtagcatctgcattggtgaccaaggacactgcactttgaagaggtcgccactgggttatttagtgtcttcactgcttttgttaaaaattgtaaaattttgtacacaaaaagttgtgtttttgaatatcaattgtttagacacacctacaatgataaataagtgcctttaaaggcccctctttccatgaaatacatctgtggtttagcaaggaaagtacaaaatagtttatgtagttggtataatttttatttgtgtcttcatgtagaaaaaatgaatgtcataataaaatataaaacttacgtaaaga

SEQ ID NO: 307540 - DNA, 3505 bp, Homo sapiens
gcgcgcgtcgacccggccgcctcgacacggtgcgagaagcaacagaagcagcagtatactaaccagcttgccaaagaaacagataagtacattaaagagtttggatctctgcccaccacccccagtgaacagcgtcaaaggaaaatacagaaggatcgcttagtggcagagttcacaacatcactgacaaacttccagaaggtccagaggcaggctgctgagcgagagaaagagtttgttgctcgagtaagagccagttccagagtgtctggcagttttcctgaggacagctcaaaagaaaggaatcttgtatcctgggaaagccaaactcaacctcaagtgcaggtgcaggatgaagaaattacagaggatgacctccgtcttattcatgagagagaatcttctatcaggcaacttgaagctgatattatggatattaatgaaatatttaaagatttgggaatgatgattcatgaacaaggagatgtaatagatagcatagaagccaatgtggaaaatgcagaggtgcacgttcagcaagcaaatcagcagctgtcaagggcagcagattatcagcgcaaatccagaaaaaccctgtgcatcatcattcttatccttgtcattggagttgcgattatcagtctcatcatatggggattgaaccactgaagttataaaggagcacactgtcgcactacattgtctaaattatgtaggaagattcctgtaatcatgtttttttaattattattttaaagctattgtataaaggatggttcccatactttgttatttttattgggggggttggggtggttcctttggattaaatctgatattttctaatactgaaagattttctaaatgtcactgctgacataactcccttggtcttcaatttaatagttgttaagtttttgcccacattgcatatgcctttcatttataatttatttaccctgcttgacttagttttgggaattcgtaaatttaaaggtgtgtgtattctgtttgcatctccctgtcactgtgacacacctagatgtgtgttacttcaattaaaattctcaaatttaattttgatttgcttcagcagggaaaatattctcaataatgtaaaataattaaggtctatacatgggttgtatttttctggttcacaacagcacaaagtgtctttcatttttttgttggttttcttttaagatcttttttaccctgaagtcagtgaatacttttctagtttatttgatactctttctgtgtatatattaagcttttgctgtagattgcctagtaaaattactaaggataggttgtttttacatatggtctatttaagtctgatgtttacgggggaaagtgtagttactaaaaatgtttaacataatttggaagaagagtatgaacaaccaataccaatacctattgcgtttggattcttaagaccccagtttgttattccactaaactagttatcttaaccatatcatctggttttgtgggccattatttaccttcccttatgtcttatagaataatggttaatatttttaggtcaaaattacttttggaaagtaactttcccacaattaactgtttttgagcacctgacaaaatttagtgtttaccttgcgtgccattttgtgtcatccttcattaaaaaagcaattggaggtttgccagttatctcacttccctttttaaatcaatgttgttttaatgcactaatctgaattctgtaaagaggattatcttagtttatactttgtattttataatgttcttgtatagcagttcggtactgaaggcggtgtttaacttggcaagctctgagacttcaaatgggaacaaatagtaagtagctaagtaaaccacatctttgcaaccaaaataaagatgagttaaaaggtatctggttaggcctatttcatgaggactatgctctggtgggaccacaggtcacctgatacttagtgctgtgctgcctgaaacctcagcatggagacatcaccacatgcactgtggccattcagcatctttctggagcaccagttcactccaggtttttattttagggtgtcatcgattttacctactttgtcagactggtagaagttgctttgcatatcagaaaaactccatttttttccacaaaagggattacagaaaactcttttgtgagtgagtgattggaacttagagactcctgttgccagaatcagactgccctagaacagaatggacaatgcagggaggagaattcacacaaacagcacctgttctgaggcctgtgccagcccaccaggcctgctcaaatgtggtctttacttcaagtgcacagaggcacatgaggtttctggtgataaaccagcgtcttaccgctgttttaaagtcccatccccatggctttcacaatcagttccgttttttttgctgtacttgataaaatgtttattctcatacaggtcaagtacatttacttctattcacagtgagtacccaataacaacaaaagcgcttacaaatttggggggcgtgattttagtacctttatttgaagtgtaatcattttaaattattattattttaactggggcagttatcagtggtttaaacaggaactttagtggcttcaattcgtttaagaaacatattaagtttgagggaaaaatttcccatgaaatatttggaacgtaagagtagtattgattagagaaaattaaataagaaacatagtatggtagccaaattttttaaaaaatcttgaacttttctgtaggtcagttttagaactgctgtgaaaagtgaaggttgccctgtggagattaaaattagagttgttttcataactgacagcatggtgaatccatttgagtcaaagtgaagaatttcctcatcaagtgactatacatttgtttttgtgtgctcaaaagaaatactcaaacacagactgatattaaccagccaggtaaattgaacgacaatgtggcattaggtatttggctgtttattggtcgttaaatactatggttttgcaatatgattgatggtaaaagagtgatgtcatattgatactagagtagcttgtttttttagtaggtgtgggaccatctcttttacaagtgcaactcagtctaggacagccatggatgcagtgtctggagttggaccctctgagcccgctggctgccccagtagcatctgcattggtgaccaaggacactgcactttgaagaggtcgccactgggttatttagtgtcttcactgcttttgttaaaaattgtaaaattttgtacacaaaaagttgtgtttttgaatatcaattgtttagacacacctacaatgataaataagtgcctttaaaggcccctctttccatgaaatacatctgtggtttagcaaggaaagtacaaaatagtttatgtagttggtataatttttatttgtgtcttcatgtagaaaaaatgaatgtcataataaaatataaaacttacgtaaaga

SEQ ID NO: 307541 - DNA, 3544 bp, Homo sapiens
  misc_feature (1)..(1): n is a, c, g, or t
nagaaacagataagtacactgctgcttctgttgcaactgttgcctcaattcaggtgaatcttgaggtgttccaagttgcaacagaagcagcagtatactaaccagcttgccaaagaaacagataagtacattaaagagtttggatctctgcccaccacccccagtgaacagcgtcaaaggaaaatacagaaggatcgcttagtggcagagttcacaacatcactgacaaacttccagaaggtccagaggcaggctgctgagcgagagaaagagtttgttgctcgagtaagagccagttccagagtgtctggcagttttcctgaggacagctcaaaagaaaggaatcttgtatcctgggaaagccaaactcaacctcaagtgcaggtgcaggatgaagaaattacagaggatgacctccgtcttattcatgagagagaatcttctatcaggcaacttgaagctgatattatggatattaatgaaatatttaaagatttgggaatgatgattcatgaacaaggagatgtaatagatagcatagaagccaatgtggaaaatgcagaggtgcacgttcagcaagcaaatcagcagctgtcaagggcagcagattatcagcgcaaatccagaaaaaccctgtgcatcatcattcttatccttgtcattggagttgcgattatcagtctcatcatatggggattgaaccactgaagttataaaggagcacactgtcgcactacattgtctaaattatgtaggaagattcctgtaatcatgtttttttaattattattttaaagctattgtataaaggatggttcccatactttgttatttttattgggggggttggggtggttcctttggattaaatctgatattttctaatactgaaagattttctaaatgtcactgctgacataactcccttggtcttcaatttaatagttgttaagtttttgcccacattgcatatgcctttcatttataatttatttaccctgcttgacttagttttgggaattcgtaaatttaaaggtgtgtgtattctgtttgcatctccctgtcactgtgacacacctagatgtgtgttacttcaattaaaattctcaaatttaattttgatttgcttcagcagggaaaatattctcaataatgtaaaataattaaggtctatacatgggttgtatttttctggttcacaacagcacaaagtgtctttcatttttttgttggttttcttttaagatcttttttaccctgaagtcagtgaatacttttctagtttatttgatactctttctgtgtatatattaagcttttgctgtagattgcctagtaaaattactaaggataggttgtttttacatatggtctatttaagtctgatgtttacgggggaaagtgtagttactaaaaatgtttaacataatttggaagaagagtatgaacaaccaataccaatacctattgcgtttggattcttaagaccccagtttgttattccactaaactagttatcttaaccatatcatctggttttgtgggccattatttaccttcccttatgtcttatagaataatggttaatatttttaggtcaaaattacttttggaaagtaactttcccacaattaactgtttttgagcacctgacaaaatttagtgtttaccttgcgtgccattttgtgtcatccttcattaaaaaagcaattggaggtttgccagttatctcacttccctttttaaatcaatgttgttttaatgcactaatctgaattctgtaaagaggattatcttagtttatactttgtattttataatgttcttgtatagcagttcggtactgaaggcggtgtttaacttggcaagctctgagacttcaaatgggaacaaatagtaagtagctaagtaaaccacatctttgcaaccaaaataaagatgagttaaaaggtatctggttaggcctatttcatgaggactatgctctggtgggaccacaggtcacctgatacttagtgctgtgctgcctgaaacctcagcatggagacatcaccacatgcactgtggccattcagcatctttctggagcaccagttcactccaggtttttattttagggtgtcatcgattttacctactttgtcagactggtagaagttgctttgcatatcagaaaaactccatttttttccacaaaagggattacagaaaactcttttgtgagtgagtgattggaacttagagactcctgttgccagaatcagactgccctagaacagaatggacaatgcagggaggagaattcacacaaacagcacctgttctgaggcctgtgccagcccaccaggcctgctcaaatgtggtctttacttcaagtgcacagaggcacatgaggtttctggtgataaaccagcgtcttaccgctgttttaaagtcccatccccatggctttcacaatcagttccgttttttttgctgtacttgataaaatgtttattctcatacaggtcaagtacatttacttctattcacagtgagtacccaataacaacaaaagcgcttacaaatttggggggcgtgattttagtacctttatttgaagtgtaatcattttaaattattattattttaactggggcagttatcagtggtttaaacaggaactttagtggcttcaattcgtttaagaaacatattaagtttgagggaaaaatttcccatgaaatatttggaacgtaagagtagtattgattagagaaaattaaataagaaacatagtatggtagccaaattttttaaaaaatcttgaacttttctgtaggtcagttttagaactgctgtgaaaagtgaaggttgccctgtggagattaaaattagagttgttttcataactgacagcatggtgaatccatttgagtcaaagtgaagaatttcctcatcaagtgactatacatttgtttttgtgtgctcaaaagaaatactcaaacacagactgatattaaccagccaggtaaattgaacgacaatgtggcattaggtatttggctgtttattggtcgttaaatactatggttttgcaatatgattgatggtaaaagagtgatgtcatattgatactagagtagcttgtttttttagtaggtgtgggaccatctcttttacaagtgcaactcagtctaggacagccatggatgcagtgtctggagttggaccctctgagcccgctggctgccccagtagcatctgcattggtgaccaaggacactgcactttgaagaggtcgccactgggttatttagtgtcttcactgcttttgttaaaaattgtaaaattttgtacacaaaaagttgtgtttttgaatatcaattgtttagacacacctacaatgataaataagtgcctttaaaggcccctctttccatgaaatacatctgtggtttagcaaggaaagtacaaaatagtttatgtagttggtataatttttatttgtgtcttcatgtagaaaaaatgaatgtcataataaaatataaaacttacgtaaaga

SEQ ID NO: 307542 - DNA, 3461 bp, Homo sapiens
catcataggttatcttgacacatatgaatgttaattatgtgcagttaaagtagtaagaatgtctgcccatcaaccccagttgaacagtcgtcaaaggaaaatacagaaggatcgcttagtggcagagttcacaacatcactgacaaacttccagaaggtccagaggcaggctgctgagcgagagaaagagtttgttgctcgagtaagagccagttccagagtgtctggcagttttcctgaggacagctcaaaagaaaggaatcttgtatcctgggaaagccaaactcaacctcaagtgcaggtgcaggatgaagaaattacagaggatgacctccgtcttattcatgagagagaatcttctatcaggcaacttgaagctgatattatggatattaatgaaatatttaaagatttgggaatgatgattcatgaacaaggagatgtaatagatagcatagaagccaatgtggaaaatgcagaggtgcacgttcagcaagcaaatcagcagctgtcaagggcagcagattatcagcgcaaatccagaaaaaccctgtgcatcatcattcttatccttgtcattggagttgcgattatcagtctcatcatatggggattgaaccactgaagttataaaggagcacactgtcgcactacattgtctaaattatgtaggaagattcctgtaatcatgtttttttaattattattttaaagctattgtataaaggatggttcccatactttgttatttttattgggggggttggggtggttcctttggattaaatctgatattttctaatactgaaagattttctaaatgtcactgctgacataactcccttggtcttcaatttaatagttgttaagtttttgcccacattgcatatgcctttcatttataatttatttaccctgcttgacttagttttgggaattcgtaaatttaaaggtgtgtgtattctgtttgcatctccctgtcactgtgacacacctagatgtgtgttacttcaattaaaattctcaaatttaattttgatttgcttcagcagggaaaatattctcaataatgtaaaataattaaggtctatacatgggttgtatttttctggttcacaacagcacaaagtgtctttcatttttttgttggttttcttttaagatcttttttaccctgaagtcagtgaatacttttctagtttatttgatactctttctgtgtatatattaagcttttgctgtagattgcctagtaaaattactaaggataggttgtttttacatatggtctatttaagtctgatgtttacgggggaaagtgtagttactaaaaatgtttaacataatttggaagaagagtatgaacaaccaataccaatacctattgcgtttggattcttaagaccccagtttgttattccactaaactagttatcttaaccatatcatctggttttgtgggccattatttaccttcccttatgtcttatagaataatggttaatatttttaggtcaaaattacttttggaaagtaactttcccacaattaactgtttttgagcacctgacaaaatttagtgtttaccttgcgtgccattttgtgtcatccttcattaaaaaagcaattggaggtttgccagttatctcacttccctttttaaatcaatgttgttttaatgcactaatctgaattctgtaaagaggattatcttagtttatactttgtattttataatgttcttgtatagcagttcggtactgaaggcggtgtttaacttggcaagctctgagacttcaaatgggaacaaatagtaagtagctaagtaaaccacatctttgcaaccaaaataaagatgagttaaaaggtatctggttaggcctatttcatgaggactatgctctggtgggaccacaggtcacctgatacttagtgctgtgctgcctgaaacctcagcatggagacatcaccacatgcactgtggccattcagcatctttctggagcaccagttcactccaggtttttattttagggtgtcatcgattttacctactttgtcagactggtagaagttgctttgcatatcagaaaaactccatttttttccacaaaagggattacagaaaactcttttgtgagtgagtgattggaacttagagactcctgttgccagaatcagactgccctagaacagaatggacaatgcagggaggagaattcacacaaacagcacctgttctgaggcctgtgccagcccaccaggcctgctcaaatgtggtctttacttcaagtgcacagaggcacatgaggtttctggtgataaaccagcgtcttaccgctgttttaaagtcccatccccatggctttcacaatcagttccgttttttttgctgtacttgataaaatgtttattctcatacaggtcaagtacatttacttctattcacagtgagtacccaataacaacaaaagcgcttacaaatttggggggcgtgattttagtacctttatttgaagtgtaatcattttaaattattattattttaactggggcagttatcagtggtttaaacaggaactttagtggcttcaattcgtttaagaaacatattaagtttgagggaaaaatttcccatgaaatatttggaacgtaagagtagtattgattagagaaaattaaataagaaacatagtatggtagccaaattttttaaaaaatcttgaacttttctgtaggtcagttttagaactgctgtgaaaagtgaaggttgccctgtggagattaaaattagagttgttttcataactgacagcatggtgaatccatttgagtcaaagtgaagaatttcctcatcaagtgactatacatttgtttttgtgtgctcaaaagaaatactcaaacacagactgatattaaccagccaggtaaattgaacgacaatgtggcattaggtatttggctgtttattggtcgttaaatactatggttttgcaatatgattgatggtaaaagagtgatgtcatattgatactagagtagcttgtttttttagtaggtgtgggaccatctcttttacaagtgcaactcagtctaggacagccatggatgcagtgtctggagttggaccctctgagcccgctggctgccccagtagcatctgcattggtgaccaaggacactgcactttgaagaggtcgccactgggttatttagtgtcttcactgcttttgttaaaaattgtaaaattttgtacacaaaaagttgtgtttttgaatatcaattgtttagacacacctacaatgataaataagtgcctttaaaggcccctctttccatgaaatacatctgtggtttagcaaggaaagtacaaaatagtttatgtagttggtataatttttatttgtgtcttcatgtagaaaaaatgaatgtcataataaaatataaaacttacgtaaaga

SEQ ID NO: 307543 - DNA, 3502 bp, Homo sapiens
  misc_feature (45)..(45): n is a, c, g, or t
  misc_feature (69)..(69): n is a, c, g, or t
gcgcgcgtcgacccggccgcctcgacacggtgcgagaagaccacngaaggccggccgacaacccggttngcccaaggaaacggttagttaccaaaggtttggatctctgcccaccacccccgtgaacagcgtcaaaggaaaatacagaaggatcgcttagtggcagagttcacaacatcactgacaaacttccagaaggtccagaggcaggctgctgagcgagagaaagagtttgttgctcgagtaagagccagttccagagtgtctggcagttttcctgaggacagctcaaaagaaaggaatcttgtatcctgggaaagccaaactcaacctcaagtgcaggtgcaggatgaagaaattacagaggatgacctccgtcttattcatgagagagaatcttctatcaggcaacttgaagctgatattatggatattaatgaaatatttaaagatttgggaatgatgattcatgaacaaggagatgtaatagatagcatagaagccaatgtggaaaatgcagaggtgcacgttcagcaagcaaatcagcagctgtcaagggcagcagattatcagcgcaaatccagaaaaaccctgtgcatcatcattcttatccttgtcattggagttgcgattatcagtctcatcatatggggattgaaccactgaagttataaaggagcacactgtcgcactacattgtctaaattatgtaggaagattcctgtaatcatgtttttttaattattattttaaagctattgtataaaggatggttcccatactttgttatttttattgggggggttggggtggttcctttggattaaatctgatattttctaatactgaaagattttctaaatgtcactgctgacataactcccttggtcttcaatttaatagttgttaagtttttgcccacattgcatatgcctttcatttataatttatttaccctgcttgacttagttttgggaattcgtaaatttaaaggtgtgtgtattctgtttgcatctccctgtcactgtgacacacctagatgtgtgttacttcaattaaaattctcaaatttaattttgatttgcttcagcagggaaaatattctcaataatgtaaaataattaaggtctatacatgggttgtatttttctggttcacaacagcacaaagtgtctttcatttttttgttggttttcttttaagatcttttttaccctgaagtcagtgaatacttttctagtttatttgatactctttctgtgtatatattaagcttttgctgtagattgcctagtaaaattactaaggataggttgtttttacatatggtctatttaagtctgatgtttacgggggaaagtgtagttactaaaaatgtttaacataatttggaagaagagtatgaacaaccaataccaatacctattgcgtttggattcttaagaccccagtttgttattccactaaactagttatcttaaccatatcatctggttttgtgggccattatttaccttcccttatgtcttatagaataatggttaatatttttaggtcaaaattacttttggaaagtaactttcccacaattaactgtttttgagcacctgacaaaatttagtgtttaccttgcgtgccattttgtgtcatccttcattaaaaaagcaattggaggtttgccagttatctcacttccctttttaaatcaatgttgttttaatgcactaatctgaattctgtaaagaggattatcttagtttatactttgtattttataatgttcttgtatagcagttcggtactgaaggcggtgtttaacttggcaagctctgagacttcaaatgggaacaaatagtaagtagctaagtaaaccacatctttgcaaccaaaataaagatgagttaaaaggtatctggttaggcctatttcatgaggactatgctctggtgggaccacaggtcacctgatacttagtgctgtgctgcctgaaacctcagcatggagacatcaccacatgcactgtggccattcagcatctttctggagcaccagttcactccaggtttttattttagggtgtcatcgattttacctactttgtcagactggtagaagttgctttgcatatcagaaaaactccatttttttccacaaaagggattacagaaaactcttttgtgagtgagtgattggaacttagagactcctgttgccagaatcagactgccctagaacagaatggacaatgcagggaggagaattcacacaaacagcacctgttctgaggcctgtgccagcccaccaggcctgctcaaatgtggtctttacttcaagtgcacagaggcacatgaggtttctggtgataaaccagcgtcttaccgctgttttaaagtcccatccccatggctttcacaatcagttccgttttttttgctgtacttgataaaatgtttattctcatacaggtcaagtacatttacttctattcacagtgagtacccaataacaacaaaagcgcttacaaatttggggggcgtgattttagtacctttatttgaagtgtaatcattttaaattattattattttaactggggcagttatcagtggtttaaacaggaactttagtggcttcaattcgtttaagaaacatattaagtttgagggaaaaatttcccatgaaatatttggaacgtaagagtagtattgattagagaaaattaaataagaaacatagtatggtagccaaattttttaaaaaatcttgaacttttctgtaggtcagttttagaactgctgtgaaaagtgaaggttgccctgtggagattaaaattagagttgttttcataactgacagcatggtgaatccatttgagtcaaagtgaagaatttcctcatcaagtgactatacatttgtttttgtgtgctcaaaagaaatactcaaacacagactgatattaaccagccaggtaaattgaacgacaatgtggcattaggtatttggctgtttattggtcgttaaatactatggttttgcaatatgattgatggtaaaagagtgatgtcatattgatactagagtagcttgtttttttagtaggtgtgggaccatctcttttacaagtgcaactcagtctaggacagccatggatgcagtgtctggagttggaccctctgagcccgctggctgccccagtagcatctgcattggtgaccaaggacactgcactttgaagaggtcgccactgggttatttagtgtcttcactgcttttgttaaaaattgtaaaattttgtacacaaaaagttgtgtttttgaatatcaattgtttagacacacctacaatgataaataagtgcctttaaaggcccctctttccatgaaatacatctgtggtttagcaaggaaagtacaaaatagtttatgtagttggtataatttttatttgtgtcttcatgtagaaaaaatgaatgtcataataaaatataaaacttacgtaaaga

SEQ ID NO: 307544 - DNA, 3759 bp, Homo sapiens
cacgagggccgctgtcactcagccccgcgggccaatagaaaaggggtgaaccccgccttcttcctgagttgtgctgcgggcatgcgcactgggcgtccccacgccaccgcccatcagctgagaattgcagctgagggctccggggtaggtgggtgacggcggtcggaggtgtaggagggagccgtggaggtccaggtgactgcttagaaaactgcacagcatctgatgaaattagcgaataagaacatcaaccatgtcttacactccaggagttggtggtgaccccgcccagttggcccagaggatctcttctaacatccagaagatcacacagtgttctgtggaaatacaaagaactctgaatcaacttggaacacctcaagattcacctgaattgaggcaacagttgcaacagaagcagcagtatactaaccagcttgccaaagaaacagataagtacattaaagagtttggatctctgcccaccacccccagtgaacagcgtcaaaggaaaatacagaaggatcgcttagtggcagagttcacaacatcactgacaaacttccagaaggtccagaggcaggctgctgagcgagagaaagagtttgttgctcgagtaagagccagttccagagtgtctggcagttttcctgaggacagctcaaaagaaaggaatcttgtatcctgggaaagccaaactcaacctcaagtgcaggtgcaggatgaagaaattacagaggatgacctccgtcttattcatgagagagaatcttctatcaggcaacttgaagctgatattatggatattaatgaaatatttaaagatttgggaatgatgattcatgaacaaggagatgtaatagatagcatagaagccaatgtggaaaatgcagaggtgcacgttcagcaagcaaatcagcagctgtcaagggcagcagattatcagcgcaaatccagaaaaaccctgtgcatcatcattcttatccttgtcattggagttgcgattatcagtctcatcatatggggattgaaccactgaagttataaaggagcacactgtcgcactacattgtctaaattatgtaggaagattcctgtaatcatgtttttttaattattattttaaagctattgtataaaggatggttcccatactttgttatttttattgggggggttggggtggttcctttggattaaatctgatattttctaatactgaaagattttctaaatgtcactgctgacataactcccttggtcttcaatttaatagttgttaagtttttgcccacattgcatatgcctttcatttataatttatttaccctgcttgacttagttttgggaattcgtaaatttaaaggtgtgtgtattctgtttgcatctccctgtcactgtgacacacctagatgtgtgttacttcaattaaaattctcaaatttaattttgatttgcttcagcagggaaaatattctcaataatgtaaaataattaaggtctatacatgggttgtatttttctggttcacaacagcacaaagtgtctttcatttttttgttggttttcttttaagatcttttttaccctgaagtcagtgaatacttttctagtttatttgatactctttctgtgtatatattaagcttttgctgtagattgcctagtaaaattactaaggataggttgtttttacatatggtctatttaagtctgatgtttacgggggaaagtgtagttactaaaaatgtttaacataatttggaagaagagtatgaacaaccaataccaatacctattgcgtttggattcttaagaccccagtttgttattccactaaactagttatcttaaccatatcatctggttttgtgggccattatttaccttcccttatgtcttatagaataatggttaatatttttaggtcaaaattacttttggaaagtaactttcccacaattaactgtttttgagcacctgacaaaatttagtgtttaccttgcgtgccattttgtgtcatccttcattaaaaaagcaattggaggtttgccagttatctcacttccctttttaaatcaatgttgttttaatgcactaatctgaattctgtaaagaggattatcttagtttatactttgtattttataatgttcttgtatagcagttcggtactgaaggcggtgtttaacttggcaagctctgagacttcaaatgggaacaaatagtaagtagctaagtaaaccacatctttgcaaccaaaataaagatgagttaaaaggtatctggttaggcctatttcatgaggactatgctctggtgggaccacaggtcacctgatacttagtgctgtgctgcctgaaacctcagcatggagacatcaccacatgcactgtggccattcagcatctttctggagcaccagttcactccaggtttttattttagggtgtcatcgattttacctactttgtcagactggtagaagttgctttgcatatcagaaaaactccatttttttccacaaaagggattacagaaaactcttttgtgagtgagtgattggaacttagagactcctgttgccagaatcagactgccctagaacagaatggacaatgcagggaggagaattcacacaaacagcacctgttctgaggcctgtgccagcccaccaggcctgctcaaatgtggtctttacttcaagtgcacagaggcacatgaggtttctggtgataaaccagcgtcttaccgctgttttaaagtcccatccccatggctttcacaatcagttccgttttttttgctgtacttgataaaatgtttattctcatacaggtcaagtacatttacttctattcacagtgagtacccaataacaacaaaagcgcttacaaatttggggggcgtgattttagtacctttatttgaagtgtaatcattttaaattattattattttaactggggcagttatcagtggtttaaacaggaactttagtggcttcaattcgtttaagaaacatattaagtttgagggaaaaatttcccatgaaatatttggaacgtaagagtagtattgattagagaaaattaaataagaaacatagtatggtagccaaattttttaaaaaatcttgaacttttctgtaggtcagttttagaactgctgtgaaaagtgaaggttgccctgtggagattaaaattagagttgttttcataactgacagcatggtgaatccatttgagtcaaagtgaagaatttcctcatcaagtgactatacatttgtttttgtgtgctcaaaagaaatactcaaacacagactgatattaaccagccaggtaaattgaacgacaatgtggcattaggtatttggctgtttattggtcgttaaatactatggttttgcaatatgattgatggtaaaagagtgatgtcatattgatactagatagcatctgcattggtgaccaaggacactgcactttgaagaggtcgccactgggttatttagtgtcttcactgcttttgttaaaaattgtaaaattttgtacacaaaaagttgtgtttttgaatatcaattgtttagacacacctacaatgataaataagtgcctttaaaggcccctctttccatgaaatacatctgtggtttagcaaggaaagtacaaaatagtttatgtagttggtataatttttatttgtgtcttcatgtagaaaaaatgaatgtcataataaaatataaaacttacgtaaaga

SEQ ID NO: 307545 - DNA, 3325 bp, Homo sapiens
tttattataagggaaaatatgagtgtttattttttctcatttttgctttttttgccccttctcattccatcctgttactaaattattcagggcagttttcctgaggacagctcaaaagaaaggaatcttgtatcctgggaaagccaaactcaacctcaagtgcaggtgcaggatgaagaaattacagaggatgacctccgtcttattcatgagagagaatcttctatcaggcaacttgaagctgatattatggatattaatgaaatatttaaagatttgggaatgatgattcatgaacaaggagatgtaatagatagcatagaagccaatgtggaaaatgcagaggtgcacgttcagcaagcaaatcagcagctgtcaagggcagcagattatcagcgcaaatccagaaaaaccctgtgcatcatcattcttatccttgtcattggagttgcgattatcagtctcatcatatggggattgaaccactgaagttataaaggagcacactgtcgcactacattgtctaaattatgtaggaagattcctgtaatcatgtttttttaattattattttaaagctattgtataaaggatggttcccatactttgttatttttattgggggggttggggtggttcctttggattaaatctgatattttctaatactgaaagattttctaaatgtcactgctgacataactcccttggtcttcaatttaatagttgttaagtttttgcccacattgcatatgcctttcatttataatttatttaccctgcttgacttagttttgggaattcgtaaatttaaaggtgtgtgtattctgtttgcatctccctgtcactgtgacacacctagatgtgtgttacttcaattaaaattctcaaatttaattttgatttgcttcagcagggaaaatattctcaataatgtaaaataattaaggtctatacatgggttgtatttttctggttcacaacagcacaaagtgtctttcatttttttgttggttttcttttaagatcttttttaccctgaagtcagtgaatacttttctagtttatttgatactctttctgtgtatatattaagcttttgctgtagattgcctagtaaaattactaaggataggttgtttttacatatggtctatttaagtctgatgtttacgggggaaagtgtagttactaaaaatgtttaacataatttggaagaagagtatgaacaaccaataccaatacctattgcgtttggattcttaagaccccagtttgttattccactaaactagttatcttaaccatatcatctggttttgtgggccattatttaccttcccttatgtcttatagaataatggttaatatttttaggtcaaaattacttttggaaagtaactttcccacaattaactgtttttgagcacctgacaaaatttagtgtttaccttgcgtgccattttgtgtcatccttcattaaaaaagcaattggaggtttgccagttatctcacttccctttttaaatcaatgttgttttaatgcactaatctgaattctgtaaagaggattatcttagtttatactttgtattttataatgttcttgtatagcagttcggtactgaaggcggtgtttaacttggcaagctctgagacttcaaatgggaacaaatagtaagtagctaagtaaaccacatctttgcaaccaaaataaagatgagttaaaaggtatctggttaggcctatttcatgaggactatgctctggtgggaccacaggtcacctgatacttagtgctgtgctgcctgaaacctcagcatggagacatcaccacatgcactgtggccattcagcatctttctggagcaccagttcactccaggtttttattttagggtgtcatcgattttacctactttgtcagactggtagaagttgctttgcatatcagaaaaactccatttttttccacaaaagggattacagaaaactcttttgtgagtgagtgattggaacttagagactcctgttgccagaatcagactgccctagaacagaatggacaatgcagggaggagaattcacacaaacagcacctgttctgaggcctgtgccagcccaccaggcctgctcaaatgtggtctttacttcaagtgcacagaggcacatgaggtttctggtgataaaccagcgtcttaccgctgttttaaagtcccatccccatggctttcacaatcagttccgttttttttgctgtacttgataaaatgtttattctcatacaggtcaagtacatttacttctattcacagtgagtacccaataacaacaaaagcgcttacaaatttggggggcgtgattttagtacctttatttgaagtgtaatcattttaaattattattattttaactggggcagttatcagtggtttaaacaggaactttagtggcttcaattcgtttaagaaacatattaagtttgagggaaaaatttcccatgaaatatttggaacgtaagagtagtattgattagagaaaattaaataagaaacatagtatggtagccaaattttttaaaaaatcttgaacttttctgtaggtcagttttagaactgctgtgaaaagtgaaggttgccctgtggagattaaaattagagttgttttcataactgacagcatggtgaatccatttgagtcaaagtgaagaatttcctcatcaagtgactatacatttgtttttgtgtgctcaaaagaaatactcaaacacagactgatattaaccagccaggtaaattgaacgacaatgtggcattaggtatttggctgtttattggtcgttaaatactatggttttgcaatatgattgatggtaaaagagtgatgtcatattgatactagagtagcttgtttttttagtaggtgtgggaccatctcttttacaagtgcaactcagtctaggacagccatggatgcagtgtctggagttggaccctctgagcccgctggctgccccagtagcatctgcattggtgaccaaggacactgcactttgaagaggtcgccactgggttatttagtgtcttcactgcttttgttaaaaattgtaaaattttgtacacaaaaagttgtgtttttgaatatcaattgtttagacacacctacaatgataaataagtgcctttaaaggcccctctttccatgaaatacatctgtggtttagcaaggaaagtacaaaatagtttatgtagttggtataatttttatttgtgtcttcatgtagaaaaaatgaatgtcataataaaatataaaacttacgtaaaga

SEQ ID NO: 307546 - DNA, 3385 bp, Homo sapiens
tgcattggtcttgacatagaccaagctgtggagtttgacactgagacatctcttgtgctgacactgatttgataatgtcagggtgacagtacttttcaggggttgccaggtagagctggagttgctctgtaatgaagatgattaaggttctgttatacaaatgctcttatattgtttggatcacctgaaaaatagtataggtgtatactataattcttaaagccagcttaaaaaaattcaactttatgatatactactattaacctttgaataatgaccatatttaatcttaccttgaatgaaatttagtgatttgttactggagcatcaatccatgtttaacacatttgtgtgtgtgtgttttattttacagatagcatagaagccaatgtggaaaatgcagaggtgcacgttcagcaagcaaatcagcagctgtcaagggcagcagattatcagcgcaaatccagaaaaaccctgtgcatcatcattcttatccttgtcattggagttgcgattatcagtctcatcatatggggattgaaccactgaagttataaaggagcacactgtcgcactacattgtctaaattatgtaggaagattcctgtaatcatgtttttttaattattattttaaagctattgtataaaggatggttcccatactttgttatttttattgggggggttggggtggttcctttggattaaatctgatattttctaatactgaaagattttctaaatgtcactgctgacataactcccttggtcttcaatttaatagttgttaagtttttgcccacattgcatatgcctttcatttataatttatttaccctgcttgacttagttttgggaattcgtaaatttaaaggtgtgtgtattctgtttgcatctccctgtcactgtgacacacctagatgtgtgttacttcaattaaaattctcaaatttaattttgatttgcttcagcagggaaaatattctcaataatgtaaaataattaaggtctatacatgggttgtatttttctggttcacaacagcacaaagtgtctttcatttttttgttggttttcttttaagatcttttttaccctgaagtcagtgaatacttttctagtttatttgatactctttctgtgtatatattaagcttttgctgtagattgcctagtaaaattactaaggataggttgtttttacatatggtctatttaagtctgatgtttacgggggaaagtgtagttactaaaaatgtttaacataatttggaagaagagtatgaacaaccaataccaatacctattgcgtttggattcttaagaccccagtttgttattccactaaactagttatcttaaccatatcatctggttttgtgggccattatttaccttcccttatgtcttatagaataatggttaatatttttaggtcaaaattacttttggaaagtaactttcccacaattaactgtttttgagcacctgacaaaatttagtgtttaccttgcgtgccattttgtgtcatccttcattaaaaaagcaattggaggtttgccagttatctcacttccctttttaaatcaatgttgttttaatgcactaatctgaattctgtaaagaggattatcttagtttatactttgtattttataatgttcttgtatagcagttcggtactgaaggcggtgtttaacttggcaagctctgagacttcaaatgggaacaaatagtaagtagctaagtaaaccacatctttgcaaccaaaataaagatgagttaaaaggtatctggttaggcctatttcatgaggactatgctctggtgggaccacaggtcacctgatacttagtgctgtgctgcctgaaacctcagcatggagacatcaccacatgcactgtggccattcagcatctttctggagcaccagttcactccaggtttttattttagggtgtcatcgattttacctactttgtcagactggtagaagttgctttgcatatcagaaaaactccatttttttccacaaaagggattacagaaaactcttttgtgagtgagtgattggaacttagagactcctgttgccagaatcagactgccctagaacagaatggacaatgcagggaggagaattcacacaaacagcacctgttctgaggcctgtgccagcccaccaggcctgctcaaatgtggtctttacttcaagtgcacagaggcacatgaggtttctggtgataaaccagcgtcttaccgctgttttaaagtcccatccccatggctttcacaatcagttccgttttttttgctgtacttgataaaatgtttattctcatacaggtcaagtacatttacttctattcacagtgagtacccaataacaacaaaagcgcttacaaatttggggggcgtgattttagtacctttatttgaagtgtaatcattttaaattattattattttaactggggcagttatcagtggtttaaacaggaactttagtggcttcaattcgtttaagaaacatattaagtttgagggaaaaatttcccatgaaatatttggaacgtaagagtagtattgattagagaaaattaaataagaaacatagtatggtagccaaattttttaaaaaatcttgaacttttctgtaggtcagttttagaactgctgtgaaaagtgaaggttgccctgtggagattaaaattagagttgttttcataactgacagcatggtgaatccatttgagtcaaagtgaagaatttcctcatcaagtgactatacatttgtttttgtgtgctcaaaagaaatactcaaacacagactgatattaaccagccaggtaaattgaacgacaatgtggcattaggtatttggctgtttattggtcgttaaatactatggttttgcaatatgattgatggtaaaagagtgatgtcatattgatactagagtagcttgtttttttagtaggtgtgggaccatctcttttacaagtgcaactcagtctaggacagccatggatgcagtgtctggagttggaccctctgagcccgctggctgccccagtagcatctgcattggtgaccaaggacactgcactttgaagaggtcgccactgggttatttagtgtcttcactgcttttgttaaaaattgtaaaattttgtacacaaaaagttgtgtttttgaatatcaattgtttagacacacctacaatgataaataagtgcctttaaaggcccctctttccatgaaatacatctgtggtttagcaaggaaagtacaaaatagtttatgtagttggtataatttttatttgtgtcttcatgtagaaaaaatgaatgtcataataaaatataaaacttacgtaaaga

SEQ ID NO: 307547 - DNA, 2284 bp, Homo sapiens
cacgagggccgctgtcactcagccccgcgggccaatagaaaaggggtgaaccccgccttcttcctgagttgtgctgcgggcatgcgcactgggcgtccccacgccaccgcccatcagctgagaattgcagctgagggctccggggtaggtgggtgacggcggtcggaggtgtaggagggagccgtggaggtccaggtgactgcttagaaaactgcacagcatctgatgaaattagcgaataagaacatcaaccatgtcttacactccaggagttggtggtgaccccgcccagttggcccagaggatctcttctaacatccagaagatcacacagtgttctgtggaaatacaaagaactctgaatcaacttggaacacctcaagattcacctgaattgaggcaacagttgcaacagaagcagcagtatactaaccagcttgccaaagaaacagataagtacattaaagagtttggatctctgcccaccacccccagtgaacagcgtcaaaggaaaatacagaaggatcgcttagtggcagagttcacaacatcactgacaaacttccagaaggtccagaggcaggctgctgagcgagagaaagagtttgttgctcgagtaagagccagttccagagtgtctggcagttttcctgaggacagctcaaaagaaaggaatcttgtatcctgggaaagccaaactcaacctcaagtgcaggtgcaggatgaagaaattacagaggatgacctccgtcttattcatgagagagaatcttctatcaggcaacttgaagctgatattatggatattaatgaaatatttaaagatttgggaatgatgattcatgaacaaggagatgtaatagatagcatagaagccaatgtggaaaatgcagaggtgcacgttcagcaagcaaatcagcagctgtcaagggcagcagattatcagcgcaaatccagaaaaaccctgtgcatcatcattcttatccttgtcattggagttgcgattatcagtctcatcatatggggattgaaccactgaagttataaaggagcacactgtcgcactacattgtctaaattatgtaggaagattcctgtaatcatgtttttttaattattattttaaagctattgtataaaggatggttcccatactttgttatttttattgggggggttggggtggttcctttggattaaatctgatattttctaatactgaaagattttctaaatgtcactgctgacataactcccttggtcttcaatttaatagttgttaagtttttgcccacattgcatatgcctttcatttataatttatttaccctgcttgacttagttttgggaattcgtaaatttaaaggtgtgtgtattctgtttgcatctccctgtcactgtgacacacctagatgtgtgttacttcaattaaaattctcaaatttaattttgatttgcttcagcagggaaaatattctcaataatgtaaaataattaaggtctatacatgggttgtatttttctggttcacaacagcacaaagtgtctttcatttttttgttggttttcttttaagatcttttttaccctgaagtcagtgaatacttttctagtttatttgatactctttctgtgtatatattaagcttttgctgtagattgcctagtaaaattactaaggataggttgtttttacatatggtctatttaagtctgatgtttacgggggaaagtgtagttactaaaaatgtttaacataatttggaagaagagtatgaacaaccaataccaatacctattgcgtttggattcttaagaccccagtttgttattccactaaactagttatcttaaccatatcatctggttttgtgggccattatttaccttcccttatgtcttatagaataatggttaatatttttaggtcaaaattacttttggaaagtaactttcccacaattaactgtttttgagcacctgacaaaatttagtgtttaccttgcgtgccattttgtgtcatccttcattaaaaaagcaattggaggtttgccagttatctcacttccctttttaaatcaatgttgttttaatgcactaatctgaattctgtaaagaggattatcttagtttatactttgtattttataatgttcttgtatagcagttcggtactgaaggcggtgtttaacttggcaagctctgagacttcaaatgggaacaaatagtaagtagctaagtaaaccacatctttgcaaccaaaataaagatgagttaaaaggta

SEQ ID NO: 307548 - DNA, 2051 bp, Homo sapiens
cacgagggccgctgtcactcagccccgcgggccaatagaaaaggggtgaaccccgccttcttcctgagttgtgctgcgggcatgcgcactgggcgtccccacgccaccgcccatcagctgagaattgcagctgagggctccggggtaggtgggtgacggcggtcggaggtgtaggagggagccgtggaggtccaggtgactgcttagaaaactgcacagcatctgatgaaattagcgaataagaacatcaaccatgtcttacactccaggagttggtggtgaccccgcccagttggcccagaggatctcttctaacatccagaagatcacacagtgttctgtggaaatacaaagaactctgaatcaacttggaacacctcaagattcacctgaattgaggcaacagttgcaacagaagcagcagtatactaaccagcttgccaaagaaacagataagtacattaaagagtttggatctctgcccaccacccccagtgaacagcgtcaaaggaaaatacagaaggatcgcttagtggcagagttcacaacatcactgacaaacttccagaaggtccagaggcaggctgctgagcgagagaaagagtttgttgctcgagtaagagccagttccagagtgtctggcagttttcctgaggacagctcaaaagaaaggaatcttgtatcctgggaaagccaaactcaacctcaagtgcaggtgcaggatgaagaaattacagaggatgacctccgtcttattcatgagagagaatcttctatcaggcaacttgaagctgatattatggatattaatgaaatatttaaagatttgggaatgatgattcatgaacaaggagatgtaatagatagcatagaagccaatgtggaaaatgcagaggtgcacgttcagcaagcaaatcagcagctgtcaagggcagcagattatcagcgcaaatccagaaaaaccctgtgcatcatcattcttatccttgtcattggagttgcgattatcagtctcatcatatggggattgaaccactgaagttataaaggagcacactgtcgcactacattgtctaaattatgtaggaagattcctgtaatcatgtttttttaattattattttaaagctattgtataaaggatggttcccatactttgttatttttattgggggggttggggtggttcctttggattaaatctgatattttctaatactgaaagattttctaaatgtcactgctgacataactcccttggtcttcaatttaatagttgttaagtttttgcccacattgcatatgcctttcatttataatttatttaccctgcttgacttagttttgggaattcgtaaatttaaaggtgtgtgtattctgtttgcatctccctgtcactgtgacacacctagatgtgtgttacttcaattaaaattctcaaatttaattttgatttgcttcagcagggaaaatattctcaataatgtaaaataattaaggtctatacatgggttgtatttttctggttcacaacagcacaaagtgtctttcatttttttgttggttttcttttaagatcttttttaccctgaagtcagtgaatacttttctagtttatttgatactctttctgtgtatatattaagcttttgctgtagattgcctagtaaaattactaaggataggttgtttttacatatggtctatttaagtctgatgtttacgggggaaagtgtagttactaaaaatgtttaacataatttggaagaagagtatgaacaaccaataccaatacctattgcgtttggattcttaagaccccagtttgttattccactaaactagttatcttaaccatatcatctggttttgtgggccattatttaccttcccttatgtcttatagaataatggttaatatttttaggtcaaaattacttttggaaagtaactttcccacaattaactgtttttgagcacctgacaaaatttagtgtttaccttgcgtgccattttgtgtcatccttcattaaaaaagcaattggaggttt

SEQ ID NO: 307549 - DNA, 1221 bp, Homo sapiens
cacgagggccgctgtcactcagccccgcgggccaatagaaaaggggtgaaccccgccttcttcctgagttgtgctgcgggcatgcgcactgggcgtccccacgccaccgcccatcagctgagaattgcagctgagggctccggggtaggtgggtgacggcggtcggaggtgtaggagggagccgtggaggtccaggtgactgcttagaaaactgcacagcatctgatgaaattagcgaataagaacatcaaccatgtcttacactccaggagttggtggtgaccccgcccagttggcccagaggatctcttctaacatccagaagatcacacagtgttctgtggaaatacaaagaactctgaatcaacttggaacacctcaagattcacctgaattgaggcaacagttgcaacagaagcagcagtatactaaccagcttgccaaagaaacagataagtacattaaagagtttggatctctgcccaccacccccagtgaacagcgtcaaaggaaaatacagaaggatcgcttagtggcagagttcacaacatcactgacaaacttccagaaggtccagaggcaggctgctgagcgagagaaagagtttgttgctcgagtaagagccagttccagagtgtctggcagttttcctgaggacagctcaaaagaaaggaatcttgtatcctgggaaagccaaactcaacctcaagtgcaggtgcaggatgaagaaattacagaggatgacctccgtcttattcatgagagagaatcttctatcaggcaacttgaagctgatattatggatattaatgaaatatttaaagatttgggaatgatgattcatgaacaaggagatgtaatagatagcatagaagccaatgtggaaaatgcagaggtgcacgttcagcaagcaaatcagcagctgtcaagggcagcagattatcagcgcaaatccagaaaaaccctgtgcatcatcattcttatccttgtcattggagttgcgattatcagtctcatcatatggggattgaaccactgaagttataaaggagcacactgtcgcactacattgtctaaattatgtaggaagattcctgtaatcatgtttttttaattattattttaaagctattgtataaaggatggttcccatactttgttatttttattgggggggttggggtggttcctttggattaaatctgatattttctaatactg

SEQ ID NO: 307550 - DNA, 1332 bp, Homo sapiens
cacgagggccgctgtcactcagccccgcgggccaatagaaaaggggtgaaccccgccttcttcctgagttgtgctgcgggcatgcgcactgggcgtccccacgccaccgcccatcagctgagaattgcagctgagggctccggggtaggtgggtgacggcggtcggaggtgtaggagggagccgtggaggtccaggtgactgcttagaaaactgcacagcatctgatgaaattagcgaataagaacatcaaccatgtcttacactccaggagttggtggtgaccccgcccagttggcccagaggatctcttctaacatccagaagatcacacagtgttctgtggaaatacaaagaactctgaatcaacttggaacacctcaagattcacctgaattgaggcaacagttgcaacagaagcagcagtatactaaccagcttgccaaagaaacagataagtacattaaagagtttggatctctgcccaccacccccagtgaacagcgtcaaaggaaaatacagaaggatcgcttagtggcagagttcacaacatcactgacaaacttccagaaggtccagaggcaggctgctgagcgagagaaagagtttgttgctcgagtaagagccagttccagagtgtctggcagttttcctgaggacagctcaaaagaaaggaatcttgtatcctgggaaagccaaactcaacctcaagtgcaggtgcaggatgaagaaattacagaggatgacctccgtcttattcatgagagagaatcttctatcaggcaacttgaagctgatattatggatattaatgaaatatttaaagatttgggaatgatgattcatgaacaaggagatgtaatagatagcatagaagccaatgtggaaaatgcagaggtgcacgttcagcaagcaaatcagcagctgtcaagggcagcagattatcagaaaaaggattcctgcatgttgatgtgaggtacaaacgccattaaagaaatctacaactgaaccaggaatgaagaacggaacaaaattcttaaccattcggttttcaatgacagcattatgattttgtttgctctgtggttttgtttgttgagattttgaatgtagtttcccattaatattaaagaatgagaatgattttggaaactcattccaaaatcattgtattttggaaacaagaaatatgtgtgaggggctgggcgtggtggctcacgcctgtaatcccagcactgtgggaggccgaagtgggcagatcatgaggtgaggagaatgggaccatcctggccaacatggtgaaactccgtctctactaaaaatacaaaaaaaaa

SEQ ID NO: 307551 - DNA, 792 bp, Homo sapiens
cacgagggccgctgtcactcagccccgcgggccaatagaaaaggggtgaaccccgccttcttcctgagttgtgctgcgggcatgcgcactgggcgtccccacgccaccgcccatcagctgagaattgcagctgagggctccggggtaggtgggtgacggcggtcggaggtgtaggagggagccgtggaggtccaggtgactgcttagaaaactgcacagcatctgatgaaattagcgaataagaacatcaaccatgtcttacactccaggagttggtggtgaccccgcccagttggcccagaggatctcttctaacatccagaagatcacacagtgttctgtggaaatacaaagaactctgaatcaacttggaacacctcaagattcacctgaattgaggcaacagttgcaacagaagcagcagtatactaaccagcttgccaaagaaacagataagtacattaaagagtttggatctctgcccaccacccccagtgaacagcgtcaaaggaaaatacagaaggatcgcttagtggcagagttcacaacatcactgacaaacttccagaaggtccagaggcaggctgctgagcgagagaaagagtttgttgctcgagtaagagccagttccagagtgtctggcagttttcctgaggacagctcaaaagaaaggaatcttgtatcctgggaaagccaaactcaacctcaagtgcaggtgcaggatgaagaaattacagaggaatgaaaacccccccttttttcccccctgggttttttccccttttttttttt

SEQ ID NO: 307552 - DNA, 866 bp, Homo sapiens
cacgagggccgctgtcactcagccccgcgggccaatagaaaaggggtgaaccccgccttcttcctgagttgtgctgcgggcatgcgcactgggcgtccccacgccaccgcccatcagctgagaattgcagctgagggctccggggtaggtgggtgacggcggtcggaggtgtaggagggagccgtggaggtccaggtgactgcttagaaaactgcacagcatctgatgaaattagcgaataagaacatcaaccatgtcttacactccaggagttggtggtgaccccgcccagttggcccagaggatctcttctaacatccagaagatcacacagtgttctgtggaaatacaaagaactctgaatcaacttggaacacctcaagattcacctgaattgaggcaacagttgtaagtatctagttaaataaataaaagagaaagaaaaaactctattgctattattctgttgcttttacagtatgtagtatattatgtttactggaagaaaaaatggaaaaacaatggagtttttctgctaccttatccatacatttgtaccaagcttttgtgtagatttttccctgtctggagtaggcaggtgtttttatattaaagatctggaagactgaggtgggcagatcacaagttcaggagttcgagaccaacctggccaatatggtgaaaccccgtctctgctgaaaataaaaaaattagccaggcgtggtggcgagcttctgtagtcctagctactcaggagcctgaggcaggtgaatctcttgaacccgggtggcggaggttgcagtgagccgagatcacaccactgcacttcagcctgggcgactgagcaagactctgtcttaaaaaaa

SEQ ID NO: 307553 - DNA, 597 bp, Homo sapiens
cacgagggccgctgtcactcagccccgcgggccaatagaaaaggggtgaaccccgccttcttcctgagttgtgctgcgggcatgcgcactgggcgtccccacgccaccgcccatcagctgagaattgcagctgagggctccggggtaggtgggtgacggcggtcggaggtgtaggagggagccgtggaggtccaggtgactgcttagaaaactgcacagcatctgatgaaattagcgaataagaacatcaaccatgtcttacactccaggagttggtggtgaccccgcccagttggcccagaggatctcttctaacatccagaagatcacacagtgttgtgagttgagttttaaatggacttcactatttgtatccactcttaactgaacttggtggaggttcataaaaggacaactctgctgattgagagagggaggagcattcctctaacaacaggttttaaagggctcgaactctttagaatgaatgcaagagaattatatttgagataacacttactgcatttttctataggaagtcagggccaggcacataatacattatttcattaaataaaataaagattaaggatagag

SEQ ID NO: 307554 - DNA, 658 bp, Homo sapiens
  misc_feature (411)..(411): n is a, c, g, or t
  misc_feature (435)..(435): n is a, c, g, or t
  misc_feature (479)..(479): n is a, c, g, or t
  misc_feature (550)..(550): n is a, c, g, or t
  misc_feature (602)..(602): n is a, c, g, or t
gatcccttcagccttggagggacctagccctggtcacaccttcatctcagacatgcggcccagagaactgaatgagaataaatgtgcgtgaagccctcagtccacaggatgtggtactggaagcccccactcaagaaggctccagtgaatgctggcacgtccagcctgggtgacagagcaagactctgtctcaaaaaaagaagcgggggagtgggggattgaggccacgtgcagtggctcactactgtaattccagcactttgggaggccgaggcaggaagattgcttgaactcaggagttcaagaccagtctgggcaacatggtgagaccctcgtctctacaaaaaaaaaattatcgtggtgggccgggcgtggtggctcacacctgtaatcccagcactttgggaggcngaggcgggcagatcacaaggtcangagatcgagaccatcctggccaacatggtgaaaccccgtctctnctaaaaatacaaaaattagccgggcatggtgttgcgtgcctgtagtcccagctacttgggaggctgaggcnggagaatcgcttgaacctgggaggcgcaggttgcagggaggcggaggttgcngtgagccgagattgcaccactgcacttcagcctggtgacagagcgagactcgtctc

SEQ ID NO: 307555 - DNA, 2018 bp, Homo sapiens
  misc_feature (1771)..(1771): n is a, c, g, or t
  misc_feature (1795)..(1795): n is a, c, g, or t
  misc_feature (1839)..(1839): n is a, c, g, or t
  misc_feature (1910)..(1910): n is a, c, g, or t
  misc_feature (1962)..(1962): n is a, c, g, or t
cggccccggccccggctccggcgctgctcccaccgccgcggcaacggccccggcccacggaggcggctggacggacccccgacggttggacgtacggactctgcttcgagagtaggccatggacaccttcagcaccaagagcctggctctgcaggcgcagaagaagctcctgagtaagatggcgtccaaggcagtggtggccgtgctggtggatgacaccagcagtgaggtgctggatgagctgtaccgcgccaccagggagttcacgcgcagccgcaaggaggcccagaagatgctcaagaacctggtcaaggtggccctgaagctgggactgctgctgcgtggggaccagctgggcggtgaggagctggcgctgctgcggcgcttccgccaccgggcgcgctgcctggccatgacggccgtcagcttccaccaggtggacttcaccttcgaccggcgcgtgctggccgccgggctgctcgagtgccgcgacctgctgcaccaggccgtgggtccccacctgaccgccaagtcccacggccgcatcaaccacgtgttcggccacctagccgactgcgacttcctggctgcgctctacggccccgccgagccctaccgctcccacctgcgcaggatctgcgagggcctgggccggatgctggacgagggcagcctctgaaccccggcgccgcccaaccgcgcccctcgcgccttttggggctctcctgctgggcgcgggtggggtttgtgggtttttttccacctcttttctcccaatcggactccggccaaactcccctagacagatgggtgacctgtctcctttgagaggatgctgaggcatctgtagcagctgtttcaaacaccaatgtcacctctcctcctggcccccgcccaatggggagaggaatttggggccctactctggggaccacctttcacccgtttgtactttctgggccacgccgacccctgggtcgcttgatgtaaaagccaaaagctgctgcctcccacttggatcatgtcgcctgggattttcatccctcgcacaaggactacgggttcacacggtgaactgggggaagggaagtgttagggggcaagtcgcggcacccccccttccataaactcacgtcctaacccccaggacctcagaagatgatctgatttggaaataggatcattacagatggaattagttcagatgatctcatcttggagtagggtgggccccaattcaaggactggggtccttaaaaaaagggggcctggggcagggcgcggtggctcacgcctgtaatcccagcactttgagaggctgaggcgggcggatcacgaggtcaggagatcgagaccatcctggctaacacggtgaaaccccatctctactgaaaatacaaaaaattagctgggcatggtggcacatgcctgtagtcccagctactcgggaggctgaggcaggataatcacttgaaccaggaggaggaggttgcagtgagccgagattgtgccactgcactccagcctgggtgacagagcaagactctgtctcaaaaaaagaagcgggggagtgggggattgaggccacgtgcagtggctcactactgtaattccagcactttgggaggccgaggcaggaagattgcttgaactcaggagttcaagaccagtctgggcaacatggtgagaccctcgtctctacaaaaaaaaaattatcgtggtgggccgggcgtggtggctcacacctgtaatcccagcactttgggaggcngaggcgggcagatcacaaggtcangagatcgagaccatcctggccaacatggtgaaaccccgtctctnctaaaaatacaaaaattagccgggcatggtgttgcgtgcctgtagtcccagctacttgggaggctgaggcnggagaatcgcttgaacctgggaggcgcaggttgcagggaggcggaggttgcngtgagccgagattgcaccactgcacttcagcctggtgacagagcgagactcgtctc

SEQ ID NO: 307556 - DNA, 2046 bp, Homo sapiens
  misc_feature (1799)..(1799): n is a, c, g, or t
  misc_feature (1823)..(1823): n is a, c, g, or t
  misc_feature (1867)..(1867): n is a, c, g, or t
  misc_feature (1938)..(1938): n is a, c, g, or t
  misc_feature (1990)..(1990): n is a, c, g, or t
gcatcggtccaggcatcggtggcggggagccaggcctaggccagcccgggcccacccagactggcccctaatgagctcccaagtggcctgtggggacttggcctcagttttgccagctgtgaactgggaccgtcgctgctaaggccatggacaccttcagcaccaagagcctggctctgcaggcgcagaagaagctcctgagtaagatggcgtccaaggcagtggtggccgtgctggtggatgacaccagcagtgaggtgctggatgagctgtaccgcgccaccagggagttcacgcgcagccgcaaggaggcccagaagatgctcaagaacctggtcaaggtggccctgaagctgggactgctgctgcgtggggaccagctgggcggtgaggagctggcgctgctgcggcgcttccgccaccgggcgcgctgcctggccatgacggccgtcagcttccaccaggtggacttcaccttcgaccggcgcgtgctggccgccgggctgctcgagtgccgcgacctgctgcaccaggccgtgggtccccacctgaccgccaagtcccacggccgcatcaaccacgtgttcggccacctagccgactgcgacttcctggctgcgctctacggccccgccgagccctaccgctcccacctgcgcaggatctgcgagggcctgggccggatgctggacgagggcagcctctgaaccccggcgccgcccaaccgcgcccctcgcgccttttggggctctcctgctgggcgcgggtggggtttgtgggtttttttccacctcttttctcccaatcggactccggccaaactcccctagacagatgggtgacctgtctcctttgagaggatgctgaggcatctgtagcagctgtttcaaacaccaatgtcacctctcctcctggcccccgcccaatggggagaggaatttggggccctactctggggaccacctttcacccgtttgtactttctgggccacgccgacccctgggtcgcttgatgtaaaagccaaaagctgctgcctcccacttggatcatgtcgcctgggattttcatccctcgcacaaggactacgggttcacacggtgaactgggggaagggaagtgttagggggcaagtcgcggcacccccccttccataaactcacgtcctaacccccaggacctcagaagatgatctgatttggaaataggatcattacagatggaattagttcagatgatctcatcttggagtagggtgggccccaattcaaggactggggtccttaaaaaaagggggcctggggcagggcgcggtggctcacgcctgtaatcccagcactttgagaggctgaggcgggcggatcacgaggtcaggagatcgagaccatcctggctaacacggtgaaaccccatctctactgaaaatacaaaaaattagctgggcatggtggcacatgcctgtagtcccagctactcgggaggctgaggcaggataatcacttgaaccaggaggaggaggttgcagtgagccgagattgtgccactgcactccagcctgggtgacagagcaagactctgtctcaaaaaaagaagcgggggagtgggggattgaggccacgtgcagtggctcactactgtaattccagcactttgggaggccgaggcaggaagattgcttgaactcaggagttcaagaccagtctgggcaacatggtgagaccctcgtctctacaaaaaaaaaattatcgtggtgggccgggcgtggtggctcacacctgtaatcccagcactttgggaggcngaggcgggcagatcacaaggtcangagatcgagaccatcctggccaacatggtgaaaccccgtctctnctaaaaatacaaaaattagccgggcatggtgttgcgtgcctgtagtcccagctacttgggaggctgaggcnggagaatcgcttgaacctgggaggcgcaggttgcagggaggcggaggttgcngtgagccgagattgcaccactgcacttcagcctggtgacagagcgagactcgtctc

SEQ ID NO: 307557 - DNA, 960 bp, Homo sapiens
cggccccggccccggctccggcgctgctcccaccgccgcggcaacggccccggcccacggaggcggctggacggacccccgacggttggacgtacggactctgcttcgagagtaggccatggacaccttcagcaccaagagcctggctctgcaggcgcagaagaagctcctgagtaagatggcgtccaaggcagtggtggccgtgctggtggatgacaccagcagtgaggtgctggatgagctgtaccgcgccaccagggagttcacgcgcagccgcaaggaggcccagaagatgctcaagaacctggtcaaggtggccctgaagctgggactgctgctgcgtggggaccagctgggcggtgaggagctggcgctgctgcggcgcttccgccaccgggcgcgctgcctggccatgacggccgtcagcttccaccaggtggacttcaccttcgaccggcgcgtgctggccgccgggctgctcgagtgccgcgacctgctgcaccaggccgtgggtccccacctgaccgccaagtcccacggccgcatcaaccacgtgttcggccacctagccgactgcgacttcctggctgcgctctacggccccgccgagccctaccgctcccacctgcgcaggatctgcgagggcctgggccggatgctggacgagggcagcctctgaaccccggcgccgcccaaccgcgcccctcgcgccttttggggctctcctgctgggcgcgggtggggtttgtgggtttttttccacctcttttctcccaatcggactccggccaaactcccctagacagatgggtgacctgtctcctttgagaggatgctgaggcatctgtagcagctgtttcaaacaccaatgtcacctctcctcctggcccccgcccaatggggagaggaatttggggccctactctgggccttcacgttgtttggcacgcccttctttta

SEQ ID NO: 307558 - DNA, 743 bp, Homo sapiens
gcggtataggttagggggagacagattgagtctcaattgccccccttggcgtggggctctgctctgggaccagcacccccatcccccatgtggactctagtggactctgccccctttaactgtagggccgcaggtgctcaggccagattccagaaccctgagggcattccaggcggtgggcagctgggccagccgtgcggaggtgggcatgactgtagcttctagctaaaccaggcatcggtccaggcatcggtggcggggagccaggcctaggccagcccgggcccacccagactggcccctaatgagctcccaagtggcctgtggggacttggcctcagttttgccagctgtgaactgggaccgtcgctgctaaggtaattggcaggtgatctgaaggacacctgccgcctcctggccttttctgtgaagtcgaactaggcccatttcctgggatgggaaactaaggcctagaaagaggccaatgcttccaatgtttggccagggaagtggggacagaggcaggacagaatctgttttctctgcatcctcacatttcccagcaccttctctatggaggggggaagggctggtggaggagcagccccaggtgtaaaccaggccgccagagtttatttcctgagccagtcccagctcagctggaggcgatgaacgccttgggaggccccaggggggccagcccagtggtggcggacttggaccatctaggtttgagctctgcc

SEQ ID NO: 307559 - DNA, 942 bp, Homo sapiens
cggatatacagacaaaccatgggttaatagactccataaatttgtggtaagtcattctgggcgccagctagagtttaccttgtgtgctgtttatcaccgtaataagctaagcctctcgggaatgtaaacgagtgaaggtcttgatgaacttaagaacaaactctgaaggccttgaagcttgggttggttgtttatgtacagacagatgctgttaaggcacaaatctgccttaaccagccactacagcaggccaagcaggacctctgcttgcaagcattagcaatttgagttactgcctgtgcctgtctttgaaattaaaaacagtgggttttaaaagcacacacaaaaggtacacactccggtgaggctgtggcaccatcctctagcagtgggccccagcagtaacaaagggtacctccaggggtttgggtagcgctgccctctggcagtcatgcaccgctgtctgccatagccgctctagggtcttggcagaattctgagcttgaagtgcagctcccttactaccctttcccttcctttttcttccctaataggaggtacaatctgcttttgtttgtcgttaagtggtcactcccatttcctttatcttggccgacaacacagagaggagggggagctgggcagtagcttggggtgggggtgggcacctgtggttgtttttaatgggaaatacctctcagagatgttcatgcaggctccctagggccccatcccagtgccaggctggtttccatggagatagggcactgaggctcccgtgaggttggaatcgacttcaccatgggggtccttcagccagcatccagctccccacccccaggctggcagtagcactgctgagatgctgtatttccacccaattctgggtatatcagtgtgtcttgcagaatcttggatcattaaagataaacatatttttaa

SEQ ID NO: 307560 - DNA, 697 bp, Homo sapiens
  misc_feature (125)..(125): n is a, c, g, or t
  misc_feature (127)..(127): n is a, c, g, or t
  misc_feature (129)..(129): n is a, c, g, or t
  misc_feature (137)..(138): n is a, c, g, or t
  misc_feature (142)..(142): n is a, c, g, or t
  misc_feature (146)..(146): n is a, c, g, or t
  misc_feature (151)..(151): n is a, c, g, or t
  misc_feature (153)..(153): n is a, c, g, or t
  misc_feature (156)..(156): n is a, c, g, or t
  misc_feature (159)..(159): n is a, c, g, or t
  misc_feature (167)..(168): n is a, c, g, or t
  misc_feature (178)..(178): n is a, c, g, or t
  misc_feature (182)..(182): n is a, c, g, or t
  misc_feature (203)..(203): n is a, c, g, or t
taaacagacgactcaggagccacagaaggagaggccatgtagatgggaaggggcagcacactctctgcagagcagccttgcctcagctctgcacgacgcgaggaccgaccctttgcacccatggncntntacatggnnaggncagngaatnanccntgnactatggnnttcagcaaangctncaagaagaagttcttctacancaagaaacagaaaaaaagagttgcagagcttgccctgagcctcagctccacgtccgatgatgaacctcccttactaccctttcccttcctttttcttccctaataggaggtacaatctgcttttgtttgtcgttaagtggtcactcccatttcctttatcttggccgacaacacagagaggagggggagctgggcagtagcttggggtgggggtgggcacctgtggttgtttttaatgggaaatacctctcagagatgttcatgcaggctccctagggccccatcccagtgccaggctggtttccatggagatagggcactgaggctcccgtgaggttggaatcgacttcaccatgggggtccttcagccagcatccagctccccacccccaggctggcagtagcactgctgagatgctgtatttccacccaattctgggtatatcagtgtgtcttgcagaatcttggatcattaaagataaacatatttttaa

SEQ ID NO: 307561 - DNA, 2201 bp, Homo sapiens
  misc_feature (5)..(5): n is a, c, g, or t
  misc_feature (8)..(8): n is a, c, g, or t
tgccngcngtactggacccgagcgcgacggtgcggctggcggacccgggctggcttgtggggaaacgaaactgagggaggaggcggcggctctggcagcggcggcgacagtgtcggcctgaccccccctccgctccccggcagctcgctctctcccctcagcttaacgatgaagaggagaactgacccagaatgcactgcccccatcaagaaacagaaaaaaagagttgcagagcttgccctgagcctcagctccacgtccgatgatgaacctccctcctctgtcagtcatggagcaaaagcatctactacaagccttagtgggtctgatagtgagaccgaggggaaacaacacagctctgactcttttgacgatgcattcaaagcagactctcttgtggaaggaacttcttctcgctattccatgtataatagcgtctcccagaagcttatggccaagatgggcttcagggaaggtgaaggattgggtaaatacagccagggtcggaaggacatcgttgaggcttccagtcagaaaggtcgaagaggcttgggtctgacactccggggctttgaccaggagctgaacgtggactggcgagatgagccagagcccagtgcttgtgagcaggtgtcatggtttccagaatgtaccactgaaattcctgacactcaggaaatgagcgattggatggtggtgggaaagagaaagatgattattgaagatgaaacagagttttgtggggaagagctgcttcacagtgtgttgcagtgtaagaagccactggtgaaggaccgggaagctgagcttctgtactttgctgatgtctgcgcaggcccaggtggcttctcagagtatgtgctgtggaggaagaagtggcatgcaaagggctttggaatgactttgaagggccctaatgacttcaagctggaggacttctactctgcttccagtgaactcttcgaaccctactatggtgagggtgggattgatggagatggagatatcacccgcccagagaacatctctgcttttcggaattttgtcctggataacacagatcgcaagggtgtccattttctgatggctgatgggggtttctcggtggaggggcaggagaacctgcaggagatcctcagcaagcagctgcttctgtgtcagttcctcatggcgctgtccattgtccggacaggaggccacttcatctgtaaaacctttgacctgttcacaccgtttagtgtggggcttgtctacctgctgtactgctgctttgaacgagtttgtatgaaaacattctcctccgcataagcctgcgtcagattaaaacactgaactgacaattaacagcccaatatctacaatcaaccaaaaagtcattattaccctcactgtcaacccaacacaggcatgctcataaggaaaggttaaaaaaagtaaaaggaactcggcaaatcttaccccgcctgtttaccaaaaacatcacctctagcatcaccagtattagaggcaccgcctgcccagtgacacatgtttaacggccgcggtaccctaaccgtgcaaaggtagcataatcacttgttccttaattagggacctgtatgaatggctccacgagggttcagctgtctcttacttttaaccagtgaaattgacctgcccgtgaagaggcgggcatgacacagcaagacgagaagaccctatggagctttaatttattaatgcaaacagtacctaacaaacccacaggtcctaaactaccaaacccgcattaaaaatttcggttggggcgacctcggagcagaacccaacctccgagcagtacatgctaagacttcaccagtcaaagcgaactactatactcaattgatccaataacttgaccaacggaacaagttaccctagggataacagcgcaatcctattctagagtccatatcaacaatagggtttacgacctcgatgttggatcaggacatcccgatggtgcagccgctattaaaggttcgtttgttcaacgattaaagtcctacgtgatctgagttcagaccggagtaatccaggtcggtttctatctacttcaaattcctccctgtacgaaaggacaagagaaataaggcctacttcacaaagcgccttcccccgtaaatgatatcatctcaacttagtattatacccacacccacccaagaacagggtttgtt

SEQ ID NO: 307562 - DNA, 581 bp, Homo sapiens
atgcctcataatttttttattaaatgccagacattgtgtgtaaagaacagtgaagactaaagtagaaagggtggctgttagtatacataggtcgagtaagcttagtctatagttgaactgaatctgggctttgaatgagctcaccactactttcagattatttaagggtgggattagaagcttccttttagtaggacttgggatctaagaactgagtgacccagttttcctgttctaccctcatccttcagtaagccccacataactgcactgtggggtaggggtgtgggtttctttctcaactctccagctccttcaccaaatatagatggccactgctcccgtttaacctctctgtcctgatgtcagttacctgtcttttttggtaatcctgagatcaaataatttttttttcttctagccactgtagtctgcagatcaaagctctggcgaaaatccatgcctttgttcaagacacgtgagtgttgcccacttttcagaaaccacctatttcaagggaagatcttgcttttcctccccacaagctgtttgtttttttcatttcaacaaacattttaaaa

SEQ ID NO: 307563 - DNA, 4039 bp, Homo sapiens
  misc_feature (5)..(5): n is a, c, g, or t
  misc_feature (8)..(8): n is a, c, g, or t
tgccngcngtactggacccgagcgcgacggtgcggctggcggacccgggctggcttgtggggaaacgaaactgagggaggaggcggcggctctggcagcggcggcgacagtgtcggcctgaccccccctccgctccccggcagctcgctctctcccctcagcttaacgatgaagaggagaactgacccagaatgcactgcccccatcaagaaacagaaaaaaagagttgcagagcttgccctgagcctcagctccacgtccgatgatgaacctccctcctctgtcagtcatggagcaaaagcatctactacaagccttagtgggtctgatagtgagaccgaggggaaacaacacagctctgactcttttgacgatgcattcaaagcagactctcttgtggaaggaacttcttctcgctattccatgtataatagcgtctcccagaagcttatggccaagatgggcttcagggaaggtgaaggattgggtaaatacagccagggtcggaaggacatcgttgaggcttccagtcagaaaggtcgaagaggcttgggtctgacactccggggctttgaccaggagctgaacgtggactggcgagatgagccagagcccagtgcttgtgagcaggtgtcatggtttccagaatgtaccactgaaattcctgacactcaggaaatgagcgattggatggtggtgggaaagagaaagatgattattgaagatgaaacagagttttgtggggaagagctgcttcacagtgtgttgcagtgtaagagcgtgtttgatgtcttggatggggaagagatgcggcgagctcggactcgggccaatccctatgagatgatccgaggagtcttctttctaaacagggcagcaatgaagatggctaacatggattttgtatttgatcgcatgttcacaaatccgcgggactcttatgggaagccactggtgaaggaccgggaagctgagcttctgtactttgctgatgtctgcgcaggcccaggtggcttctcagagtatgtgctgtggaggaagaagtggcatgcaaagggctttggaatgactttgaagggccctaatgacttcaagctggaggacttctactctgcttccagtgaactcttcgaaccctactatggtgagggtgggattgatggagatggagatatcacccgcccagagaacatctctgcttttcggaattttgtcctggataacacagatcgcaagggtgtccattttctgatggctgatgggggtttctcggtggaggggcaggagaacctgcaggagatcctcagcaagcagctgcttctgtgtcagttcctcatggcgctgtccattgtccggacaggaggccacttcatctgtaaaacctttgacctgttcacaccgtttagtgtggggcttgtctacctgctgtactgctgctttgaacgagtttgtctcttcaagcctattaccagccgtcctgccaactcagagaggtatgtggtgtgcaagggcctgaaggtgggcatagatgatgttcgggattacctcttcgcagtgaatattaaactcaatcagctgcggaacacggattccgacgtcaacttggtggtccccctggaggtgatcaagggagaccatgaatttactgactacatgatacggtccaatgagagccactgtagtctgcagatcaaagctctggcgaaaatccatgcctttgttcaagacacgacactgagtgagcctcgacaggcagagatacggaaggagtgcctccgactctgggggatcccagaccaggctcgtgtggctccttcttcctccgaccctaaatcgaagttctttgagctaatccagggcactgagattgacatcttcagctacaagcccacactgctcacctctaaaaccctggagaagatccgccctgtgtttgactaccgctgcatggtatctggcagtgagcagaagttcctcatcggcctggggaaatcccagatctacacatgggatggccgccagtcagaccgctggatcaagctagacctgaagacagagctgccccgggacactctgctatctgtggaaattgtgcatgagctgaaaggggaggggaaggcccagaggaagatcagtgccatccacatcctcgatgtccttgtgctgaatggcaccgacgttcgggagcagcactttaaccagcgaattcagcttgccgagaaatttgtgaaagccgtttccaagcctagtcggcccgacatgaatcccatcagggtgaaggaggtgtacagactggaagagatggagaagatttttgtcaggttggagatgaagatcatcaagggctccagtggcaccccaaagctcagctacacagggcgtgatgaccggcactttgtacccatgggcctctacatcgtcaggacagtgaatgagccctggactatgggattcagcaaaagcttcaagaagaagttcttctacaacaagaaaaccaaggactctacttttgacctccctgcagactccattgccccatttcacatttgctactatggccggctcttctgggagtggggggatggcattcgtgtgcatgactcccagaagccccaggaccaggacaagctgtccaaggaggacgtcctctccttcatccagatgcacagggcctaagagcctcagaatgtgccacccctgcagaatgccctgtcattcctgagatggggccacctggggcccacagtggtggcttcttccccctcttgaaaagggactggggagcattgcacctggcatgaggagtgggtggcctcctctccatcccctgaagagctcaggcagggccctgcagagaacactcatgttccttctgggacacctgcctgggaactttcccctgccaggactcagcctgaaggaagctgctcctgaggcaggtatgaggtcagtgcctagggcacgtgggactgatggaggacatatcagagtggcagagctgtgggctctgctgttctctcctgcatcctgtagactcacttttctgagttccatgcactgccctgagggtagccatgcccttgctttgcccaactttttattgggccatccctgagtgggtggagacctgctgtcatgagctggccaggagaacctgctataaaaaaatcaaggttttgtttctttgaacttactctgttttgatgccaaattggagaccattttcttgtctccttcccccactcatcctggccttccctggagttcttcctagcccagagctctgacagtccagcagggtgggaaggagggagtttgggcaaactctcatccctgataccacattgagatcctgggagccctcttttcgtactgagtatggagttgtagagccatcctaggtgccatccccttttggtccaaacattgggcagcgctagatggcaggaagcagccttgaagacccgtctttcccccacagcagcaggggccccagcagtaacaaagggtacctccaggggtttgggtagcgctgccctctggcagtcatgcaccgctgtctgccatagccgctctagggtcttggcagaattctgagcttgaagtgcagctcccttactaccctttcccttcctttttcttccctaataggaggtacaatctgcttttgtttgtcgttaagtggtcactcccatttcctttatcttggccgacaacacagagaggagggggagctgggcagtagcttggggtgggggtgggcacctgtggttgtttttaatgggaaatacctctcagagatgttcatgcaggctccctagggccccatcccagtgccaggctggtttccatggagatagggcactgaggctcccgtgaggttggaatcgacttcaccatgggggtccttcagccagcatccagctccccacccccaggctggcagtagcactgctgagatgctgtatttccacccaattctgggtatatcagtgtgtcttgcagaatcttggatcattaaagataaacatatttttaa

SEQ ID NO: 307564 - DNA, 4036 bp, Homo sapiens
  misc_feature (125)..(125): n is a, c, g, or t
  misc_feature (127)..(127): n is a, c, g, or t
  misc_feature (129)..(129): n is a, c, g, or t
  misc_feature (137)..(138): n is a, c, g, or t
  misc_feature (142)..(142): n is a, c, g, or t
  misc_feature (146)..(146): n is a, c, g, or t
  misc_feature (151)..(151): n is a, c, g, or t
  misc_feature (153)..(153): n is a, c, g, or t
  misc_feature (156)..(156): n is a, c, g, or t
  misc_feature (159)..(159): n is a, c, g, or t
  misc_feature (167)..(168): n is a, c, g, or t
  misc_feature (178)..(178): n is a, c, g, or t
  misc_feature (182)..(182): n is a, c, g, or t
  misc_feature (203)..(203): n is a, c, g, or t
taaacagacgactcaggagccacagaaggagaggccatgtagatgggaaggggcagcacactctctgcagagcagccttgcctcagctctgcacgacgcgaggaccgaccctttgcacccatggncntntacatggnnaggncagngaatnanccntgnactatggnnttcagcaaangctncaagaagaagttcttctacancaagaaacagaaaaaaagagttgcagagcttgccctgagcctcagctccacgtccgatgatgaacctccctcctctgtcagtcatggagcaaaagcatctactacaagccttagtgggtctgatagtgagaccgaggggaaacaacacagctctgactcttttgacgatgcattcaaagcagactctcttgtggaaggaacttcttctcgctattccatgtataatagcgtctcccagaagcttatggccaagatgggcttcagggaaggtgaaggattgggtaaatacagccagggtcggaaggacatcgttgaggcttccagtcagaaaggtcgaagaggcttgggtctgacactccggggctttgaccaggagctgaacgtggactggcgagatgagccagagcccagtgcttgtgagcaggtgtcatggtttccagaatgtaccactgaaattcctgacactcaggaaatgagcgattggatggtggtgggaaagagaaagatgattattgaagatgaaacagagttttgtggggaagagctgcttcacagtgtgttgcagtgtaagagcgtgtttgatgtcttggatggggaagagatgcggcgagctcggactcgggccaatccctatgagatgatccgaggagtcttctttctaaacagggcagcaatgaagatggctaacatggattttgtatttgatcgcatgttcacaaatccgcgggactcttatgggaagccactggtgaaggaccgggaagctgagcttctgtactttgctgatgtctgcgcaggcccaggtggcttctcagagtatgtgctgtggaggaagaagtggcatgcaaagggctttggaatgactttgaagggccctaatgacttcaagctggaggacttctactctgcttccagtgaactcttcgaaccctactatggtgagggtgggattgatggagatggagatatcacccgcccagagaacatctctgcttttcggaattttgtcctggataacacagatcgcaagggtgtccattttctgatggctgatgggggtttctcggtggaggggcaggagaacctgcaggagatcctcagcaagcagctgcttctgtgtcagttcctcatggcgctgtccattgtccggacaggaggccacttcatctgtaaaacctttgacctgttcacaccgtttagtgtggggcttgtctacctgctgtactgctgctttgaacgagtttgtctcttcaagcctattaccagccgtcctgccaactcagagaggtatgtggtgtgcaagggcctgaaggtgggcatagatgatgttcgggattacctcttcgcagtgaatattaaactcaatcagctgcggaacacggattccgacgtcaacttggtggtccccctggaggtgatcaagggagaccatgaatttactgactacatgatacggtccaatgagagccactgtagtctgcagatcaaagctctggcgaaaatccatgcctttgttcaagacacgacactgagtgagcctcgacaggcagagatacggaaggagtgcctccgactctgggggatcccagaccaggctcgtgtggctccttcttcctccgaccctaaatcgaagttctttgagctaatccagggcactgagattgacatcttcagctacaagcccacactgctcacctctaaaaccctggagaagatccgccctgtgtttgactaccgctgcatggtatctggcagtgagcagaagttcctcatcggcctggggaaatcccagatctacacatgggatggccgccagtcagaccgctggatcaagctagacctgaagacagagctgccccgggacactctgctatctgtggaaattgtgcatgagctgaaaggggaggggaaggcccagaggaagatcagtgccatccacatcctcgatgtccttgtgctgaatggcaccgacgttcgggagcagcactttaaccagcgaattcagcttgccgagaaatttgtgaaagccgtttccaagcctagtcggcccgacatgaatcccatcagggtgaaggaggtgtacagactggaagagatggagaagatttttgtcaggttggagatgaagatcatcaagggctccagtggcaccccaaagctcagctacacagggcgtgatgaccggcactttgtacccatgggcctctacatcgtcaggacagtgaatgagccctggactatgggattcagcaaaagcttcaagaagaagttcttctacaacaagaaaaccaaggactctacttttgacctccctgcagactccattgccccatttcacatttgctactatggccggctcttctgggagtggggggatggcattcgtgtgcatgactcccagaagccccaggaccaggacaagctgtccaaggaggacgtcctctccttcatccagatgcacagggcctaagagcctcagaatgtgccacccctgcagaatgccctgtcattcctgagatggggccacctggggcccacagtggtggcttcttccccctcttgaaaagggactggggagcattgcacctggcatgaggagtgggtggcctcctctccatcccctgaagagctcaggcagggccctgcagagaacactcatgttccttctgggacacctgcctgggaactttcccctgccaggactcagcctgaaggaagctgctcctgaggcaggtatgaggtcagtgcctagggcacgtgggactgatggaggacatatcagagtggcagagctgtgggctctgctgttctctcctgcatcctgtagactcacttttctgagttccatgcactgccctgagggtagccatgcccttgctttgcccaactttttattgggccatccctgagtgggtggagacctgctgtcatgagctggccaggagaacctgctataaaaaaatcaaggttttgtttctttgaacttactctgttttgatgccaaattggagaccattttcttgtctccttcccccactcatcctggccttccctggagttcttcctagcccagagctctgacagtccagcagggtgggaaggagggagtttgggcaaactctcatccctgataccacattgagatcctgggagccctcttttcgtactgagtatggagttgtagagccatcctaggtgccatccccttttggtccaaacattgggcagcgctagatggcaggaagcagccttgaagacccgtctttcccccacagcagcaggggccccagcagtaacaaagggtacctccaggggtttgggtagcgctgccctctggcagtcatgcaccgctgtctgccatagccgctctagggtcttggcagaattctgagcttgaagtgcagctcccttactaccctttcccttcctttttcttccctaataggaggtacaatctgcttttgtttgtcgttaagtggtcactcccatttcctttatcttggccgacaacacagagaggagggggagctgggcagtagcttggggtgggggtgggcacctgtggttgtttttaatgggaaatacctctcagagatgttcatgcaggctccctagggccccatcccagtgccaggctggtttccatggagatagggcactgaggctcccgtgaggttggaatcgacttcaccatgggggtccttcagccagcatccagctccccacccccaggctggcagtagcactgctgagatgctgtatttccacccaattctgggtatatcagtgtgtcttgcagaatcttggatcattaaagataaacatatttttaa

SEQ ID NO: 307565 - DNA, 4543 bp, Homo sapiens
  misc_feature (5)..(5): n is a, c, g, or t
  misc_feature (8)..(8): n is a, c, g, or t
tgccngcngtactggacccgagcgcgacggtgcggctggcggacccgggctggcttgtggggaaacgaaactgagggaggaggcggcggctctggcagcggcggcgacagtgtcggcctgaccccccctccgctccccggcagctcgctctctcccctcagcttaacgatgaagaggagaactgacccagaatgcactgcccccatcaagaaacagaaaaaaagagttgcagagcttgccctgagcctcagctccacgtccgatgatgaacctccctcctctgtcagtcatggagcaaaagcatctactacaagccttagtgggtctgatagtgagaccgaggggaaacaacacagctctgactcttttgacgatgcattcaaagcagactctcttgtggaaggaacttcttctcgctattccatgtataatagcgtctcccagaagcttatggccaagatgggcttcagggaaggtgaaggattgggtaaatacagccagggtcggaaggacatcgttgaggcttccagtcagaaaggtcgaagaggcttgggtctgacactccggggctttgaccaggagctgaacgtggactggcgagatgagccagagcccagtgcttgtgagcaggtgtcatggtttccagaatgtaccactgaaattcctgacactcaggaaatgagcgattggatggtggtgggaaagagaaagatgattattgaagatgaaacagagttttgtggggaagagctgcttcacagtgtgttgcagtgtaagagcgtgtttgatgtcttggatggggaagagatgcggcgagctcggactcgggccaatccctatgagatgatccgaggagtcttctttctaaacagggcagcaatgaagatggctaacatggattttgtatttgatcgcatgttcacaaatccgcgggactcttatgggaagccactggtgaaggaccgggaagctgagcttctgtactttgctgatgtctgcgcaggcccaggtggcttctcagagtatgtgctgtggaggaagaagtggcatgcaaagggctttggaatgactttgaagggccctaatgacttcaagctggaggacttctactctgcttccagtgaactcttcgaaccctactatggtgagggtgggattgatggagatggagatatcacccgcccagagaacatctctgcttttcggaattttgtcctggataacacagatcgcaagggtgtccattttctgatggctgatgggggtttctcggtggaggggcaggagaacctgcaggagatcctcagcaagcagctgcttctgtgtcagttcctcatggcgctgtccattgtccggacaggaggccacttcatctgtaaaacctttgacctgttcacaccgtttagtgtggggcttgtctacctgctgtactgctgctttgaacgagtttgtctcttcaagcctattaccagccgtcctgccaactcagagaggtatgtggtgtgcaagggcctgaaggtgggcatagatgatgttcgggattacctcttcgcagtgaatattaaactcaatcagctgcggaacacggattccgacgtcaacttggtggtccccctggaggtgatcaagggagaccatgaatttactgactacatgatacggtccaatgagagccactgtagtctgcagatcaaagctctggcgaaaatccatgcctttgttcaagacacgacactgagtgagcctcgacaggcagagatacggaaggagtgcctccgactctgggggatcccagaccaggctcgtgtggctccttcttcctccgaccctaaatcgaagttctttgagctaatccagggcactgagattgacatcttcagctacaagcccacactgctcacctctaaaaccctggagaagatccgccctgtgtttgactaccgctgcatggtatctggcagtgagcagaagttcctcatcggcctggggaaatcccagatctacacatgggatggccgccagtcagaccgctggatcaagctagacctgaagacagagctgccccgggacactctgctatctgtggaaattgtgcatgagctgaaaggggaggggaaggcccagaggaagatcagtgccatccacatcctcgatgtccttgtgctgaatggcaccgacgttcgggagcagcactttaaccagcggtctgacctgggccccagggtagggagggtgggggtaggccagggcagcttgggaggacagcggcctcccgaggtgtggccccttatctaggccttctctgcttgttgacatcctgagagtttccccctcccacccactgactggtcccaaagtcagggtgagaattggagttgccacttcagagtttgctagggcttgggccctggttatcagagataccagcacactccattttgccacagctgctcaggttgaggtatttatgttaaggttgagcaagagggtgaccttgcgggtagagggggtactccttggaagaaatatcctgtgcttgagtggtcccatttaagttgctcatctgagtgggtgcactgtagtttccatgctttggggtgacagggcagacacatacaataaagatgatacttgaagttctagtggaggtgactgagcacagctgaaggcacacttcaggaaaaccaaccgacatagtgaaattagagaattcagcttgccgagaaatttgtgaaagccgtttccaagcctagtcggcccgacatgaatcccatcagggtgaaggaggtgtacagactggaagagatggagaagatttttgtcaggttggagatgaagatcatcaagggctccagtggcaccccaaagctcagctacacagggcgtgatgaccggcactttgtacccatgggcctctacatcgtcaggacagtgaatgagccctggactatgggattcagcaaaagcttcaagaagaagttcttctacaacaagaaaaccaaggactctacttttgacctccctgcagactccattgccccatttcacatttgctactatggccggctcttctgggagtggggggatggcattcgtgtgcatgactcccagaagccccaggaccaggacaagctgtccaaggaggacgtcctctccttcatccagatgcacagggcctaagagcctcagaatgtgccacccctgcagaatgccctgtcattcctgagatggggccacctggggcccacagtggtggcttcttccccctcttgaaaagggactggggagcattgcacctggcatgaggagtgggtggcctcctctccatcccctgaagagctcaggcagggccctgcagagaacactcatgttccttctgggacacctgcctgggaactttcccctgccaggactcagcctgaaggaagctgctcctgaggcaggtatgaggtcagtgcctagggcacgtgggactgatggaggacatatcagagtggcagagctgtgggctctgctgttctctcctgcatcctgtagactcacttttctgagttccatgcactgccctgagggtagccatgcccttgctttgcccaactttttattgggccatccctgagtgggtggagacctgctgtcatgagctggccaggagaacctgctataaaaaaatcaaggttttgtttctttgaacttactctgttttgatgccaaattggagaccattttcttgtctccttcccccactcatcctggccttccctggagttcttcctagcccagagctctgacagtccagcagggtgggaaggagggagtttgggcaaactctcatccctgataccacattgagatcctgggagccctcttttcgtactgagtatggagttgtagagccatcctaggtgccatccccttttggtccaaacattgggcagcgctagatggcaggaagcagccttgaagacccgtctttcccccacagcagcaggggccccagcagtaacaaagggtacctccaggggtttgggtagcgctgccctctggcagtcatgcaccgctgtctgccatagccgctctagggtcttggcagaattctgagcttgaagtgcagctcccttactaccctttcccttcctttttcttccctaataggaggtacaatctgcttttgtttgtcgttaagtggtcactcccatttcctttatcttggccgacaacacagagaggagggggagctgggcagtagcttggggtgggggtgggcacctgtggttgtttttaatgggaaatacctctcagagatgttcatgcaggctccctagggccccatcccagtgccaggctggtttccatggagatagggcactgaggctcccgtgaggttggaatcgacttcaccatgggggtccttcagccagcatccagctccccacccccaggctggcagtagcactgctgagatgctgtatttccacccaattctgggtatatcagtgtgtcttgcagaatcttggatcattaaagataaacatatttttaa

SEQ ID NO: 307566 - DNA, 2787 bp, Homo sapiens
atgcctcataatttttttattaaatgccagacattgtgtgtaaagaacagtgaagactaaagtagaaagggtggctgttagtatacataggtcgagtaagcttagtctatagttgaactgaatctgggctttgaatgagctcaccactactttcagattatttaagggtgggattagaagcttccttttagtaggacttgggatctaagaactgagtgacccagttttcctgttctaccctcatccttcagtaagccccacataactgcactgtggggtaggggtgtgggtttctttctcaactctccagctccttcaccaaatatagatggccactgctcccgtttaacctctctgtcctgatgtcagttacctgtcttttttggtaatcctgagatcaaataatttttttttcttctagccactgtagtctgcagatcaaagctctggcgaaaatccatgcctttgttcaagacacgacactgagtgagcctcgacaggcagagatacggaaggagtgcctccgactctgggggatcccagaccaggctcgtgtggctccttcttcctccgaccctaaatcgaagttctttgagctaatccagggcactgagattgacatcttcagctacaagcccacactgctcacctctaaaaccctggagaagatccgccctgtgtttgactaccgctgcatggtatctggcagtgagcagaagttcctcatcggcctggggaaatcccagatctacacatgggatggccgccagtcagaccgctggatcaagctagacctgaagacagagctgccccgggacactctgctatctgtggaaattgtgcatgagctgaaaggggaggggaaggcccagaggaagatcagtgccatccacatcctcgatgtccttgtgctgaatggcaccgacgttcgggagcagcactttaaccagcgaattcagcttgccgagaaatttgtgaaagccgtttccaagcctagtcggcccgacatgaatcccatcagggtgaaggaggtgtacagactggaagagatggagaagatttttgtcaggttggagatgaagatcatcaagggctccagtggcaccccaaagctcagctacacagggcgtgatgaccggcactttgtacccatgggcctctacatcgtcaggacagtgaatgagccctggactatgggattcagcaaaagcttcaagaagaagttcttctacaacaagaaaaccaaggactctacttttgacctccctgcagactccattgccccatttcacatttgctactatggccggctcttctgggagtggggggatggcattcgtgtgcatgactcccagaagccccaggaccaggacaagctgtccaaggaggacgtcctctccttcatccagatgcacagggcctaagagcctcagaatgtgccacccctgcagaatgccctgtcattcctgagatggggccacctggggcccacagtggtggcttcttccccctcttgaaaagggactggggagcattgcacctggcatgaggagtgggtggcctcctctccatcccctgaagagctcaggcagggccctgcagagaacactcatgttccttctgggacacctgcctgggaactttcccctgccaggactcagcctgaaggaagctgctcctgaggcaggtatgaggtcagtgcctagggcacgtgggactgatggaggacatatcagagtggcagagctgtgggctctgctgttctctcctgcatcctgtagactcacttttctgagttccatgcactgccctgagggtagccatgcccttgctttgcccaactttttattgggccatccctgagtgggtggagacctgctgtcatgagctggccaggagaacctgctataaaaaaatcaaggttttgtttctttgaacttactctgttttgatgccaaattggagaccattttcttgtctccttcccccactcatcctggccttccctggagttcttcctagcccagagctctgacagtccagcagggtgggaaggagggagtttgggcaaactctcatccctgataccacattgagatcctgggagccctcttttcgtactgagtatggagttgtagagccatcctaggtgccatccccttttggtccaaacattgggcagcgctagatggcaggaagcagccttgaagacccgtctttcccccacagcagcaggggccccagcagtaacaaagggtacctccaggggtttgggtagcgctgccctctggcagtcatgcaccgctgtctgccatagccgctctagggtcttggcagaattctgagcttgaagtgcagctcccttactaccctttcccttcctttttcttccctaataggaggtacaatctgcttttgtttgtcgttaagtggtcactcccatttcctttatcttggccgacaacacagagaggagggggagctgggcagtagcttggggtgggggtgggcacctgtggttgtttttaatgggaaatacctctcagagatgttcatgcaggctccctagggccccatcccagtgccaggctggtttccatggagatagggcactgaggctcccgtgaggttggaatcgacttcaccatgggggtccttcagccagcatccagctccccacccccaggctggcagtagcactgctgagatgctgtatttccacccaattctgggtatatcagtgtgtcttgcagaatcttggatcattaaagataaacatatttttaa

SEQ ID NO: 307567 - DNA, 3973 bp, Homo sapiens
  misc_feature (5)..(5): n is a, c, g, or t
  misc_feature (8)..(8): n is a, c, g, or t
tgccngcngtactggacccgagcgcgacggtgcggctggcggacccgggctggcttgtggggaaacgaaactgagggaggaggcggcggctctggcagcggcggcgacagtgtcggcctgaccccccctccgctccccggcagctcgctctctcccctcagcttaacgatgaagaggagaactgacccagaatgcactgcccccatcaagaaacagaaaaaaagagttgcagagcttgccctgagcctcagctccacgtccgatgatgaacctccctcctctgtcagtcatggagcaaaagcatctactacaagccttagtgggtctgatagtgagaccgaggggaaacaacacagctctgactcttttgacgatgcattcaaagcagactctcttgtggaaggaacttcttctcgctattccatgtataatagcgtctcccagaagcttatggccaagatgggcttcagggaaggtgaaggattgggtaaatacagccagggtcggaaggacatcgttgaggcttccagtcagaaaggtcgaagaggcttgggtctgacactccggggctttgaccaggagctgaacgtggactggcgagatgagccagagcccagtgcttgtgagcaggtgtcatggtttccagaatgtaccactgaaattcctgacactcaggaaatgagcgattggatggtggtgggaaagagaaagatgattattgaagatgaaacagagttttgtggggaagagctgcttcacagtgtgttgcagtgtaagagcgtgtttgatgtcttggatggggaagagatgcggcgagctcggactcgggccaatccctatgagatgatccgaggagtcttctttctaaacagggcagcaatgaagatggctaacatggattttgtatttgatcgcatgttcacaaatccgcgggactcttatgggaagccactggtgaaggaccgggaagctgagcttctgtactttgctgatgtctgcgcaggcccaggtggcttctcagagtatgtgctgtggaggaagaagtggcatgcaaagggctttggaatgactttgaagggccctaatgacttcaagctggaggacttctactctgcttccagtgaactcttcgaaccctactatggtgagggtgggattgatggagatggagatatcacccgcccagagaacatctctgcttttcggaattttgtcctggataacacagatcgcaagggtgtccattttctgatggctgatgggggtttctcggtggaggggcaggagaacctgcaggagatcctcagcaagcagctgcttctgtgtcagttcctcatggcgctgtccattgtccggacaggaggccacttcatctgtaaaacctttgacctgttcacaccgtttagtgtggggcttgtctacctgctgtactgctgctttgaacgagtttgtctcttcaagcctattaccagccgtcctgccaactcagagaggtatgtggtgtgcaagggcctgaaggtgggcatagatgatgttcgggattacctcttcgcagtgaatattaaactcaatcagctgcggaacacggattccgacgtcaacttggtggtccccctggaggtgatcaagggagaccatgaatttactgactacatgatacggtccaatgagagccactgtagtctgcagatcaaagctctggcgaaaatccatgcctttgttcaagacacgacactgagtgagcctcgacaggcagagatacggaaggagtgcctccgactctgggggatcccagaccaggctcgtgtggctccttcttcctccgaccctaaatcgaagttctttgagctaatccagggcactgagattgacatcttcagctacaagcccacactgctcacctctaaaaccctggagaagatccgccctgtgtttgactaccgctgcatggtatctggcagtgagcagaagttcctcatcggcctggggaaatcccagatctacacatgggatggccgccagtcagaccgctggatcaagctagacctgaagacagagctgccccgggacactctgctatctgtggaaattgtgcatgagctgaaaggggaggggaaggcccagaggaagatcagtgccatccacatcctcgatgtccttgtgctgaatggcaccgacgttcgggagcagcactttaaccagcgaattcagcttgccgagaaatttgtgaaagccgtttccaagcctagtcggcccgacatgaatcccatcagggtgaaggaggtgtacagactggaagagatggagaagatttttgtcaggttggagatgaagatcatcaagggctccagtggcaccccaaagctcagctacacagggcgtgatgaccggcactttgtacccatgggcctctacatcgtcaggacagtgaatgagccctggactatgggattcagcaaaagcttcaagaagaagttcttctacaacaagaaaaccaaggactctacttttgacctccctgcagactccattgccccatttcacatttgctactatggccggctcttctgggagtggggggatggcattcgtgtgcatgactcccagaagccccaggaccaggacaagctgtccaaggaggacgtcctctccttcatccagatgcacagggcctaagagcctcagaatgtgccacccctgcagaatgccctgtcattcctgagatggggccacctggggcccacagtggtggcttcttcccctgaagagctcaggcagggccctgcagagaacactcatgttccttctgggacacctgcctgggaactttcccctgccaggactcagcctgaaggaagctgctcctgaggcaggtatgaggtcagtgcctagggcacgtgggactgatggaggacatatcagagtggcagagctgtgggctctgctgttctctcctgcatcctgtagactcacttttctgagttccatgcactgccctgagggtagccatgcccttgctttgcccaactttttattgggccatccctgagtgggtggagacctgctgtcatgagctggccaggagaacctgctataaaaaaatcaaggttttgtttctttgaacttactctgttttgatgccaaattggagaccattttcttgtctccttcccccactcatcctggccttccctggagttcttcctagcccagagctctgacagtccagcagggtgggaaggagggagtttgggcaaactctcatccctgataccacattgagatcctgggagccctcttttcgtactgagtatggagttgtagagccatcctaggtgccatccccttttggtccaaacattgggcagcgctagatggcaggaagcagccttgaagacccgtctttcccccacagcagcaggggccccagcagtaacaaagggtacctccaggggtttgggtagcgctgccctctggcagtcatgcaccgctgtctgccatagccgctctagggtcttggcagaattctgagcttgaagtgcagctcccttactaccctttcccttcctttttcttccctaataggaggtacaatctgcttttgtttgtcgttaagtggtcactcccatttcctttatcttggccgacaacacagagaggagggggagctgggcagtagcttggggtgggggtgggcacctgtggttgtttttaatgggaaatacctctcagagatgttcatgcaggctccctagggccccatcccagtgccaggctggtttccatggagatagggcactgaggctcccgtgaggttggaatcgacttcaccatgggggtccttcagccagcatccagctccccacccccaggctggcagtagcactgctgagatgctgtatttccacccaattctgggtatatcagtgtgtcttgcagaatcttggatcattaaagataaacatatttttaa

SEQ ID NO: 307568 - DNA, 1902 bp, Homo sapiens
cagcgtcgtattcaaaaacaatcgggttaggtagcgaggcatgggtgtgtcagcactttaaccagcgaattcagcttgccgagaaatttgtgaaagccgtttccaagcctagtcggcccgacatgaatcccatcagggtgaaggaggtgtacagactggaagagatggagaagatttttgtcaggttggagatgaagatcatcaagggctccagtggcaccccaaagctcagctacacagggcgtgatgaccggcactttgtacccatgggcctctacatcgtcaggacagtgaatgagccctggactatgggattcagcaaaagcttcaagaagaagttcttctacaacaagaaaaccaaggactctacttttgacctccctgcagactccattgccccatttcacatttgctactatggccggctcttctgggagtggggggatggcattcgtgtgcatgactcccagaagccccaggaccaggacaagctgtccaaggaggacgtcctctccttcatccagatgcacagggcctaagagcctcagaatgtgccacccctgcagaatgccctgtcattcctgagatggggccacctggggcccacagtggtggcttcttccccctcttgaaaagggactggggagcattgcacctggcatgaggagtgggtggcctcctctccatcccctgaagagctcaggcagggccctgcagagaacactcatgttccttctgggacacctgcctgggaactttcccctgccaggactcagcctgaaggaagctgctcctgaggcaggtatgaggtcagtgcctagggcacgtgggactgatggaggacatatcagagtggcagagctgtgggctctgctgttctctcctgcatcctgtagactcacttttctgagttccatgcactgccctgagggtagccatgcccttgctttgcccaactttttattgggccatccctgagtgggtggagacctgctgtcatgagctggccaggagaacctgctataaaaaaatcaaggttttgtttctttgaacttactctgttttgatgccaaattggagaccattttcttgtctccttcccccactcatcctggccttccctggagttcttcctagcccagagctctgacagtccagcagggtgggaaggagggagtttgggcaaactctcatccctgataccacattgagatcctgggagccctcttttcgtactgagtatggagttgtagagccatcctaggtgccatccccttttggtccaaacattgggcagcgctagatggcaggaagcagccttgaagacccgtctttcccccacagcagcaggggccccagcagtaacaaagggtacctccaggggtttgggtagcgctgccctctggcagtcatgcaccgctgtctgccatagccgctctagggtcttggcagaattctgagcttgaagtgcagctcccttactaccctttcccttcctttttcttccctaataggaggtacaatctgcttttgtttgtcgttaagtggtcactcccatttcctttatcttggccgacaacacagagaggagggggagctgggcagtagcttggggtgggggtgggcacctgtggttgtttttaatgggaaatacctctcagagatgttcatgcaggctccctagggccccatcccagtgccaggctggtttccatggagatagggcactgaggctcccgtgaggttggaatcgacttcaccatgggggtccttcagccagcatccagctccccacccccaggctggcagtagcactgctgagatgctgtatttccacccaattctgggtatatcagtgtgtcttgcagaatcttggatcattaaagataaacatatttttaa

SEQ ID NO: 307569 - DNA, 2943 bp, Homo sapiens
  misc_feature (5)..(5): n is a, c, g, or t
  misc_feature (8)..(8): n is a, c, g, or t
tgccngcngtactggacccgagcgcgacggtgcggctggcggacccgggctggcttgtggggaaacgaaactgagggaggaggcggcggctctggcagcggcggcgacagtgtcggcctgaccccccctccgctccccggcagctcgctctctcccctcagcttaacgatgaagaggagaactgacccagaatgcactgcccccatcaagaaacagaaaaaaagagttgcagagcttgccctgagcctcagctccacgtccgatgatgaacctccctcctctgtcagtcatggagcaaaagcatctactacaagccttagtgggtctgatagtgagaccgaggggaaacaacacagctctgactcttttgacgatgcattcaaagcagactctcttgtggaaggaacttcttctcgctattccatgtataatagcgtctcccagaagcttatggccaagatgggcttcagggaaggtgaaggattgggtaaatacagccagggtcggaaggacatcgttgaggcttccagtcagaaaggtcgaagaggcttgggtctgacactccggggctttgaccaggagctgaacgtggactggcgagatgagccagagcccagtgcttgtgagcaggtgtcatggtttccagaatgtaccactgaaattcctgacactcaggaaatgagcgattggatggtggtgggaaagagaaagatgattattgaagatgaaacagagttttgtggggaagagctgcttcacagtgtgttgcagtgtaagagcgtgtttgatgtcttggatggggaagagatgcggcgagctcggactcgggccaatccctatgagatgatccgaggagtcttctttctaaacagggcagcaatgaagatggctaacatggattttgtatttgatcgcatgttcacaaatccgcgggactcttatgggaagccactggtgaaggaccgggaagctgagcttctgtactttgctgatgtctgcgcaggcccaggtggcttctcagagtatgtgctgtggaggaagaagtggcatgcaaagggctttggaatgactttgaagggccctaatgacttcaagctggaggacttctactctgcttccagtgaactcttcgaaccctactatggtgagggtgggattgatggagatggagatatcacccgcccagagaacatctctgcttttcggaattttgtcctggataacacagatcgcaagggtgtccattttctgatggctgatgggggtttctcggtggaggggcaggagaacctgcaggagatcctcagcaagcagctgcttctgtgtcagttcctcatggcgctgtccattgtccggacaggaggccacttcatctgtaaaacctttgacctgttcacaccgtttagtgtggggcttgtctacctgctgtactgctgctttgaacgagtttgtctcttcaagcctattaccagccgtcctgccaactcagagaggtatgtggtgtgcaagggcctgaaggtgggcatagatgatgttcgggattacctcttcgcagtgaatattaaactcaatcagctgcggaacacggattccgacgtcaacttggtggtccccctggaggtgatcaagggagaccatgaatttactgactacatgatacggtccaatgagagccactgtagtctgcagatcaaagctctggcgaaaatccatgcctttgttcaagacacgacactgagtgagcctcgacaggcagagatacggaaggagtgcctccgactctgggggatcccagaccaggctcgtgtggctccttcttcctccgaccctaaatcgaagttctttgagctaatccagggcactgagattgacatcttcagctacaagcccacactgctcacctctaaaaccctggagaagatccgccctgtgtttgactaccgctgcatggtatctggcagtgagcagaagttcctcatcggcctggggaaatcccagatctacacatgggatggccgccagtcagaccgctggatcaagctagacctgaagacagagctgccccgggacactctgctatctgtggaaattgtgcatgagctgaaaggggaggggaaggcccagaggaagatcagtgccatccacatcctcgatgtccttgtgctgaatggcaccgacgttcgggagcagcactttaaccagcgaattcagcttgccgagaaatttgtgaaagccgtttccaagcctagtcggcccgacatgaatcccatcagggtgaaggaggtgtacagactggaagagatggagaagatttttgtcaggttggagatgaagatcatcaagggctccagtggcaccccaaagctcagctacacagggcgtgatgaccggcactttgtacccatgggcctctacatcgtcaggacagtgaatgagccctggactatgggattcagcaaaagcttcaagaagaagttcttctacaacaagaaaaccaaggactctacttttgacctcccttactaccctttcccttcctttttcttccctaataggaggtacaatctgcttttgtttgtcgttaagtggtcactcccatttcctttatcttggccgacaacacagagaggagggggagctgggcagtagcttggggtgggggtgggcacctgtggttgtttttaatgggaaatacctctcagagatgttcatgcaggctccctagggccccatcccagtgccaggctggtttccatggagatagggcactgaggctcccgtgaggttggaatcgacttcaccatgggggtccttcagccagcatccagctccccacccccaggctggcagtagcactgctgagatgctgtatttccacccaattctgggtatatcagtgtgtcttgcagaatcttggatcattaaagataaacatatttttaa

SEQ ID NO: 307570 - DNA, 2905 bp, Homo sapiens
  misc_feature (5)..(5): n is a, c, g, or t
  misc_feature (8)..(8): n is a, c, g, or t
tgccngcngtactggacccgagcgcgacggtgcggctggcggacccgggctggcttgtggggaaacgaaactgagggaggaggcggcggctctggcagcggcggcgacagtgtcggcctgaccccccctccgctccccggcagctcgctctctcccctcagcttaacgatgaagaggagaactgacccagaatgcactgcccccatcaagaaacagaaaaaaagagttgcagagcttgccctgagcctcagctccacgtccgatgatgaacctccctcctctgtcagtcatggagcaaaagcatctactacaagccttagtgggtctgatagtgagaccgaggggaaacaacacagctctgactcttttgacgatgcattcaaagcagactctcttgtggaaggaacttcttctcgctattccatgtataatagcgtctcccagaagcttatggccaagatgggcttcagggaaggtgaaggattgggtaaatacagccagggtcggaaggacatcgttgaggcttccagtcagaaaggtcgaagaggcttgggtctgacactccggggctttgaccaggagctgaacgtggactggcgagatgagccagagcccagtgcttgtgagcaggtgtcatggtttccagaatgtaccactgaaattcctgacactcaggaaatgagcgattggatggtggtgggaaagagaaagatgattattgaagatgaaacagagttttgtggggaagagctgcttcacagtgtgttgcagtgtaagagcgtgtttgatgtcttggatggggaagagatgcggcgagctcggactcgggccaatccctatgagatgatccgaggagtcttctttctaaacagggcagcaatgaagatggctaacatggattttgtatttgatcgcatgttcacaaatccgcgggactcttatgggaagccactggtgaaggaccgggaagctgagcttctgtactttgctgatgtctgcgcaggcccaggtggcttctcagagtatgtgctgtggaggaagaagtggcatgcaaagggctttggaatgactttgaagggccctaatgacttcaagctggaggacttctactctgcttccagtgaactcttcgaaccctactatggtgagggtgggattgatggagatggagatatcacccgcccagagaacatctctgcttttcggaattttgtcctggataacacagatcgcaagggtgtccattttctgatggctgatgggggtttctcggtggaggggcaggagaacctgcaggagatcctcagcaagcagctgcttctgtgtcagttcctcatggcgctgtccattgtccggacaggaggccacttcatctgtaaaacctttgacctgttcacaccgtttagtgtggggcttgtctacctgctgtactgctgctttgaacgagtttgtctcttcaagcctattaccagccgtcctgccaactcagagaggtatgtggtgtgcaagggcctgaaggtgggcatagatgatgttcgggattacctcttcgcagtgaatattaaactcaatcagctgcggaacacggattccgacgtcaacttggtggtccccctggaggtgatcaagggagaccatgaatttactgactacatgatacggtccaatgagagccactgtagtctgcagatcaaagctctggcgaaaatccatgcctttgttcaagacacgacactgagtgagcctcgacaggcagagatacggaaggagtgcctccgactctgggggatcccagaccaggctcgtgtggctccttcttcctccgaccctaaatcgaagttctttgagctaatccagggcactgagattgacatcttcagctacaagcccacactgctcacctctaaaaccctggagaagatccgccctgtgtttgactaccgctgcatggtatctggcagtgagcagaagttcctcatcggcctggggaaatcccagatctacacatgggatggccgccagtcagaccgctggatcaagctagacctgaagacagagctgccccgggacactctgctatctgtggaaattgtgcatgagctgaaaggggaggggaaggcccagaggaagatcagtgccatccacatcctcgatgtccttgtgctgaatggcaccgacgttcgggagcagcactttaaccagcgaattcagcttgccgagaaatttgtgaaagccgtttccaagcctagtcggcccgacatgaatcccatcagggtgaaggaggtgtacagactggaagagatggagaagatttttgtcaggttggagatgaagatcatcaagggctccagtggcaccccaaagctcagctacacagggcgtgatgaccggcactttgtacccatgggcctctacatcgtcaggacagtgaatgagccctggactatgggattcagcaaaagcttcaagaagaagttcttctacaacaagaaaaccaaggactctacttttgacctccctgcagactccattgccccatttcacctccccagccttgcctgcctgtcgaagatggattaactccgcactcccctgggatcgccacatgaccacttcaagtccccaagccgcccttcgctgcacagactgcatttttttctgccataattacaagcaatggcactgactggagggcatgacagtgtgtggtggggggatggacaggtggcacaatgtctgctgctcaaccccagcagtgcccgagccctggaagtaactcccactatttggcttggaaagtgcttcccactgtctccttcccactcgagctgggggccttctcctctattctgaattgtaatccagagctttcccttgaacatctcttcttccttgattcctgagt

SEQ ID NO: 307571 - DNA, 652 bp, Homo sapiens
  misc_feature (5)..(5): n is a, c, g, or t
  misc_feature (8)..(8): n is a, c, g, or t
tgccngcngtactggacccgagcgcgacggtgcggctggcggacccgggctggcttgtggggaaacgaaactgagggaggaggcggcggctctggcagcggcggcgacagtgtcggcctgaccccccctccgctccccggcagctcgctctctcccctcagcttaacgatgaagaggagaactgacccagaatgcactgcccccatcaagaaacagaaaaaaagagttgcagagcttgccctgagcctcagctccacgtccgatgatgaacctccctcctctgtcagtcatggagcaaaagcatctactacaagccttagtgggtctgatagtgagaccgaggggaaacaacacagctctgactcttttgacgatgcattcaaagcagactctcttgtggaaggaacttcttctcgctattccatgtataatagcgtctcccagaagcttatggccaagatgggcttcagggaaggtgaaggattgggtaaatacagccagggtcggaaggacatcgttgaggcttccagtcagaaaggtcgaagaggcttgggtctgacactccggggctttgaccaggagctgaacgtggactggcgagatgagccagaggtaagtgttaaagtgaggaggagatggaaaagccacttgt

SEQ ID NO: 307572 - DNA, 432 bp, Homo sapiens
ccttcagggattgatgtttcttggcagagaaccaagtcccttcttgctctacttacttggaaccctaatttcttcattcatccccgacaattgcagtcacacgtggtcattacttactgcttttttctccctgtagagaaagatgattattgaagatgaaacagagttttgtggggaagagctgcttcacagtgtgttgcagtgtaaggtaaggtcttgtggctagaaccagataatgaaaaccttgtgggaggtgatttgctggacttttccatttctcctttgagtgggttgtgggaagctaaagttaagatttttgctggagatcagatgcatagcttggttcatatctgcaaattgtctttttcctgggtgactgttctgccctgtgggtgttgtgctgtccctgtggtcagcagccaagaaaggatc

SEQ ID NO: 307573 - DNA, 524 bp, Homo sapiens
ggtttctcggtggaggggcaggagaacctgcaggagatcctcagcaagcagctgcttctgtgtcagttcctcatggcgctgtccattgtccggacaggtgacacttcctcagctgtctcctcaccccaggacccacttagaggccctattggacaagaacatgtacaaggggttggtggggaagttaaaaaaatctgcttatattagaggacaggtagctaaatgagtaatttagggaagaaagggctgtggaatcctcaaagtcccctccaaagatggttctcccccttaaattgtctctgagttttaacagacccaggtgctggtttccttgactttgtcatatttactcccaagactacttcacccatctcttggaatagacccattggctgcttttggtgttttctctctaatctaggaggccacttcatctgtaaaacctttgacctgttcacaccgtttagtgtggggcttgtctacctgctgtactgctgctttgaacgagtttgtctcttcaagcc

SEQ ID NO: 307574 - DNA, 458 bp, Homo sapiens
gccctggttatcagagataccagcacactccattttgccacagctgctcaggttgaggtatttatgttaaggttgagcaagagggtgaccttgcgggtagagggggtactccttggaagaaatatcctgtgcttgagtggtcccatttaagttgctcatctgagtgggtgcactgtagtttccatgctttggggtgacagggcagacacatacaataaagatgatacttgaagttctagtggaggtgactgagcacagctgaaggcacacttcaggaaaaccaaccgacatagtgaaattagaggtcagaatccacaggggcggggcatgaataaagacgtcggtggagaagggcagggcgggcttcctgggggacatgggtgctgcctcttagagcagtcttgccgcagattcagaaggttctcctactggagctgtgaaaatgccctgggggtagg

SEQ ID NO: 307575 - DNA, 8055 bp, Homo sapiens
aggcggcgcgcagcggccgaggtggcggcggctgcagctgcggcggcgcgctccgagcctgcgtctagggcgcccccgggtcagagctgtcgccgtggccgccgctgcaaagaacaatgtaccgcaagcagcgctcgctcctccgtttcttcccaccggcctaaagacgacggcgggggcggcccgcgcagcggccgcagctctggctcctcttcaggcccggctcgccgcagctcaccgccgccttccgccctccggctcctcgtcgcggaccccggctcgccgaccccgctcgccctcaaggcaccgcggccgccgggcctcgccgtccccgccacggggtcgtcgcgtctccccgtccccgcctcgggcccgtcgcggctccccgtcgccaccgcggggccgacgactcttcccgccgggcccggccggcttcagaggcagcagccgaggggagtcccgcgccgactatgcccgggacggccgcggagaccatccaggcgacagcggcagccggagacgctctcctggtctgtgttctgactctttggaaaagagcttaaggatcactgttggcaatgaccacttctgtgttagcacaccagaacggcgacggcttagtgatcggctggggtcaccagtggataatctggaagacatggacagggatgacctgactgatgattctgtcttcactcgaagctcccagtgctctcggggtcttgagcgatatatttcccaggaggaagggcctctcagtcccttcttgggacaacttgatgaggactaccgaacaaaagaaactttcctgcatcgatctgattatagtccccatatcagttgtcatgatgagctgttgcggggaacagaacggaatcgagaaaaactcaaaggctactccatacgatctgaagaaaggagccgggaggccaaaagaccccgttatgatgacacagtgaagataaacagcatgggaggggatcacccaagttttacatcaggaactcgcaactatcgacagcgtagaagaagcccaagtcctaggtttctcgaccctgagtttcgagaactggatcttgccagacgaaagcgagaggaagaggaggagcgaagtaggagcttgagtcaggagctggttggagttgatggtggtggtactggctgttccatccctggattgtcaggtgtcctaacagcatcggagccaggatattctttgcatcggcctgaggaagtatctgtgatgcccaagaaatccattttgaagaagcggattgaggtggacataatggagccctccatgcagcttgagagtttttccagcagtaccagctccagccaggatcaccctctctactctgggcacccatcccttccactaagtggtgctattgctgcttttgcctcagagattgaaaacaaggggactatggtagagactgccttgaaggaacctcagggcaacctctaccaatggggtccccttcctgggattcccaaagacaacagtcctctcagagaaaaatttggaagttttctatgccacaaggataatttggatttgaaggctgagggacctgagcgacacacagacttcctgctgccccatgagagagctagccaggatggcagtggtttttcccgcattctgagcatgttggctgattctaccagtacacaggaaaaaaggcgacgtagctttcccgacattgaagatgaggagaaatttctctatggggatgaagaagaggatttaaaggcagaatccgtaccaaagccccttgggagctctgagagtgaagttatgaggcagaaggcaagctccctgccgtcttcagctccagctgtaaagctagaatcactagaagagaccaatccagaatatgcgaagatccatgacttgctcaagacaatagggctggatattggagtagcagagattagtcaattggctgcacgcacccaggaacgacttcatggcaagaagccatcattacgctcctcagctgaccgccgttcctcagttgaccgatacttttcagctgaccactgttcctcagttgaccaccgcttctcagctgaccgctgttcctcagttgaccactgcttctcagctgatcgacgttcctcagatccccacagactagagagcagggaggcacatcatagcaatacccactctccagaggtgtcccatccacacccaccttctcctgtggatccttacctgctcacaaaaaacagccctccattcctaaagtctgaccatccagtgggtcatatttcaggaccagaggtggttggtagtgggtttcagtcatctgttgcagtcaggtgcatgttgccatcagccccatctgccccaattagacttccacacactgctgctttatctcagtttcacatgccaagggcctctcagtttgctgcagctcggatacctccgaactaccagggacctgccattccccctgcctcttttgatgcctataggcactacatggcatatgcagcctccagatggcccatgtatcccacctctcaaccgtcaaaccaccctgtacctgaaccacacaggataatgccaataaccaaacaagctactcgtagccgtcccaatcttcgtgtgatccccactgtgactcctgataagcctaagcagaaagagtctctgcgaggctcaattcctgcggcccaagtgcctgtccaggtgtccattccatcactcataagatataatccagagaagatctctgatgagaagaaccgtgcttcccagaagcaaaaggttattgaagagagggaaaaactaaagaatgaccgggaagcccgccagaagaagatgtactatcttaggaccgagttagagcggcttcataaacaacaaggagaaatgctgcgcaagaaacgaagggagaaggatggccacaaagatcctctcttggtggaggtgagtcggcttcaggataacattatgaaggacattgcagagctacggcaagaggcagaagaggcagaaaagaagcaatctgaactggacaaagtggctcagatcttgggaattaacatcttcgataaatcccagaagtctttaagtgacagtagagagcctacagagaagcctgggaaagcagaaaaatctaagagcccagaaaaagtgtcatcgttctcaaactcctcctccaacaaggaatcaaaagtaaacaatgagaagtttcgtactaagagccccaagcctgccgaaagcccccagtcagccactaagcagttggatcagcccactgctgcttatgagtattatgatgctggcaatcactggtgcaaagactgcaacaccatctgtgggaccatgtttgatttcttcactcatatgcacaataagaagcacacacagacactggatccctacaacagaccttgggcttcaaagacccagagtgaggccaagcaagatgccataaagcgcactgacaagataactgttcctgcaaaaggctctgagtttctggttcccatcagtggattttattgccagctctgtgaggaatttttgggggatccaatttctggggagcaacatgtgaagggtcaccaacacaatgagaaatacaagaaatatgtggatgaaaacccattatatgaggagcggcggaatctggaccgccaagctggcttggctgtggtcctagagacagaacggcgacggcagagtgagctaaagcgcaaacttagtgagaaaccaaaggaggagaagaaagaaaaaaaggcaaaggctgtgaaagaagtaaaggaggatgacaaggtctctgagaaattagaagaccaactctctgagggtaggaactcccctgaaaaagctgaaaataaaaggaacactggcatcaaactccagttaaaagaagaggtaaagaaggaatcaccaacatcatcttcttttgggaaattcagctggaagaagccagaaaaagaagaggagaaaagttcattggtgaccccaagtatctctaaagaagagattctagaaagtagtaaggacaaagaggatggcaaaactgaagctgggaaggcaaagcctatcaaaatcaagctctctgggaaaactgttgttgcacataccagcccttggatgcctgttgtgacaacttccacacagactaagatcggacccaacctgcctattccatccacagtactccgcaagtcatgttcagccacaatgagcaagccagctcctcttaacacctttctgtctattaagtcctctggaaccactgctaaacctctgccagtggttaaagagtcttcagctgatctcctcttacctccagacatcatctccaaagcatttggaggggaagaggtgattctaaaagggtctccagaggaaaaagtggtgttggctgaaaagagtgagccatctcatttacctgaacaaatactaccacctcctccaccacccccacctccaccacctccaccaccccccgttatacctcatccagctgccccgtctgctgctcaagcaaatgctatcttggctccagtaaaatcaaacccagttgtatctcaaactctcagccctggcttcgtgggtcctaacattttgaacccagtgttgcctgtagccatcatggcctcagcacagccagctgccattccttctgatgagacagctcctggggtgagtgagagtgaccgagaccagaccctgttctctgtgttagtacgtcctccaccacccctctcaagtgtgttcagtgaacaagccaaaaaattagagaagcgaaattcatgcttagccacagccaatgctaaggacctgtatgacatattctatagtagtggtggaaagggggcccctgagactaagggggcccctgagactaagctaagtggtggtccattggccaatggggaaaatagcaacctctctagaaccaaaagttcagacacctcttctacttctcctttgaacagcagtgcatcccaagaggagttgcatcaagatgagggtttggtcgctgctcctatagttagcaactctgaaaagcccattgcaaaaactctggtggccctagggaaatggtcagttgtagaacatgtaggcccaaaaagcacaggcagcacctatggcttcctacagcctctgacaaggttgtgccaaagcaggccttatgaaacaattaccccaaagacagacactttggccatatggacctctagttccttccagagtgacactagtagggatatatctccagagaagagtgagcttgacctgggagagccaggaccacctggtgtagaaccacctcctcaactgttagatatacagtgcaaagaatctcagaagttggtagaaatccacctcagagaatctgttaaccaggataaggaaagccaagagctccgtaaatctgaggattgtagagaaagtgagatagagacaaacactgaactaaaagaaagggtaaaggagctgtctgaggggatagttgatgagggagcaagtaccagcattggaccccacagcatagatgattctaatttgaaccatggaaacagatacatgtgggagggagaagtaaaacagcccaacttgctaatgattgacaaagaggctgaacagtccaataaattgatgacaggaagtgaaactccaagtaaagtagtgatcaaattgagtccacaggcttgctctttcacaaaggcaaaattagactcatttttatcagaagctaggtctttactcaacccacaagatacacctgtgaaaatttctgccccagagttgctgcttcattccccagccagatcagctatgtgtttaacaggtagtccacaagagcaaggagtttcagttgttagtgaggaggggctagagaattcagctccagaatcagcttctagaacttctaggtacagaagtctcaaactcaagagagaaagatcaaaagactttcaagttaaaaagatctatgagttggctgtttgggatgaaaacaagaagaggccagagacctgggagagcccagagaaaccaaaaacagaagcactggagctacaagatgtccatccagagttaacagtgacaatagaaagcaaggccctagaagactttgaagctacagacttaaaggtagaggagcttactgccctggggaatctgggggatatgcctgttgatttctgcactactcgggtaagcccagcacatagatccccaactgtcttgtgtcagaaagtgtgtgaagaaaattctgtatcacctatagggtgtaattcctccgatcccgctgacttcgaaccaatcccatctttttctgggtttccgttagattctcccaaaaccttggtgcttgactttgagacagagggtgaacgaaactcacctaatcccaggagtgttaggatcccttctcctaacattttgaaaactggacttacagaaaatgttgaccgtggcttggggggcctagagggaacacaccaggcccttgacctgttagcaggaggaatgatgcctgaggaagtaaaagaatcttcccaattagacaaacaagagtcactcggattggaattaaaaacaattaattctgcaggccttgggccatctccttgccttccagaccttgttgactttgtcacacggacctctggagttcaaaaagataaactgtgttctccactctctgagccaggtgacccttctaaatgtagttccctggagttggggccattacagctagaaatatcgaatgcatccaccacagaggtggcaattctgcaagtagatgatgacagtggcgaccctctgaatttggttaaagctccagtgtcaaggtcccctccaagggagcaggtaattgaagacaatatggtccctcagggaatgcctgaacaggaaactacagttggtgccatccaggaccacacagaatccagtgttcacaactaagaataaatacctagagctacttgtgagtgaatcattggcttctagaaatcagatgcccagatgatccaagactagtttgttatctcatctggaacctacaccaagagatgcagtcagcatcttaaagtaaatgttcatggaagctaaaaaatttacctcctttccttttccctttccccttaaaacaccagacaaatcgataacaacttatatataatatatatatatctgtaaaaatgtattttgttaatttttttggccaatttattttctcccactttgtcattaaaatcacatgtctaactggctcaccacatagtgtgctttgattgtattttggctttgactctgccatttctgaaatgtgggggaggatggaggcagctgacctctccagttgctgtgttgtattcctacccaatttcctgggcagttgatgcatctctgggaaaaacaccagaaagcttgctgaaatggaaaacttggaagaattgttcatctcttaggcttccatttggatgggcctgccttaacattgtttgaaatgcagcgtgagtagctcttttgtttactgtttacaccccttattggcatgtcaactcctgtacttcccttactctgttgcctttcttgagatgcattgtcctgctaacccacaaacctgtttggaaataaacatggaagaatatctggcaggcttacttttagaagacgacaaatcggtaaggcttattcatggttcattgccaggagcagatatgcttttgagatcacttttatttttgaaatggcctttgttcattgtattgtgatccaataacactttgtattaaattgtttagcagccatttgtgttgtgaaggggtagaagatctctgaaacttgtcttgagattgaactcattccctgttccacaaacccatatgtatcctttcctctacctcctcctttcccaattaatttcaaccatagtacgatgtttggggttgtatattttgttaaaaagattaaagaatttatgagttggcttggacaagtttaactttatttttaatgtgttaattacttggaataaatgcattaatctcaaaaaaaaa

SEQ ID NO: 307576 - DNA, 638 bp, Homo sapiens
tactatttctaacagaagacaagtctagattgccttgaattccttgtaagtacagatttttcccctctaggaatcaaaagtaaacaatgagaagtttcgtactaagagccccaagcctgccgaaagcccccagtcagccactaagcagttggatcagcccactgctgcttatgagtattatgatgctggcaatcactggtgcaaagactgcaacaccatctgtgggaccatgtttgatttcttcactcatatgcacaataagaagcacacacaggggcaattccaaaagtcttcagatttccaaaaggaaggactgcagcagacatttctgcccccagaaaggcagggatagaaaccacagaggccacggaaatgatgggtgcccttgtggccagtaggcaatcacctgaaggatctgacttccagaaggtgggtatgactgatgggggtggggataagttgtagagaagatcctgtcattttagctgccaggaaatggtgagttgggtgagtgaatgtgtatattgttgtacctgtagaggatgaacaagattagaatgtacatagagggtatgtattttagacttgccactcctcaccttatttagcattgaataaattattcctgaagtcccata

SEQ ID NO: 307577 - DNA, 593 bp, Homo sapiens
aacgaacagggtgaaaacagaggcagagttacataacgggagaacaaaaggtagaggatgtggagaaagcagagataaaatcagccatattaagatattattttatttcgtctctctgacactctgtccctgctaagtttccacccagccttcctgtaaccaccttcctaaggatgactatggtcacattgttacagactctcacccacttatcttcctttcttttcaggggcaattccaaaagtcttcagatttccaaaaggaaggactgcagcagacatttctgcccccagaaaggcagggatagaaaccacagaggccacggaaatgatgggtgcccttgtggccagtaggcaatcacctgaaggatctgacttccagaaggtgggtatgactgatgggggtggggataagttgtagagaagatcctgtcattttagctgccaggaaatggtgagttgggtgagtgaatgtgtatattgttgtacctgtagaggatgaacaagattagaatgtacatagagggtatgtattttagacttgccactcctcaccttatttagcattgaataaattattcctgaagtcccata

SEQ ID NO: 307578 - DNA, 8519 bp, Homo sapiens
aggcggcgcgcagcggccgaggtggcggcggctgcagctgcggcggcgcgctccgagcctgcgtctagggcgcccccgggtcagagctgtcgccgtggccgccgctgcaaagaacaatgtaccgcaagcagcgctcgctcctccgtttcttcccaccggcctaaagacgacggcgggggcggcccgcgcagcggccgcagctctggctcctcttcaggcccggctcgccgcagctcaccgccgccttccgccctccggctcctcgtcgcggaccccggctcgccgaccccgctcgccctcaaggcaccgcggccgccgggcctcgccgtccccgccacggggtcgtcgcgtctccccgtccccgcctcgggcccgtcgcggctccccgtcgccaccgcggggccgacgactcttcccgccgggcccggccggcttcagaggcagcagccgaggggagtcccgcgccgactatgcccgggacggccgcggagaccatccaggcgacagcggcagccggagacgctctcctggtctgtgttctgactctttggaaaagagcttaaggatcactgttggcaatgaccacttctgtgttagcacaccagaacggcgacggcttagtgatcggctggggtcaccagtggataatctggaagacatggacagggatgacctgactgatgattctgtcttcactcgaagctcccagtgctctcggggtcttgagcgatatatttcccaggaggaagggcctctcagtcccttcttgggacaacttgatgaggactaccgaacaaaagaaactttcctgcatcgatctgattatagtccccatatcagttgtcatgatgagctgttgcggggaacagaacggaatcgagaaaaactcaaaggctactccatacgatctgaagaaaggagccgggaggccaaaagaccccgttatgatgacacagtgaagataaacagcatgggaggggatcacccaagttttacatcaggaactcgcaactatcgacagcgtagaagaagcccaagtcctaggtttctcgaccctgagtttcgagaactggatcttgccagacgaaagcgagaggaagaggaggagcgaagtaggagcttgagtcaggagctggttggagttgatggtggtggtactggctgttccatccctggattgtcaggtgtcctaacagcatcggagccaggatattctttgcatcggcctgaggaagtatctgtgatgcccaagaaatccattttgaagaagcggattgaggtggacataatggagccctccatgcagcttgagagtttttccagcagtaccagctccagccaggatcaccctctctactctgggcacccatcccttccactaagtggtgctattgctgcttttgcctcagagattgaaaacaaggggactatggtagagactgccttgaaggaacctcagggcaacctctaccaatggggtccccttcctgggattcccaaagacaacagtcctctcagagaaaaatttggaagttttctatgccacaaggataatttggatttgaaggctgagggacctgagcgacacacagacttcctgctgccccatgagagagctagccaggatggcagtggtttttcccgcattctgagcatgttggctgattctaccagtacacaggaaaaaaggcgacgtagctttcccgacattgaagatgaggagaaatttctctatggggatgaagaagaggatttaaaggcagaatccgtaccaaagccccttgggagctctgagagtgaagttatgaggcagaaggcaagctccctgccgtcttcagctccagctgtaaagctagaatcactagaagagaccaatccagaatatgcgaagatccatgacttgctcaagacaatagggctggatattggagtagcagagattagtcaattggctgcacgcacccaggaacgacttcatggcaagaagccatcattacgctcctcagctgaccgccgttcctcagttgaccgatacttttcagctgaccactgttcctcagttgaccaccgcttctcagctgaccgctgttcctcagttgaccactgcttctcagctgatcgacgttcctcagatccccacagactagagagcagggaggcacatcatagcaatacccactctccagaggtgtcccatccacacccaccttctcctgtggatccttacctgctcacaaaaaacagccctccattcctaaagtctgaccatccagtgggtcatatttcaggaccagaggtggttggtagtgggtttcagtcatctgttgcagtcaggtgcatgttgccatcagccccatctgccccaattagacttccacacactgctgctttatctcagtttcacatgccaagggcctctcagtttgctgcagctcggatacctccgaactaccagggacctgccattccccctgcctcttttgatgcctataggcactacatggcatatgcagcctccagatggcccatgtatcccacctctcaaccgtcaaaccaccctgtacctgaaccacacaggataatgccaataaccaaacaagctactcgtagccgtcccaatcttcgtgtgatccccactgtgactcctgataagcctaagcagaaagagtctctgcgaggctcaattcctgcggcccaagtgcctgtccaggtgtccattccatcactcataagatataatccagagaagatctctgatgagaagaaccgtgcttcccagaagcaaaaggttattgaagagagggaaaaactaaagaatgaccgggaagcccgccagaagaagatgtactatcttaggaccgagttagagcggcttcataaacaacaaggagaaatgctgcgcaagaaacgaagggagaaggatggccacaaagatcctctcttggtggaggtgagtcggcttcaggataacattatgaaggacattgcagagctacggcaagaggcagaagaggcagaaaagaagcaatctgaactggacaaagtggctcagatcttgggaattaacatcttcgataaatcccagaagtctttaagtgacagtagagagcctacagagaagcctgggaaagcagaaaaatctaagagcccagaaaaagtgtcatcgttctcaaactcctcctccaacaaggaatcaaaagtaaacaatgagaagtttcgtactaagagccccaagcctgccgaaagcccccagtcagccactaagcagttggatcagcccactgctgcttatgagtattatgatgctggcaatcactggtgcaaagactgcaacaccatctgtgggaccatgtttgatttcttcactcatatgcacaataagaagcacacacaggttggtatcctactctctgttattttcactcccaccctcactctcttcaaacttctatacccctatctgcattgcaaagctggaaaaggaaacattctcatatgggcaggagccccagtctgaagagccaagagacaccaacaaaggagacaccatccccagggctcagtccaggggacttggctgtaactaaacaccatgacaagtgtaagtgaggtttctgcctcttttgattccttgagtacctgatttttttgtttcattttacctttttctggtacttgctctaacatgtgtttaccttttccacaggtgatttccattaaaacagttggcagagggggtgggggtgggtagctgggggcttctggtcccctggtcttattatgggggaaaaaaaagagaaaagtgggtcattgagcttttagtgctgttgtgtgagcacctctgcctcttacaaatagacactggatccctacaacagaccttgggcttcaaagacccagagtgaggccaagcaagatgccataaagcgcactgacaagataactgttcctgcaaaaggctctgagtttctggttcccatcagtggattttattgccagctctgtgaggaatttttgggggatccaatttctggggagcaacatgtgaagggtcaccaacacaatgagaaatacaagaaatatgtggatgaaaacccattatatgaggagcggcggaatctggaccgccaagctggcttggctgtggtcctagagacagaacggcgacggcagagtgagctaaagcgcaaacttagtgagaaaccaaaggaggagaagaaagaaaaaaaggcaaaggctgtgaaagaagtaaaggaggatgacaaggtctctgagaaattagaagaccaactctctgagggtaggaactcccctgaaaaagctgaaaataaaaggaacactggcatcaaactccagttaaaagaagaggtaaagaaggaatcaccaacatcatcttcttttgggaaattcagctggaagaagccagaaaaagaagaggagaaaagttcattggtgaccccaagtatctctaaagaagagattctagaaagtagtaaggacaaagaggatggcaaaactgaagctgggaaggcaaagcctatcaaaatcaagctctctgggaaaactgttgttgcacataccagcccttggatgcctgttgtgacaacttccacacagactaagatcggacccaacctgcctattccatccacagtactccgcaagtcatgttcagccacaatgagcaagccagctcctcttaacacctttctgtctattaagtcctctggaaccactgctaaacctctgccagtggttaaagagtcttcagctgatctcctcttacctccagacatcatctccaaagcatttggaggggaagaggtgattctaaaagggtctccagaggaaaaagtggtgttggctgaaaagagtgagccatctcatttacctgaacaaatactaccacctcctccaccacccccacctccaccacctccaccaccccccgttatacctcatccagctgccccgtctgctgctcaagcaaatgctatcttggctccagtaaaatcaaacccagttgtatctcaaactctcagccctggcttcgtgggtcctaacattttgaacccagtgttgcctgtagccatcatggcctcagcacagccagctgccattccttctgatgagacagctcctggggtgagtgagagtgaccgagaccagaccctgttctctgtgttagtacgtcctccaccacccctctcaagtgtgttcagtgaacaagccaaaaaattagagaagcgaaattcatgcttagccacagccaatgctaaggacctgtatgacatattctatagtagtggtggaaagggggcccctgagactaagggggcccctgagactaagctaagtggtggtccattggccaatggggaaaatagcaacctctctagaaccaaaagttcagacacctcttctacttctcctttgaacagcagtgcatcccaagaggagttgcatcaagatgagggtttggtcgctgctcctatagttagcaactctgaaaagcccattgcaaaaactctggtggccctagggaaatggtcagttgtagaacatgtaggcccaaaaagcacaggcagcacctatggcttcctacagcctctgacaaggttgtgccaaagcaggccttatgaaacaattaccccaaagacagacactttggccatatggacctctagttccttccagagtgacactagtagggatatatctccagagaagagtgagcttgacctgggagagccaggaccacctggtgtagaaccacctcctcaactgttagatatacagtgcaaagaatctcagaagttggtagaaatccacctcagagaatctgttaaccaggataaggaaagccaagagctccgtaaatctgaggattgtagagaaagtgagatagagacaaacactgaactaaaagaaagggtaaaggagctgtctgaggggatagttgatgagggagcaagtaccagcattggaccccacagcatagatgattctaatttgaaccatggaaacagatacatgtgggagggagaagtaaaacagcccaacttgctaatgattgacaaagaggctgaacagtccaataaattgatgacaggaagtgaaactccaagtaaagtagtgatcaaattgagtccacaggcttgctctttcacaaaggcaaaattagactcatttttatcagaagctaggtctttactcaacccacaagatacacctgtgaaaatttctgccccagagttgctgcttcattccccagccagatcagctatgtgtttaacaggtagtccacaagagcaaggagtttcagttgttagtgaggaggggctagagaattcagctccagaatcagcttctagaacttctaggtacagaagtctcaaactcaagagagaaagatcaaaagactttcaagttaaaaagatctatgagttggctgtttgggatgaaaacaagaagaggccagagacctgggagagcccagagaaaccaaaaacagaagcactggagctacaagatgtccatccagagttaacagtgacaatagaaagcaaggccctagaagactttgaagctacagacttaaaggtagaggagcttactgccctggggaatctgggggatatgcctgttgatttctgcactactcgggtaagcccagcacatagatccccaactgtcttgtgtcagaaagtgtgtgaagaaaattctgtatcacctatagggtgtaattcctccgatcccgctgacttcgaaccaatcccatctttttctgggtttccgttagattctcccaaaaccttggtgcttgactttgagacagagggtgaacgaaactcacctaatcccaggagtgttaggatcccttctcctaacattttgaaaactggacttacagaaaatgttgaccgtggcttggggggcctagagggaacacaccaggcccttgacctgttagcaggaggaatgatgcctgaggaagtaaaagaatcttcccaattagacaaacaagagtcactcggattggaattaaaaacaattaattctgcaggccttgggccatctccttgccttccagaccttgttgactttgtcacacggacctctggagttcaaaaagataaactgtgttctccactctctgagccaggtgacccttctaaatgtagttccctggagttggggccattacagctagaaatatcgaatgcatccaccacagaggtggcaattctgcaagtagatgatgacagtggcgaccctctgaatttggttaaagctccagtgtcaaggtcccctccaagggagcaggtaattgaagacaatatggtccctcagggaatgcctgaacaggaaactacagttggtgccatccaggaccacacagaatccagtgttcacaactaagaataaatacctagagctacttgtgagtgaatcattggcttctagaaatcagatgcccagatgatccaagactagtttgttatctcatctggaacctacaccaagagatgcagtcagcatcttaaagtaaatgttcatggaagctaaaaaatttacctcctttccttttccctttccccttaaaacaccagacaaatcgataacaacttatatataatatatatatatctgtaaaaatgtattttgttaatttttttggccaatttattttctcccactttgtcattaaaatcacatgtctaactggctcaccacatagtgtgctttgattgtattttggctttgactctgccatttctgaaatgtgggggaggatggaggcagctgacctctccagttgctgtgttgtattcctacccaatttcctgggcagttgatgcatctctgggaaaaacaccagaaagcttgctgaaatggaaaacttggaagaattgttcatctcttaggcttccatttggatgggcctgccttaacattgtttgaaatgcagcgtgagtagctcttttgtttactgtttacaccccttattggcatgtcaactcctgtacttcccttactctgttgcctttcttgagatgcattgtcctgctaacccacaaacctgtttggaaataaacatggaagaatatctggcaggcttacttttagaagacgacaaatcggtaaggcttattcatggttcattgccaggagcagatatgcttttgagatcacttttatttttgaaatggcctttgttcattgtattgtgatccaataacactttgtattaaattgtttagcagccatttgtgttgtgaaggggtagaagatctctgaaacttgtcttgagattgaactcattccctgttccacaaacccatatgtatcctttcctctacctcctcctttcccaattaatttcaaccatagtacgatgtttggggttgtatattttgttaaaaagattaaagaatttatgagttggcttggacaagtttaactttatttttaatgtgttaattacttggaataaatgcattaatctcaaaaaaaaa

SEQ ID NO: 307579 - DNA, 3758 bp, Homo sapiens
aggcggcgcgcagcggccgaggtggcggcggctgcagctgcggcggcgcgctccgagcctgcgtctagggcgcccccgggtcagagctgtcgccgtggccgccgctgcaaagaacaatgtaccgcaagcagcgctcgctcctccgtttcttcccaccggcctaaagacgacggcgggggcggcccgcgcagcggccgcagctctggctcctcttcaggcccggctcgccgcagctcaccgccgccttccgccctccggctcctcgtcgcggaccccggctcgccgaccccgctcgccctcaaggcaccgcggccgccgggcctcgccgtccccgccacggggtcgtcgcgtctccccgtccccgcctcgggcccgtcgcggctccccgtcgccaccgcggggccgacgactcttcccgccgggcccggccggcttcagaggcagcagccgaggggagtcccgcgccgactatgcccgggacggccgcggagaccatccaggcgacagcggcagccggagacgctctcctggtctgtgttctgactctttggaaaagagcttaaggatcactgttggcaatgaccacttctgtgttagcacaccagaacggcgacggcttagtgatcggctggggtcaccagtggataatctggaagacatggacagggatgacctgactgatgattctgtcttcactcgaagctcccagtgctctcggggtcttgagcgatatatttcccaggaggaagggcctctcagtcccttcttgggacaacttgatgaggactaccgaacaaaagaaactttcctgcatcgatctgattatagtccccatatcagttgtcatgatgagctgttgcggggaacagaacggaatcgagaaaaactcaaaggctactccatacgatctgaagaaaggagccgggaggccaaaagaccccgttatgatgacacagtgaagataaacagcatgggaggggatcacccaagttttacatcaggaactcgcaactatcgacagcgtagaagaagcccaagtcctaggtttctcgaccctgagtttcgagaactggatcttgccagacgaaagcgagaggaagaggaggagcgaagtaggagcttgagtcaggagctggttggagttgatggtggtggtactggctgttccatccctggattgtcaggtgtcctaacagcatcggagccaggatattctttgcatcggcctgaggaagtatctgtgatgcccaagaaatccattttgaagaagcggattgaggtggacataatggagccctccatgcagcttgagagtttttccagcagtaccagctccagccaggatcaccctctctactctgggcacccatcccttccactaagtggtgctattgctgcttttgcctcagagattgaaaacaaggggactatggtagagactgccttgaaggaacctcagggcaacctctaccaatggggtccccttcctgggattcccaaagacaacagtcctctcagagaaaaatttggaagttttctatgccacaaggataatttggatttgaaggctgagggacctgagcgacacacagacttcctgctgccccatgagagagctagccaggatggcagtggtttttcccgcattctgagcatgttggctgattctaccagtacacaggaaaaaaggcgacgtagctttcccgacattgaagatgaggagaaatttctctatggggatgaagaagaggatttaaaggcagaatccgtaccaaagccccttgggagctctgagagtgaagttatgaggcagaaggcaagctccctgccgtcttcagctccagctgtaaagctagaatcactagaagagaccaatccagaatatgcgaagatccatgacttgctcaagacaatagggctggatattggagtagcagagattagtcaattggctgcacgcacccaggaacgacttcatggcaagaagccatcattacgctcctcagctgaccgccgttcctcagttgaccgatacttttcagctgaccactgttcctcagttgaccaccgcttctcagctgaccgctgttcctcagttgaccactgcttctcagctgatcgacgttcctcagatccccacagactagagagcagggaggcacatcatagcaatacccactctccagaggtgtcccatccacacccaccttctcctgtggatccttacctgctcacaaaaaacagccctccattcctaaagtctgaccatccagtgggtcatatttcaggaccagaggtggttggtagtgggtttcagtcatctgttgcagtcaggtgcatgttgccatcagccccatctgccccaattagacttccacacactgctgctttatctcagtttcacatgccaagggcctctcagtttgctgcagctcggatacctccgaactaccagggacctgccattccccctgcctcttttgatgcctataggcactacatggcatatgcagcctccagatggcccatgtatcccacctctcaaccgtcaaaccaccctgtacctgaaccacacaggataatgccaataaccaaacaagctactcgtagccgtcccaatcttcgtgtgatccccactgtgactcctgataagcctaagcagaaagagtctctgcgaggctcaattcctgcggcccaagtgcctgtccaggtgtccattccatcactcataagatataatccagagaagatctctgatgagaagaaccgtgcttcccagaagcaaaaggttattgaagagagggaaaaactaaagaatgaccgggaagcccgccagaagaagatgtactatcttaggaccgagttagagcggcttcataaacaacaaggagaaatgctgcgcaagaaacgaagggagaaggatggccacaaagatcctctcttggtggaggtgagtcggcttcaggataacattatgaaggacattgcagagctacggcaagaggcagaagaggcagaaaagaagcaatctgaactggacaaagtggctcagatcttgggaattaacatcttcgataaatcccagaagtctttaagtgacagtagagagcctacagagaagcctgggaaagcagaaaaatctaagagcccagaaaaagtgtcatcgttctcaaactcctcctccaacaaggaatcaaaagtaaacaatgagaagtttcgtactaagagccccaagcctgccgaaagcccccagtcagccactaagcagttggatcagcccactgctgcttatgagtattatgatgctggcaatcactggtgcaaagactgcaacaccatctgtgggaccatgtttgatttcttcactcatatgcacaataagaagcacacacaggggcaattccaaaagtcttcagatttccaaaaggaaggactgcagcagacatttctgcccccagaaaggcagggatagaaaccacagaggccacggaaatgatgggtgcccttgtggccagtaggcaatcacctgaaggatctgacttccagaaggtgggtatgactgatgggggtggggataagttgtagagaagatcctgtcattttagctgccaggaaatggtgagttgggtgagtgaatgtgtatattgttgtacctgtagaggatgaacaagattagaatgtacatagagggtatgtattttagacttgccactcctcaccttatttagcattgaataaattattcctgaagtcccata

SEQ ID NO: 307580 - DNA, 2912 bp, Homo sapiens
aggcggcgcgcagcggccgaggtggcggcggctgcagctgcggcggcgcgctccgagcctgcgtctagggcgcccccgggtcagagctgtcgccgtggccgccgctgcaaagaacaatgtaccgcaagcagcgctcgctcctccgtttcttcccaccggcctaaagacgacggcgggggcggcccgcgcagcggccgcagctctggctcctcttcaggcccggctcgccgcagctcaccgccgccttccgccctccggctcctcgtcgcggaccccggctcgccgaccccgctcgccctcaaggcaccgcggccgccgggcctcgccgtccccgccacggggtcgtcgcgtctccccgtccccgcctcgggcccgtcgcggctccccgtcgccaccgcggggccgacgactcttcccgccgggcccggccggcttcagaggcagcagccgaggggagtcccgcgccgactatgcccgggacggccgcggagaccatccaggcgacagcggcagccggagacgctctcctggtctgtgttctgactctttggaaaagagcttaaggatcactgttggcaatgaccacttctgtgttagcacaccagaacggcgacggcttagtgatcggctggggtcaccagtggataatctggaagacatggacagggatgacctgactgatgattctgtcttcactcgaagctcccagtgctctcggggtcttgagcgatatatttcccaggaggaagggcctctcagtcccttcttgggacaacttgatgaggactaccgaacaaaagaaactttcctgcatcgatctgattatagtccccatatcagttgtcatgatgagctgttgcggggaacagaacggaatcgagaaaaactcaaaggctactccatacgatctgaagaaaggagccgggaggccaaaagaccccgttatgatgacacagtgaagataaacagcatgggaggggatcacccaagttttacatcaggaactcgcaactatcgacagcgtagaagaagcccaagtcctaggtttctcgaccctgagtttcgagaactggatcttgccagacgaaagcgagaggaagaggaggagcgaagtaggagcttgagtcaggagctggttggagttgatggtggtggtactggctgttccatccctggattgtcaggtgtcctaacagcatcggagccaggatattctttgcatcggcctgaggaagtatctgtgatgcccaagaaatccattttgaagaagcggattgaggtggacataatggagccctccatgcagcttgagagtttttccagcagtaccagctccagccaggatcaccctctctactctgggcacccatcccttccactaagtggtgctattgctgcttttgcctcagagattgaaaacaaggggactatggtagagactgccttgaaggaacctcagggcaacctctaccaatggggtccccttcctgggattcccaaagacaacagtcctctcagagaaaaatttggaagttttctatgccacaaggataatttggatttgaaggctgagggacctgagcgacacacagacttcctgctgccccatgagagagctagccaggatggcagtggtttttcccgcattctgagcatgttggctgattctaccagtacacaggaaaaaaggcgacgtagctttcccgacattgaagatgaggagaaatttctctatggggatgaagaagaggatttaaaggcagaatccgtaccaaagccccttgggagctctgagagtgaagttatgaggcagaaggcaagctccctgccgtcttcagctccagctgtaaagctagaatcactagaagagaccaatccagaatatgcgaagatccatgacttgctcaagacaatagggctggatattggagtagcagagattagtcaattggctgcacgcacccaggaacgacttcatggcaagaagccatcattacgctcctcagctgaccgccgttcctcagttgaccgatacttttcagctgaccactgttcctcagttgaccaccgcttctcagctgaccgctgttcctcagttgaccactgcttctcagctgatcgacgttcctcagatccccacagactagagagcagggaggcacatcatagcaatacccactctccagaggtgtcccatccacacccaccttctcctgtggatccttacctgctcacaaaaaacagccctccattcctaaagtctgaccatccagtgggtcatatttcaggaccagaggtggttggtagtgggtttcagtcatctgttgcagtcaggtgcatgttgccatcagccccatctgccccaattagacttccacacactgctgctttatctcagtttcacatgccaagggcctctcagtttgctgcagctcggatacctccgaactaccagggacctgccattccccctgcctcttttgatgcctataggcactacatggcatatgcagcctccagatggcccatgtatcccacctctcaaccgtcaaaccaccctgtacctgaaccacacaggataatgccaataaccaaacaagctactcgtagccgtcccaatcttcgtgtgatccccactgtgactcctgataagcctaagcagaaagagtctctgcgaggctcaattcctgcggcccaagtgcctgtccaggtgtccattccatcactcataagatataatccagagaagatctctgatgagaagaaccgtgcttcccagaagcaaaaggttattgaagagagggaaaaactaaagaatgaccacaaatccaccagaaggaagaaactccaaacacgtctgaacatcagaaagaacaaactccggacataccatctttaagaactgtagcact

SEQ ID NO: 307581 - DNA, 1540 bp, Homo sapiens
aggcggcgcgcagcggccgaggtggcggcggctgcagctgcggcggcgcgctccgagcctgcgtctagggcgcccccgggtcagagctgtcgccgtggccgccgctgcaaagaacaatgtaccgcaagcagcgctcgctcctccgtttcttcccaccggcctaaagacgacggcgggggcggcccgcgcagcggccgcagctctggctcctcttcaggcccggctcgccgcagctcaccgccgccttccgccctccggctcctcgtcgcggaccccggctcgccgaccccgctcgccctcaaggcaccgcggccgccgggcctcgccgtccccgccacggggtcgtcgcgtctccccgtccccgcctcgggcccgtcgcggctccccgtcgccaccgcggggccgacgactcttcccgccgggcccggccggcttcagaggcagcagccgaggggagtcccgcgccgactatgcccgggacggccgcggagaccatccaggcgacagcggcagccggagacgctctcctggtctgtgttctgactctttggaaaagagcttaaggatcactgttggcaatgaccacttctgtgttagcacaccagaacggcgacggcttagtgatcggctggggtcaccagtggataatctggaagacatggacagggatgacctgactgatgattctgtcttcactcgaagctcccagtgctctcggggtcttgagcgatatatttcccaggaggaagggcctctcagtcccttcttgggacaacttgatgaggactaccgaacaaaagaaactttcctgcatcgatctgattatagtccccatatcagttgtcatgatgagctgttgcggggaacagaacggaatcgagaaaaactcaaaggctactccatacgatctgaagaaaggagccgggaggccaaaagaccccgttatgatgacacagtgaagataaacagcatgggaggggatcacccaagttttacatcaggaactcgcaactatcgacagcgtagaagaagcccaagtcctaggtttctcgaccctgagtttcgagaactggatcttgccagacgaaagcgagaggaagaggaggagcgaagtaggagcttgagtcaggagctggttggagttgatggtggtggtactggctgttccatccctggattgtcaggtgtcctaacagcatcggagccaggatattctttgcatcggcctgaggaagtatctgtgatgcccaagaaatccattttgaagaagcggattgaggtggacataatggagccctccatgcaggtctctgctgcatttcttgtagggcctcttgctagtctccctaatatcttaaagcctgcttactttcctgtgggctatgttcctaatggtatctttgtaatatgtgctggaccgacattgtgagctacaccttctaggactctccaaacgaaactgtaggccttttaatgcatcagtagagggttctattgctgtatattaggctttatattaataaatagatattttggagag

SEQ ID NO: 307582 - DNA, 344 bp, Homo sapiens
ccaataaccaaacaagctactcgtagccgtcccaatcttcgtgtgatccccactgtgactcctgataagcctaagcagaaagagtctctgcgaggctcaattcctgcggcccaagtgcctgtccaggtgtccattccatcactcataagatataatccagagaagatctctgatgagaagaaccgtgcttcccagaagcaaaaggtgaatattagctttgggtatcctgtgcctgagttttctgttttgccataaatttgtatatgttttttagaaggggctgaaaatttgtaaggctctttcacttgaagtcgtctggaggctgctgtcatcatcctaagaag

SEQ ID NO: 307583 - DNA, 439 bp, Homo sapiens
cggccgccgggcctcgccgtccccgccacggggtcgtcgcgtctccccgtccccgcctcgggcccgtcgcggctccccgtcgccaccgcggggccgacgactcttcccgccgggcccggccggcttcagaggcagcagccgaggggagtcccgcgccgactatgcccgggacggccgcggagaccatccaggcgacagcggcagccgggtaatcccacccctcgtccaggactccctccatcccccagtcccctcccccggaattcccgtttccagaaacgcccggggcctccagaccagggtcctaagcgcgaagcctccggccaactccctcggggatgccgagcctggaggcttctgtcagacccgggagcgttgacacaataacggactcgggagcgcacgggcgtctcgtcgggagtgcgcgctccgttcctta

SEQ ID NO: 307584 - DNA, 365 bp, Homo sapiens
ttttttaagtcaccttcatactgatttccataacggctatggaaaaacacttgttatcttttgtctttttgatagtagccattctaacctgtgggaggtgatatctcattgtggttttgatttgcatttcccctgataattagagatgttgagcaacttttcgtattcctggtggccttttgaattccttcttttgaggtcctttgtccatttttaaattgctatttgtaatttcggtattaaggtgtatgagtcccttatatatttaggatttaaccccttattgaatatacggtttgcaaatcttttttcctcattccgaatattgtctttacattttgttgattgtttgtcgacgcggccgc

SEQ ID NO: 307585 - DNA, 841 bp, Homo sapiens
ctcccattacttcccgttttctcgatctgctgctcgtctcaggctcgtagttcgccttcaacatgccggaaccagcgaagtccgctcccgcgcccaagaagggctcgaagaaagccgtgactaaggcgcagaagaaggacggcaagaagcgcaagcgcagccgcaaggagagctactccgtatacgtgtacaaggtgctgaagcaggtccaccccgacaccggcatctcctctaaggccatgggaatcatgaactccttcgtcaacgacatcttcgaacgcatcgcgggtgaggcttcccgcctggcgcattacaacaagcgctcgaccatcacctccagggagatccagacggccgtgcgcctgctgctgcccggggagttggccaagcacgccgtgtccgagggcaccaaggccgtcaccaagtacaccagcgctaagtaaacttgccaaggagggactttctctggaatttcctgatatgaccaagaaagcttcttatcaaaagaagcacaattgccttcggttacctcattatctactgcagaaaagaagacgagaatgcaaccatacctagatggacttttccacaagctaaagctggcctcttgatctcattcagattccaaagagaatcatttacaagttaatttctgtctccttggtccattccttctctctaataatcatttactgttcctcaaagaattgtctacattacccatctcctcttttgcctctgagaaagagtatataagcttctgtaccccactggggggttggggtaatattctgtggtcctcagccctgtaccttaataaatttgtatgccttttctctta

SEQ ID NO: 307586 - DNA, 1241 bp, Homo sapiens
ctcccattacttcccgttttctcgatctgctgctcgtctcaggctcgtagttcgccttcaacatgccggaaccagcgaagtccgctcccgcgcccaagaagggctcgaagaaagccgtgactaaggcgcagaagaaggacggcaagaagcgcaagcgcagccgcaaggagagctactccgtatacgtgtacaaggtgctgaagcaggtccaccccgacaccggcatctcctctaaggccatgggaatcatgaactccttcgtcaacgacatcttcgaacgcatcgcgggtgaggcttcccgcctggcgcattacaacaagcgctcgaccatcacctccagggagatccagacggccgtgcgcctgctgctgcccggggagttggccaagcacgccgtgtccgagggcaccaaggccgtcaccaagtacaccagcgctaagtaaacttgccaaggagggactttctctggaatttcctgatatgaccaagaaagcttcttatcaaaagaagcacaattgccttcggttacctcattatctactgcagaaaagaagacgagaatgcaaccatacctagatggacttttccacaagctaaagctggcctcttgatctcattcagattccaaagagaatcatttacaagttaatttctgtctccttggtccattccttctctctaataatcatttactgttcctcaaagaattgtctacattacccatctcctcttttgcctctgagaaagagtatataagcttctgtaccccactggggggttggggtaatattctgtggtcctcagccctgtaccttaataaatttgtatgccttttctcttaaaaaaaaacacaaacccaacccataacgagaaaaaaacgcagcaaaccgaccctacccaaaaaaaatcagcactcccagcgcacacaaacaacaaaagcagaaaccgacaaaagttttccgccccgctggcccccacggggggaactttgcgccccttccctttggggggggggaattacaagaccccgccccactgacccctgcgctgggcggttcggcgggggaagggggttaaatctacctaaagggcgggaatccggttttcccaaaattggggggatcccccgaagaaaaacttgtgggccaagggcgctaaagggtccgaacccaaaaaggggcgcgtgggcggtttttccaagggtcccccctcttgaaggaccaaataattccccttagtcg

SEQ ID NO: 307587 - DNA, 960 bp, Homo sapiens
ctcccattacttcccgttttctcgatctgctgctcgtctcaggctcgtagttcgccttcaacatgccggaaccagcgaagtccgctcccgcgcccaagaagggctcgaagaaagccgtgactaaggcgcagaagaaggacggcaagaagcgcaagcgcagccgcaaggagagctactccgtatacgtgtacaaggtgctgaagcaggtccaccccgacaccggcatctcctctaaggccatgggaatcatgaactccttcgtcaacgacatcttcgaacgcatcgcgggtgaggcttcccgcctggcgcattacaacaagcgctcgaccatcacctccagggagatccagacggccgtgcgcctgctgctgcccggggagttggccaagcacgccgtgtccgagggcaccaaggccgtcaccaagtacaccagcgctaagtaaacttgccaaggagggactttctctggaatttcctgatatgaccaagaaagcttcttatcaaaagaagcacaattgccttcggttacctcattatctactgcagaaaagaagacgagaatgcaaccatacctagatggacttttccacaagctaaagctggcctcttgatctcattcagattccaaagagaatcatttacaagttaatttctgtctccttggtccattccttctctctaataatcatttactgttcctcaaagaattgtctacattacccatctcctcttttgcctctgagaaagagtatataagcttctgtaccccactggggggttggggtaatattctgtggtcctcagccctgtaccttaataaatttgtatgccttttctcttaaaaaaaacacacacaatactacacaccaaccccacaaaacaaaaaagcgggccaaaaccggggccaccacccttgaagggcccagaaaaaaaaaccgggcacaggggaacggtggacac

SEQ ID NO: 307588 - DNA, 567 bp, Homo sapiens
ggtatattgctaagttcttttctacttattttcatttctagtgtttggggtggagaattatccccccaaatatcgagcttggtaatggtgggtgtttttgaaaattgagggttctcagaaacaagtctaagaatcaaggtccctctaactttgtcctgtttctcttccccaaatacagggagggactttctctggaatttcctgatatgaccaagaaagcttcttatcaaaagaagcacaattgccttcggttacctcattatctactgcagaaaagaagacgagaatgcaaccatacctagatggacttttccacaagctaaagctggcctcttgatctcattcagattccaaagagaatcatttacaagttaatttctgtctccttggtccattccttctctctaataatcatttactgttcctcaaagaattgtctacattacccatctcctcttttgcctctgagaaagagtatataagcttctgtaccccactggggggttggggtaatattctgtggtcctcagccctgtaccttaataaatttgtatgccttttctctta

SEQ ID NO: 307589 - DNA, 944 bp, Homo sapiens
ggctgctcaagcccaacgcctcagtggccctccacaaacacagctgcattcatccgggtcgtgggctcggagtttgtacagaagtatctgggtgagggcccccgacccggatgaatgcagctgttgtgtctgctgctcgtctcaggctcgtagttcgccttcaacatgccggaaccagcgaagtccgctcccgcgcccaagaagggctcgaagaaagccgtgactaaggcgcagaagaaggacggcaagaagcgcaagcgcagccgcaaggagagctactccgtatacgtgtacaaggtgctgaagcaggtccaccccgacaccggcatctcctctaaggccatgggaatcatgaactccttcgtcaacgacatcttcgaacgcatcgcgggtgaggcttcccgcctggcgcattacaacaagcgctcgaccatcacctccagggagatccagacggccgtgcgcctgctgctgcccggggagttggccaagcacgccgtgtccgagggcaccaaggccgtcaccaagtacaccagcgctaagtaaacttgccaaggagggactttctctggaatttcctgatatgaccaagaaagcttcttatcaaaagaagcacaattgccttcggttacctcattatctactgcagaaaagaagacgagaatgcaaccatacctagatggacttttccacaagctaaagctggcctcttgatctcattcagattccaaagagaatcatttacaagttaatttctgtctccttggtccattccttctctctaataatcatttactgttcctcaaagaattgtctacattacccatctcctcttttgcctctgagaaagagtatataagcttctgtaccccactggggggttggggtaatattctgtggtcctcagccctgtaccttaataaatttgtatgccttttctctta

SEQ ID NO: 307590 - DNA, 494 bp, Homo sapiens
ctcccattacttcccgttttctcgatctgctgctcgtctcaggctcgtagttcgccttcaacatgccggaaccagcgaagtccgctcccgcgcccaagaagggctcgaagaaagccgtgactaaggcgcagaagaaggacggcaagaagcgcaagcgcagccgcaaggagagctactccgtatacgtgtacaaggtgctgaagcaggtccaccccgacaccggcatctcctctaaggccatgggaatcatgaactccttcgtcaacgacatcttcgaacgcatcgcgggtgaggcttcccgcctggcgcattacaacaagcgctcgaccatcacctccagggagatccagacggccgtgcgcctgctgctgcccggggagttggccaagcacgccgtgtccgagggcaccaaggccgtcaccaagtacaccagcgctaagtaaacttgccaagtaagcgtcttaaagcccaaccccaaaggctcttttaagagc

SEQ ID NO: 307591 - DNA, 682 bp, Homo sapiens
ctcccattacttcccgttttctcgatctgctgctcgtctcaggctcgtagttcgccttcaacatgccggaaccagcgaagtccgctcccgcgcccaagaagggctcgaagaaagccgtgactaaggcgcagaagaaggacggcaagaagcgcaagcgcagccgcaaggagagctactccgtatacgtgtacaaggtgctgaagcaggtccaccccgacaccggcatctcctctaaggccatgggaatcatgaactccttcgtcaacgacatcttcgaacgcatcgcgggtgaggcttcccgctggcctcttgatctcattcagattccaaagagaatcatttacaagttaatttctgtctccttggtccattccttctctctaataatcatttactgttcctcaaagaattgtctacattacccatctcctcttttgcctctgagaaagagtatataagcttctgtaccccactggggggttggggtaatattctgtggtcctcagccctgtaccttaataaatttgtatgccttttctcttaaaaaaaaatactatattgtcaatgggatagacttgtttcttgaagtaacttattataactgctggggggtcttgttgaattaatctcacattattctcatggggggggacctggttcactatatttcctaaaggggttg

SEQ ID NO: 307592 - DNA, 513 bp, Homo sapiens
gcccacaagagatggcgtccaaggagtagcatcgctccccagccatgcttccctgggatttgggcaagcctccctgcacaccaaacatgagcctcagggcgggctggaggagggggtttccggttcttctgcctctcctgggtctgacctcgtcgttgtcattgcccaggtggcatccaaggctctgctgtctgtccacagcatccggacctctcatctgtctacacccattgcttcaggcttggtccctccgccgtcagtaatgtccagcttcactcaggccgctcacctgcgctttacattccaacatctgctgtgagtgtgtcctctctgggcagccccccaccctccctcactccccaggggctcctcctctgaccctgtgcgcttcctccatgcttcccccacagttaggggcaccaccatccatccagtcacctgggaatgatcccagggtcaggtgatctgaggatggagaattgaccactgagcttggtggcgaggctggtgccc

SEQ ID NO: 307593 - DNA, 490 bp, Homo sapiens
cccgcaccgaaaccctaccctttccgcaatggcacatcagcagtaaaagtgttactcaatagcaggagcagaaaggccaaaatgatgagcgcaattgctgcgggtcccaggcccacataggagtcatgctgtgcttccctgcagccgctgccatagggtttgatgactcatcgaaaccctcatcaaaccctttcttcatgtgtcacccaaatagggcttgggtttttactttcacttcatttctgagattaaggtgtaaccaagtagagcatttctttgcttgatacagaaagttactagtctcaaccatggcctgggcataggagatgtcaaaataagtttatttcaaatggcaccatttaaatagggattcgatgacctcatcgaaaccctagtgacgaaaaataacaatacaggactctttcgaggccctgtaattggaatgaggccactttaaatcctttaacgaggatccattggaggggttaag

SEQ ID NO: 307594 - DNA, 6380 bp, Homo sapiens
  misc_feature (25)..(25): n is a, c, g, or t
agcgggtcttctcccggcctgagcngcagcagctgcggcggcggcggcgtttgagtggaggaagatggcggctccgggcggctcggggtcccgccagctgtgaggagccccgagcacggctgtcgcggcctgaggcagagcgcctctgctctggccctgtccctggctccctcattaccgtcgccagcggagcgaacccgagagcgtggagcgggctgggccagagatgggatttcgccatgttgcccacgctggtctcgaactcctgacctaaggtgatctgccggcctcagaatcccaaagtgctgggactacaggtgtgagccactgcacccaaccaagaactactatattttctgttgagtggaatgtcatggccagctcctcggacagtgaagatgacagtttcatggctgtggaccaggaagaaactgtgctggaagggacaatggatcaagatgaggagccccacccagtattggaggctgaggagactagacataataggtccatgtcggagctgccagaagaggttttggagtatatcctgtcctttctctcaccgtatcaggaacacaaaactgcggcccttgtctgcaaacagtggtatcgacttatcaaaggtgtagcccatcagtgttatcatggtttcatgaaggctgtccaggaaggaaacattcagtgggagagccgtacctatccttatcctggaaccccaatcactcagcgcttctcgcacagtgcatgctattatgatgctaatcagtctatgtatgtgtttggaggctgtacccagagcagctgcaatgctgctttcaatgacctctggagacttgacctaaacagcaaagagtggatccgacctttggcttcagggtcctatccttcccccaaagctggagcaactctggtcgtgtacaaggacttgctagtgctgtttggtggctggacgcggccaagcccttatcccctacaccagccagagagattctttgatgaaatacacacttactcaccctctaaaaattggtggaactgcattgtgacaacccatgggccacctcccatggctggccactcctcctgtgtgatagatgataaaatgattgtctttggtggctctttaggatcccggcaaatgagcaatgatgtctgggtccttgaccttgagcagtgggcgtggtccaagccgaacatctctggccccagtcctcatcctcgaggtggccaatctcagattgtcatagatgatgcaactatcttaatcctcggagggtgtggcggtcccaatgctctattcaaggatgcttggttgttgcacatgcattctggtccttgggcctggcagccactcaaggtagaaaatgaagagcatggggccccagaactgtggtgccatccagcttgccgggtgggacagtgtgtggtggtcttcagccaggctcctagtgggagagccccactcagccccagtttgaactctcgcccatcacctatcagtgccactcctccagctctcgttcctgaaacccgagagtaccgctctcagtctccagtaagaagcatggatgaagctccttgtgttaacggccgctggggaacactgagacccagggctcaaaggcagactccttcaggttcccgggaagggagcctttccccagccagaggagacggctctcctatcctcaatggtgggagtttgtctccaggaacggcagctgtgggtggctcttctttggacagtcctgtacaggccatatctccaagtactccatctgctcctgaaggatacgacctgaaaataggactttctttggccccccgacgaggatcactaccagatcagaaagatctgagattaggatccatagatctgaattgggatctgaaacccgcttccagtagtaatcccatggatggcatggacaataggacagttgggggaagtatgagacaccctcctgaacagacaaatggtgtgcataccccacctcacgtggccagtgcccttgcaggggccgtctccccaggtgccctgcgtcggagtctggaagccatcaaagcgatgtcctccaaaggcccctcggcctctgcagcactaagtcctcctcttgggtcttctccaggctctcctgggagccagagtttgagcagtggagaaacagtgcccatccctcgcccagggcctgcccaaggagatggacattccttacctcccattgctcgccgcctgggccaccaccctccacagtccctaaatgttggcaaacccctataccagagtatgaactgcaagcccatgcagatgtacgtgctggacattaaagacaccaaggagaaggggcgggtcaaatggaaagtatttaatagcagttctgtggttggacctcctgaaaccagcctgcataccgtggtacaaggcaggggtgaactcatcatatttggaggactcatggacaagaaacagaatgtgaagtactatccaaaaacaaacgccttgtactttgtacgagcaaagagataatgtgttctaaacccctttccttttctgtggcttttaatttggaattttccagtgtgtaagcatttggactgagaattgggaaaacaaaattactcccagaagccaaaactctttaattcccaaccgaagtcactccaggctgggatcaaatctccattaagaaaaaaaattatatataaatatatatatatatattatatagccaactctgttgacaaaaaaagggagagatttccatcctggttcagataaagttgttgctgtgttttaacaggggctgggctgcctttttctaccttgctggtaactagaccaagaagttagagaatagactaacatcagtaacttcccaaaagaaactgaagagccccctgtaaatctttatgtggccttcttggagttaaaaaatgaaagggcatatgtaagttgcaaaggtggagggttttagactctcatgcttcaggtgctgtcggggtaaaagtaactgtttttccccttctcttaaaaccacagaggacctgtgacagctctgcagaaatgccagtgcctggccccctcttgccttttatggctgaggaaagttacccaacaaaggattttattccacatttgtgtgccgggtcattgtgaaataatgtttatgcagccaacatctgaccgcctagtagtgtccattggtctttggagtgcttcttgtgtgtctcagaaaacattttgtgtctgattgtggaaatttctgacaatcaatcatatttggtggcaagttgccaaaaaacatatttattctcctctttcttcccttagaacatggtacttggaaactgccttttccattcacttacaggctgcttttttcttctaccttttttcttttcttttttttttttcatatgtggtgaagtcctaaaacctgtctgactttctgtttcttttacaaagctcaggtgcctacagaaatcagaagctgcttagaaatacttgtggaaccctttccctggtgtcactagggggccagtagggaattctaagatgccaatattgtgagaaatctttgaagcaagcatcaaaagatactgttttttccctatgggcttctttttacttccaaagcacattgagcacactcatcccatatttgtagaatgtggaaattgattctggaagggaattccaataacagttctttttagaaatgtttttttccttgtggtgacatatattcctcttcctggctattggcaggtgatggagttgagaatcatgtacttgacttcttgacgcatggctgacctcagaaacagctccatcctttgcacttgtcttcttcatgtgtcacccaaatagggcttgggtttttactttcacttcatttctgagattaaggtgtaaccaagtagagcatttctttgcttgatacagaaagttactagtctcaaccatggcctgggcataggagatgtcaaaataagtttatttcaaatggcaccatttaaatagggatttttggtgatttctcatcagtggaaagaggatttttgttttgcctttgttttgttttgaaatttaaatcctaatttcaaaacatcaccttgccaccctgacactcctctttttattattagcgtttctcaggcacaaagcctgctgcagctggccctgggtcctggctttcagccagcatctggcagcctaagtgtactgataagtgtgttttctcctgttacatcatgctgaatcctttcccttagccattagcttttatgatgtggtcttcgtaggaaagccaccctggtgccaagcctagcttgtggggaggggtatgtgttccagaaactgctctttgtgttcccttcaatgaggaaacaacatgtgtctacttatgtggcatccaactgcttggagctccacacttccctttcgcgactcaggctctggtgctgttgccaatccttgcttggcaaagactgttcgatcatgtggggtccttatttacaagggaaagctgggccagaaggctagcaattcaggtgttaccgctattgctgtaccttgtgttaggacattgtgtttgtgcatggactgtgcctccaaactcagtagttcctatctaaatataaagtatattagaaacctgaaagtacagaatctcaaccttacagtctttcccttagtcctgtggccttcctaagccagctgttaacgtgttgattccttccacttcccccaagtaggcaggcaacagatatgttgattgtcttagaaagtaatctggttcctctgaactccattgaattccagtttgacgcatactgcctggaaccagactgtttgcttacagctttttaagaaaaatctgccttgtctgcccccattatggttggtcttggtagctcctgggcactgtgggcgtgtaccatgggaaagtgattcaacacagtgaaggtgattgtctcctcaggcctcctgaagccacctgtgcggtgggacttcacgtgtctcggccaaggcgagcatttccacaatgccgtggatgctgcagtcaggccagattgaaccatgaccccatttttcacatgataccaattttgtcttaaaattcactgagaaaaatgagactaaattttttttaaccctcaggagcacctgaagcaaatatttatccgtatttattgaaaattcattttgtttctacttgaagctttaaccccttccattcctgcaagtgtgccttttgagagctcccatggcctagtgacttcactggtcaccttgtccatcttacttaagaattttagtctctccctaccctcttggacagagcttcctgttctcttatttcacaggttatgcagcagagcgggttttgtgttttcattcctatttccacccttcatttggttggtggactccacaacctcaccctaccctacactttgggagcacaaatttggtgttgaaacaagcttaaatttcattttagggcatactgggcttactctcctcccagctgtctgtggattgatttgattttaatgttcgagttttacagcaacagctgaaaaccatgaactattctaggaactgtgttggaactctttaaaataaagaaaagaggaggaggaggaggaagaaagaaaaccaacttaagaagccttgactttggaggacagaaagccaccagccaatggagaacaaagagatgtttccctttcctttctttcaccttgtcattctgggtttccttctgcttcactctttccttcccccttaaaagtggtattcctggttggtctgtctgtctgtccttgtccttgtggtgatcctggcatggtgatatgctccactttgcattatccatggtctcttaccagcgcacaagtcagtggggaggatctaaccacgcctggtggtgaggaagctgaatttccaggcctgcgtcccatgtagcctctccatgaactgcagaaggcatgttctgcatggttaccagtaagtggctccctctcaccgtgttcattgtcaaatgagagcaaactttaggtgttggctccattgtacactctacttgctctgctcccctccctccaaccagggttcatgtcagtgcacaccccatgtgccctggcgaagctggtgctgtgagtgatgtttcccatacaactcagggatgccaggtggcttaccctgagatagtcattttgggcacataacagtgtaggaatgaaacatggatttcattgatatttaaatctgtcaatttcattttttgttaatgttttcccctgatgactttttagcaatttaacaaataaaatggacaattgtcttaactgttttattagcaaaaaaagaa

SEQ ID NO: 307595 - DNA, 6248 bp, Homo sapiens
  misc_feature (25)..(25): n is a, c, g, or t
agcgggtcttctcccggcctgagcngcagcagctgcggcggcggcggcgtttgagtggaggaagatggcggctccgggcggctcggggtcccgccagctgtgaggagccccgagcacggctgtcgcggcctgaggcagagcgcctctgctctggccctgtccctggctccctcattaccgtcgccagcggagcgaacccgagagcgtggagcgggctgggccagctgttgagtggaatgtcatggccagctcctcggacagtgaagatgacagtttcatggctgtggaccaggaagaaactgtgctggaagggacaatggatcaagatgaggagccccacccagtattggaggctgaggagactagacataataggtccatgtcggagctgccagaagaggttttggagtatatcctgtcctttctctcaccgtatcaggaacacaaaactgcggcccttgtctgcaaacagtggtatcgacttatcaaaggtgtagcccatcagtgttatcatggtttcatgaaggctgtccaggaaggaaacattcagtgggagagccgtacctatccttatcctggaaccccaatcactcagcgcttctcgcacagtgcatgctattatgatgctaatcagtctatgtatgtgtttggaggctgtacccagagcagctgcaatgctgctttcaatgacctctggagacttgacctaaacagcaaagagtggatccgacctttggcttcagggtcctatccttcccccaaagctggagcaactctggtcgtgtacaaggacttgctagtgctgtttggtggctggacgcggccaagcccttatcccctacaccagccagagagattctttgatgaaatacacacttactcaccctctaaaaattggtggaactgcattgtgacaacccatgggccacctcccatggctggccactcctcctgtgtgatagatgataaaatgattgtctttggtggctctttaggatcccggcaaatgagcaatgatgtctgggtccttgaccttgagcagtgggcgtggtccaagccgaacatctctggccccagtcctcatcctcgaggtggccaatctcagattgtcatagatgatgcaactatcttaatcctcggagggtgtggcggtcccaatgctctattcaaggatgcttggttgttgcacatgcattctggtccttgggcctggcagccactcaaggtagaaaatgaagagcatggggccccagaactgtggtgccatccagcttgccgggtgggacagtgtgtggtggtcttcagccaggctcctagtgggagagccccactcagccccagtttgaactctcgcccatcacctatcagtgccactcctccagctctcgttcctgaaacccgagagtaccgctctcagtctccagtaagaagcatggatgaagctccttgtgttaacggccgctggggaacactgagacccagggctcaaaggcagactccttcaggttcccgggaagggagcctttccccagccagaggagacggctctcctatcctcaatggtgggagtttgtctccaggaacggcagctgtgggtggctcttctttggacagtcctgtacaggccatatctccaagtactccatctgctcctgaaggatacgacctgaaaataggactttctttggccccccgacgaggatcactaccagatcagaaagatctgagattaggatccatagatctgaattgggatctgaaacccgcttccagtagtaatcccatggatggcatggacaataggacagttgggggaagtatgagacaccctcctgaacagacaaatggtgtgcataccccacctcacgtggccagtgcccttgcaggggccgtctccccaggtgccctgcgtcggagtctggaagccatcaaagcgatgtcctccaaaggcccctcggcctctgcagcactaagtcctcctcttgggtcttctccaggctctcctgggagccagagtttgagcagtggagaaacagtgcccatccctcgcccagggcctgcccaaggagatggacattccttacctcccattgctcgccgcctgggccaccaccctccacagtccctaaatgttggcaaacccctataccagagtatgaactgcaagcccatgcagatgtacgtgctggacattaaagacaccaaggagaaggggcgggtcaaatggaaagtatttaatagcagttctgtggttggacctcctgaaaccagcctgcataccgtggtacaaggcaggggtgaactcatcatatttggaggactcatggacaagaaacagaatgtgaagtactatccaaaaacaaacgccttgtactttgtacgagcaaagagataatgtgttctaaacccctttccttttctgtggcttttaatttggaattttccagtgtgtaagcatttggactgagaattgggaaaacaaaattactcccagaagccaaaactctttaattcccaaccgaagtcactccaggctgggatcaaatctccattaagaaaaaaaattatatataaatatatatatatatattatatagccaactctgttgacaaaaaaagggagagatttccatcctggttcagataaagttgttgctgtgttttaacaggggctgggctgcctttttctaccttgctggtaactagaccaagaagttagagaatagactaacatcagtaacttcccaaaagaaactgaagagccccctgtaaatctttatgtggccttcttggagttaaaaaatgaaagggcatatgtaagttgcaaaggtggagggttttagactctcatgcttcaggtgctgtcggggtaaaagtaactgtttttccccttctcttaaaaccacagaggacctgtgacagctctgcagaaatgccagtgcctggccccctcttgccttttatggctgaggaaagttacccaacaaaggattttattccacatttgtgtgccgggtcattgtgaaataatgtttatgcagccaacatctgaccgcctagtagtgtccattggtctttggagtgcttcttgtgtgtctcagaaaacattttgtgtctgattgtggaaatttctgacaatcaatcatatttggtggcaagttgccaaaaaacatatttattctcctctttcttcccttagaacatggtacttggaaactgccttttccattcacttacaggctgcttttttcttctaccttttttcttttcttttttttttttcatatgtggtgaagtcctaaaacctgtctgactttctgtttcttttacaaagctcaggtgcctacagaaatcagaagctgcttagaaatacttgtggaaccctttccctggtgtcactagggggccagtagggaattctaagatgccaatattgtgagaaatctttgaagcaagcatcaaaagatactgttttttccctatgggcttctttttacttccaaagcacattgagcacactcatcccatatttgtagaatgtggaaattgattctggaagggaattccaataacagttctttttagaaatgtttttttccttgtggtgacatatattcctcttcctggctattggcaggtgatggagttgagaatcatgtacttgacttcttgacgcatggctgacctcagaaacagctccatcctttgcacttgtcttcttcatgtgtcacccaaatagggcttgggtttttactttcacttcatttctgagattaaggtgtaaccaagtagagcatttctttgcttgatacagaaagttactagtctcaaccatggcctgggcataggagatgtcaaaataagtttatttcaaatggcaccatttaaatagggatttttggtgatttctcatcagtggaaagaggatttttgttttgcctttgttttgttttgaaatttaaatcctaatttcaaaacatcaccttgccaccctgacactcctctttttattattagcgtttctcaggcacaaagcctgctgcagctggccctgggtcctggctttcagccagcatctggcagcctaagtgtactgataagtgtgttttctcctgttacatcatgctgaatcctttcccttagccattagcttttatgatgtggtcttcgtaggaaagccaccctggtgccaagcctagcttgtggggaggggtatgtgttccagaaactgctctttgtgttcccttcaatgaggaaacaacatgtgtctacttatgtggcatccaactgcttggagctccacacttccctttcgcgactcaggctctggtgctgttgccaatccttgcttggcaaagactgttcgatcatgtggggtccttatttacaagggaaagctgggccagaaggctagcaattcaggtgttaccgctattgctgtaccttgtgttaggacattgtgtttgtgcatggactgtgcctccaaactcagtagttcctatctaaatataaagtatattagaaacctgaaagtacagaatctcaaccttacagtctttcccttagtcctgtggccttcctaagccagctgttaacgtgttgattccttccacttcccccaagtaggcaggcaacagatatgttgattgtcttagaaagtaatctggttcctctgaactccattgaattccagtttgacgcatactgcctggaaccagactgtttgcttacagctttttaagaaaaatctgccttgtctgcccccattatggttggtcttggtagctcctgggcactgtgggcgtgtaccatgggaaagtgattcaacacagtgaaggtgattgtctcctcaggcctcctgaagccacctgtgcggtgggacttcacgtgtctcggccaaggcgagcatttccacaatgccgtggatgctgcagtcaggccagattgaaccatgaccccatttttcacatgataccaattttgtcttaaaattcactgagaaaaatgagactaaattttttttaaccctcaggagcacctgaagcaaatatttatccgtatttattgaaaattcattttgtttctacttgaagctttaaccccttccattcctgcaagtgtgccttttgagagctcccatggcctagtgacttcactggtcaccttgtccatcttacttaagaattttagtctctccctaccctcttggacagagcttcctgttctcttatttcacaggttatgcagcagagcgggttttgtgttttcattcctatttccacccttcatttggttggtggactccacaacctcaccctaccctacactttgggagcacaaatttggtgttgaaacaagcttaaatttcattttagggcatactgggcttactctcctcccagctgtctgtggattgatttgattttaatgttcgagttttacagcaacagctgaaaaccatgaactattctaggaactgtgttggaactctttaaaataaagaaaagaggaggaggaggaggaagaaagaaaaccaacttaagaagccttgactttggaggacagaaagccaccagccaatggagaacaaagagatgtttccctttcctttctttcaccttgtcattctgggtttccttctgcttcactctttccttcccccttaaaagtggtattcctggttggtctgtctgtctgtccttgtccttgtggtgatcctggcatggtgatatgctccactttgcattatccatggtctcttaccagcgcacaagtcagtggggaggatctaaccacgcctggtggtgaggaagctgaatttccaggcctgcgtcccatgtagcctctccatgaactgcagaaggcatgttctgcatggttaccagtaagtggctccctctcaccgtgttcattgtcaaatgagagcaaactttaggtgttggctccattgtacactctacttgctctgctcccctccctccaaccagggttcatgtcagtgcacaccccatgtgccctggcgaagctggtgctgtgagtgatgtttcccatacaactcagggatgccaggtggcttaccctgagatagtcattttgggcacataacagtgtaggaatgaaacatggatttcattgatatttaaatctgtcaatttcattttttgttaatgttttcccctgatgactttttagcaatttaacaaataaaatggacaattgtcttaactgttttattagcaaaaaaagaa

SEQ ID NO: 307596 - DNA, 6075 bp, Homo sapiens
tctggagacttgacctaaacagcaaagagtggatccgacctttggcttcagctgttgagtggaatgtcatggccagctcctcggacagtgaagatgacagtttcatggctgtggaccaggaagaaactgtgctggaagggacaatggatcaagatgaggagccccacccagtattggaggctgaggagactagacataataggtccatgtcggagctgccagaagaggttttggagtatatcctgtcctttctctcaccgtatcaggaacacaaaactgcggcccttgtctgcaaacagtggtatcgacttatcaaaggtgtagcccatcagtgttatcatggtttcatgaaggctgtccaggaaggaaacattcagtgggagagccgtacctatccttatcctggaaccccaatcactcagcgcttctcgcacagtgcatgctattatgatgctaatcagtctatgtatgtgtttggaggctgtacccagagcagctgcaatgctgctttcaatgacctctggagacttgacctaaacagcaaagagtggatccgacctttggcttcagggtcctatccttcccccaaagctggagcaactctggtcgtgtacaaggacttgctagtgctgtttggtggctggacgcggccaagcccttatcccctacaccagccagagagattctttgatgaaatacacacttactcaccctctaaaaattggtggaactgcattgtgacaacccatgggccacctcccatggctggccactcctcctgtgtgatagatgataaaatgattgtctttggtggctctttaggatcccggcaaatgagcaatgatgtctgggtccttgaccttgagcagtgggcgtggtccaagccgaacatctctggccccagtcctcatcctcgaggtggccaatctcagattgtcatagatgatgcaactatcttaatcctcggagggtgtggcggtcccaatgctctattcaaggatgcttggttgttgcacatgcattctggtccttgggcctggcagccactcaaggtagaaaatgaagagcatggggccccagaactgtggtgccatccagcttgccgggtgggacagtgtgtggtggtcttcagccaggctcctagtgggagagccccactcagccccagtttgaactctcgcccatcacctatcagtgccactcctccagctctcgttcctgaaacccgagagtaccgctctcagtctccagtaagaagcatggatgaagctccttgtgttaacggccgctggggaacactgagacccagggctcaaaggcagactccttcaggttcccgggaagggagcctttccccagccagaggagacggctctcctatcctcaatggtgggagtttgtctccaggaacggcagctgtgggtggctcttctttggacagtcctgtacaggccatatctccaagtactccatctgctcctgaaggatacgacctgaaaataggactttctttggccccccgacgaggatcactaccagatcagaaagatctgagattaggatccatagatctgaattgggatctgaaacccgcttccagtagtaatcccatggatggcatggacaataggacagttgggggaagtatgagacaccctcctgaacagacaaatggtgtgcataccccacctcacgtggccagtgcccttgcaggggccgtctccccaggtgccctgcgtcggagtctggaagccatcaaagcgatgtcctccaaaggcccctcggcctctgcagcactaagtcctcctcttgggtcttctccaggctctcctgggagccagagtttgagcagtggagaaacagtgcccatccctcgcccagggcctgcccaaggagatggacattccttacctcccattgctcgccgcctgggccaccaccctccacagtccctaaatgttggcaaacccctataccagagtatgaactgcaagcccatgcagatgtacgtgctggacattaaagacaccaaggagaaggggcgggtcaaatggaaagtatttaatagcagttctgtggttggacctcctgaaaccagcctgcataccgtggtacaaggcaggggtgaactcatcatatttggaggactcatggacaagaaacagaatgtgaagtactatccaaaaacaaacgccttgtactttgtacgagcaaagagataatgtgttctaaacccctttccttttctgtggcttttaatttggaattttccagtgtgtaagcatttggactgagaattgggaaaacaaaattactcccagaagccaaaactctttaattcccaaccgaagtcactccaggctgggatcaaatctccattaagaaaaaaaattatatataaatatatatatatatattatatagccaactctgttgacaaaaaaagggagagatttccatcctggttcagataaagttgttgctgtgttttaacaggggctgggctgcctttttctaccttgctggtaactagaccaagaagttagagaatagactaacatcagtaacttcccaaaagaaactgaagagccccctgtaaatctttatgtggccttcttggagttaaaaaatgaaagggcatatgtaagttgcaaaggtggagggttttagactctcatgcttcaggtgctgtcggggtaaaagtaactgtttttccccttctcttaaaaccacagaggacctgtgacagctctgcagaaatgccagtgcctggccccctcttgccttttatggctgaggaaagttacccaacaaaggattttattccacatttgtgtgccgggtcattgtgaaataatgtttatgcagccaacatctgaccgcctagtagtgtccattggtctttggagtgcttcttgtgtgtctcagaaaacattttgtgtctgattgtggaaatttctgacaatcaatcatatttggtggcaagttgccaaaaaacatatttattctcctctttcttcccttagaacatggtacttggaaactgccttttccattcacttacaggctgcttttttcttctaccttttttcttttcttttttttttttcatatgtggtgaagtcctaaaacctgtctgactttctgtttcttttacaaagctcaggtgcctacagaaatcagaagctgcttagaaatacttgtggaaccctttccctggtgtcactagggggccagtagggaattctaagatgccaatattgtgagaaatctttgaagcaagcatcaaaagatactgttttttccctatgggcttctttttacttccaaagcacattgagcacactcatcccatatttgtagaatgtggaaattgattctggaagggaattccaataacagttctttttagaaatgtttttttccttgtggtgacatatattcctcttcctggctattggcaggtgatggagttgagaatcatgtacttgacttcttgacgcatggctgacctcagaaacagctccatcctttgcacttgtcttcttcatgtgtcacccaaatagggcttgggtttttactttcacttcatttctgagattaaggtgtaaccaagtagagcatttctttgcttgatacagaaagttactagtctcaaccatggcctgggcataggagatgtcaaaataagtttatttcaaatggcaccatttaaatagggatttttggtgatttctcatcagtggaaagaggatttttgttttgcctttgttttgttttgaaatttaaatcctaatttcaaaacatcaccttgccaccctgacactcctctttttattattagcgtttctcaggcacaaagcctgctgcagctggccctgggtcctggctttcagccagcatctggcagcctaagtgtactgataagtgtgttttctcctgttacatcatgctgaatcctttcccttagccattagcttttatgatgtggtcttcgtaggaaagccaccctggtgccaagcctagcttgtggggaggggtatgtgttccagaaactgctctttgtgttcccttcaatgaggaaacaacatgtgtctacttatgtggcatccaactgcttggagctccacacttccctttcgcgactcaggctctggtgctgttgccaatccttgcttggcaaagactgttcgatcatgtggggtccttatttacaagggaaagctgggccagaaggctagcaattcaggtgttaccgctattgctgtaccttgtgttaggacattgtgtttgtgcatggactgtgcctccaaactcagtagttcctatctaaatataaagtatattagaaacctgaaagtacagaatctcaaccttacagtctttcccttagtcctgtggccttcctaagccagctgttaacgtgttgattccttccacttcccccaagtaggcaggcaacagatatgttgattgtcttagaaagtaatctggttcctctgaactccattgaattccagtttgacgcatactgcctggaaccagactgtttgcttacagctttttaagaaaaatctgccttgtctgcccccattatggttggtcttggtagctcctgggcactgtgggcgtgtaccatgggaaagtgattcaacacagtgaaggtgattgtctcctcaggcctcctgaagccacctgtgcggtgggacttcacgtgtctcggccaaggcgagcatttccacaatgccgtggatgctgcagtcaggccagattgaaccatgaccccatttttcacatgataccaattttgtcttaaaattcactgagaaaaatgagactaaattttttttaaccctcaggagcacctgaagcaaatatttatccgtatttattgaaaattcattttgtttctacttgaagctttaaccccttccattcctgcaagtgtgccttttgagagctcccatggcctagtgacttcactggtcaccttgtccatcttacttaagaattttagtctctccctaccctcttggacagagcttcctgttctcttatttcacaggttatgcagcagagcgggttttgtgttttcattcctatttccacccttcatttggttggtggactccacaacctcaccctaccctacactttgggagcacaaatttggtgttgaaacaagcttaaatttcattttagggcatactgggcttactctcctcccagctgtctgtggattgatttgattttaatgttcgagttttacagcaacagctgaaaaccatgaactattctaggaactgtgttggaactctttaaaataaagaaaagaggaggaggaggaggaagaaagaaaaccaacttaagaagccttgactttggaggacagaaagccaccagccaatggagaacaaagagatgtttccctttcctttctttcaccttgtcattctgggtttccttctgcttcactctttccttcccccttaaaagtggtattcctggttggtctgtctgtctgtccttgtccttgtggtgatcctggcatggtgatatgctccactttgcattatccatggtctcttaccagcgcacaagtcagtggggaggatctaaccacgcctggtggtgaggaagctgaatttccaggcctgcgtcccatgtagcctctccatgaactgcagaaggcatgttctgcatggttaccagtaagtggctccctctcaccgtgttcattgtcaaatgagagcaaactttaggtgttggctccattgtacactctacttgctctgctcccctccctccaaccagggttcatgtcagtgcacaccccatgtgccctggcgaagctggtgctgtgagtgatgtttcccatacaactcagggatgccaggtggcttaccctgagatagtcattttgggcacataacagtgtaggaatgaaacatggatttcattgatatttaaatctgtcaatttcattttttgttaatgttttcccctgatgactttttagcaatttaacaaataaaatggacaattgtcttaactgttttattagcaaaaaaagaa

SEQ ID NO: 307597 - DNA, 6407 bp, Homo sapiens
tcataaggctaaattatcgccaacacctttgctttggagtaaataatatcaatgatcttgatatgttgccttatgagataaaataaaagggactagagttacagtgtgagctaattttgtaatctttaatgtcacctaacctccatgaactttgataaaatggaaggattgcctttcagttttaaaattgtatttcctttctttgaatgaaaatcagataaatttggaattcctcaaagaaacttgtcttataggctgggcgcggtggctcatgcctgtaatctcagcactttggaaggccgaggcaggtggatcacgaggtcaggagttcaagaccagcctggccaagatggtgaaaccccatctctactaaaaataaaattagctgggcatggtggcaggtacctgtaatcccagctactcgggaggctgaagcaggagaatcacttgaacccaggaggcagaggttgcagtggccgagatcgtgccactgcactccaacctgggcgacagagtgagactccatctcaaaaaaagaaaaagaaaagaaacttgtataaaaatgataaaaacaggtaatagacacagttttaataatttgatggataagttaagtgtctggactgaagggtttgctctttctgtcttaggtgtagcccatcagtgttatcatggtttcatgaaggctgtccaggaaggaaacattcagtgggagagccgtacctatccttatcctggaaccccaatcactcagcgcttctcgcacagtgcatgctattatgatgctaatcagtctatgtatgtgtttggaggctgtacccagagcagctgcaatgctgctttcaatgacctctggagacttgacctaaacagcaaagagtggatccgacctttggcttcagggtcctatccttcccccaaagctggagcaactctggtcgtgtacaaggacttgctagtgctgtttggtggctggacgcggccaagcccttatcccctacaccagccagagagattctttgatgaaatacacacttactcaccctctaaaaattggtggaactgcattgtgacaacccatgggccacctcccatggctggccactcctcctgtgtgatagatgataaaatgattgtctttggtggctctttaggatcccggcaaatgagcaatgatgtctgggtccttgaccttgagcagtgggcgtggtccaagccgaacatctctggccccagtcctcatcctcgaggtggccaatctcagattgtcatagatgatgcaactatcttaatcctcggagggtgtggcggtcccaatgctctattcaaggatgcttggttgttgcacatgcattctggtccttgggcctggcagccactcaaggtagaaaatgaagagcatggggccccagaactgtggtgccatccagcttgccgggtgggacagtgtgtggtggtcttcagccaggctcctagtgggagagccccactcagccccagtttgaactctcgcccatcacctatcagtgccactcctccagctctcgttcctgaaacccgagagtaccgctctcagtctccagtaagaagcatggatgaagctccttgtgttaacggccgctggggaacactgagacccagggctcaaaggcagactccttcaggttcccgggaagggagcctttccccagccagaggagacggctctcctatcctcaatggtgggagtttgtctccaggaacggcagctgtgggtggctcttctttggacagtcctgtacaggccatatctccaagtactccatctgctcctgaaggatacgacctgaaaataggactttctttggccccccgacgaggatcactaccagatcagaaagatctgagattaggatccatagatctgaattgggatctgaaacccgcttccagtagtaatcccatggatggcatggacaataggacagttgggggaagtatgagacaccctcctgaacagacaaatggtgtgcataccccacctcacgtggccagtgcccttgcaggggccgtctccccaggtgccctgcgtcggagtctggaagccatcaaagcgatgtcctccaaaggcccctcggcctctgcagcactaagtcctcctcttgggtcttctccaggctctcctgggagccagagtttgagcagtggagaaacagtgcccatccctcgcccagggcctgcccaaggagatggacattccttacctcccattgctcgccgcctgggccaccaccctccacagtccctaaatgttggcaaacccctataccagagtatgaactgcaagcccatgcagatgtacgtgctggacattaaagacaccaaggagaaggggcgggtcaaatggaaagtatttaatagcagttctgtggttggacctcctgaaaccagcctgcataccgtggtacaaggcaggggtgaactcatcatatttggaggactcatggacaagaaacagaatgtgaagtactatccaaaaacaaacgccttgtactttgtacgagcaaagagataatgtgttctaaacccctttccttttctgtggcttttaatttggaattttccagtgtgtaagcatttggactgagaattgggaaaacaaaattactcccagaagccaaaactctttaattcccaaccgaagtcactccaggctgggatcaaatctccattaagaaaaaaaattatatataaatatatatatatatattatatagccaactctgttgacaaaaaaagggagagatttccatcctggttcagataaagttgttgctgtgttttaacaggggctgggctgcctttttctaccttgctggtaactagaccaagaagttagagaatagactaacatcagtaacttcccaaaagaaactgaagagccccctgtaaatctttatgtggccttcttggagttaaaaaatgaaagggcatatgtaagttgcaaaggtggagggttttagactctcatgcttcaggtgctgtcggggtaaaagtaactgtttttccccttctcttaaaaccacagaggacctgtgacagctctgcagaaatgccagtgcctggccccctcttgccttttatggctgaggaaagttacccaacaaaggattttattccacatttgtgtgccgggtcattgtgaaataatgtttatgcagccaacatctgaccgcctagtagtgtccattggtctttggagtgcttcttgtgtgtctcagaaaacattttgtgtctgattgtggaaatttctgacaatcaatcatatttggtggcaagttgccaaaaaacatatttattctcctctttcttcccttagaacatggtacttggaaactgccttttccattcacttacaggctgcttttttcttctaccttttttcttttcttttttttttttcatatgtggtgaagtcctaaaacctgtctgactttctgtttcttttacaaagctcaggtgcctacagaaatcagaagctgcttagaaatacttgtggaaccctttccctggtgtcactagggggccagtagggaattctaagatgccaatattgtgagaaatctttgaagcaagcatcaaaagatactgttttttccctatgggcttctttttacttccaaagcacattgagcacactcatcccatatttgtagaatgtggaaattgattctggaagggaattccaataacagttctttttagaaatgtttttttccttgtggtgacatatattcctcttcctggctattggcaggtgatggagttgagaatcatgtacttgacttcttgacgcatggctgacctcagaaacagctccatcctttgcacttgtcttcttcatgtgtcacccaaatagggcttgggtttttactttcacttcatttctgagattaaggtgtaaccaagtagagcatttctttgcttgatacagaaagttactagtctcaaccatggcctgggcataggagatgtcaaaataagtttatttcaaatggcaccatttaaatagggatttttggtgatttctcatcagtggaaagaggatttttgttttgcctttgttttgttttgaaatttaaatcctaatttcaaaacatcaccttgccaccctgacactcctctttttattattagcgtttctcaggcacaaagcctgctgcagctggccctgggtcctggctttcagccagcatctggcagcctaagtgtactgataagtgtgttttctcctgttacatcatgctgaatcctttcccttagccattagcttttatgatgtggtcttcgtaggaaagccaccctggtgccaagcctagcttgtggggaggggtatgtgttccagaaactgctctttgtgttcccttcaatgaggaaacaacatgtgtctacttatgtggcatccaactgcttggagctccacacttccctttcgcgactcaggctctggtgctgttgccaatccttgcttggcaaagactgttcgatcatgtggggtccttatttacaagggaaagctgggccagaaggctagcaattcaggtgttaccgctattgctgtaccttgtgttaggacattgtgtttgtgcatggactgtgcctccaaactcagtagttcctatctaaatataaagtatattagaaacctgaaagtacagaatctcaaccttacagtctttcccttagtcctgtggccttcctaagccagctgttaacgtgttgattccttccacttcccccaagtaggcaggcaacagatatgttgattgtcttagaaagtaatctggttcctctgaactccattgaattccagtttgacgcatactgcctggaaccagactgtttgcttacagctttttaagaaaaatctgccttgtctgcccccattatggttggtcttggtagctcctgggcactgtgggcgtgtaccatgggaaagtgattcaacacagtgaaggtgattgtctcctcaggcctcctgaagccacctgtgcggtgggacttcacgtgtctcggccaaggcgagcatttccacaatgccgtggatgctgcagtcaggccagattgaaccatgaccccatttttcacatgataccaattttgtcttaaaattcactgagaaaaatgagactaaattttttttaaccctcaggagcacctgaagcaaatatttatccgtatttattgaaaattcattttgtttctacttgaagctttaaccccttccattcctgcaagtgtgccttttgagagctcccatggcctagtgacttcactggtcaccttgtccatcttacttaagaattttagtctctccctaccctcttggacagagcttcctgttctcttatttcacaggttatgcagcagagcgggttttgtgttttcattcctatttccacccttcatttggttggtggactccacaacctcaccctaccctacactttgggagcacaaatttggtgttgaaacaagcttaaatttcattttagggcatactgggcttactctcctcccagctgtctgtggattgatttgattttaatgttcgagttttacagcaacagctgaaaaccatgaactattctaggaactgtgttggaactctttaaaataaagaaaagaggaggaggaggaggaagaaagaaaaccaacttaagaagccttgactttggaggacagaaagccaccagccaatggagaacaaagagatgtttccctttcctttctttcaccttgtcattctgggtttccttctgcttcactctttccttcccccttaaaagtggtattcctggttggtctgtctgtctgtccttgtccttgtggtgatcctggcatggtgatatgctccactttgcattatccatggtctcttaccagcgcacaagtcagtggggaggatctaaccacgcctggtggtgaggaagctgaatttccaggcctgcgtcccatgtagcctctccatgaactgcagaaggcatgttctgcatggttaccagtaagtggctccctctcaccgtgttcattgtcaaatgagagcaaactttaggtgttggctccattgtacactctacttgctctgctcccctccctccaaccagggttcatgtcagtgcacaccccatgtgccctggcgaagctggtgctgtgagtgatgtttcccatacaactcagggatgccaggtggcttaccctgagatagtcattttgggcacataacagtgtaggaatgaaacatggatttcattgatatttaaatctgtcaatttcattttttgttaatgttttcccctgatgactttttagcaatttaacaaataaaatggacaattgtcttaactgttttattagcaaaaaaagaa

SEQ ID NO: 307598 - DNA, 6303 bp, Homo sapiens
ctggctaatttttgtattttagtagagatgggatttcgccatgttgcccacgctggtctcgaactcctgacctaaggtgatctgccggcctcagaatcccaaagtgctgggactacaggtgtgagccactgcacccaaccaagaactactatattttctgttgagtggaatgtcatggccagctcctcggacagtgaagatgacagtttcatggctgtggaccaggaagaaactgtgctggaagggacaatggatcaagatgaggagccccacccagtattggaggctgaggagactagacataataggtccatgtcggagctgccagaagaggttttggagtatatcctgtcctttctctcaccgtatcaggaacacaaaactgcggcccttgtctgcaaacagtggtatcgacttatcaaagatggaacctcactccatcacccaggctggagttcagtggcgcagtctcagctcattgcaacctccacctcctgggttcaaggaattctcctgcttccacctcccaagtagctgggattacaggtgtagcccatcagtgttatcatggtttcatgaaggctgtccaggaaggaaacattcagtgggagagccgtacctatccttatcctggaaccccaatcactcagcgcttctcgcacagtgcatgctattatgatgctaatcagtctatgtatgtgtttggaggctgtacccagagcagctgcaatgctgctttcaatgacctctggagacttgacctaaacagcaaagagtggatccgacctttggcttcagggtcctatccttcccccaaagctggagcaactctggtcgtgtacaaggacttgctagtgctgtttggtggctggacgcggccaagcccttatcccctacaccagccagagagattctttgatgaaatacacacttactcaccctctaaaaattggtggaactgcattgtgacaacccatgggccacctcccatggctggccactcctcctgtgtgatagatgataaaatgattgtctttggtggctctttaggatcccggcaaatgagcaatgatgtctgggtccttgaccttgagcagtgggcgtggtccaagccgaacatctctggccccagtcctcatcctcgaggtggccaatctcagattgtcatagatgatgcaactatcttaatcctcggagggtgtggcggtcccaatgctctattcaaggatgcttggttgttgcacatgcattctggtccttgggcctggcagccactcaaggtagaaaatgaagagcatggggccccagaactgtggtgccatccagcttgccgggtgggacagtgtgtggtggtcttcagccaggctcctagtgggagagccccactcagccccagtttgaactctcgcccatcacctatcagtgccactcctccagctctcgttcctgaaacccgagagtaccgctctcagtctccagtaagaagcatggatgaagctccttgtgttaacggccgctggggaacactgagacccagggctcaaaggcagactccttcaggttcccgggaagggagcctttccccagccagaggagacggctctcctatcctcaatggtgggagtttgtctccaggaacggcagctgtgggtggctcttctttggacagtcctgtacaggccatatctccaagtactccatctgctcctgaaggatacgacctgaaaataggactttctttggccccccgacgaggatcactaccagatcagaaagatctgagattaggatccatagatctgaattgggatctgaaacccgcttccagtagtaatcccatggatggcatggacaataggacagttgggggaagtatgagacaccctcctgaacagacaaatggtgtgcataccccacctcacgtggccagtgcccttgcaggggccgtctccccaggtgccctgcgtcggagtctggaagccatcaaagcgatgtcctccaaaggcccctcggcctctgcagcactaagtcctcctcttgggtcttctccaggctctcctgggagccagagtttgagcagtggagaaacagtgcccatccctcgcccagggcctgcccaaggagatggacattccttacctcccattgctcgccgcctgggccaccaccctccacagtccctaaatgttggcaaacccctataccagagtatgaactgcaagcccatgcagatgtacgtgctggacattaaagacaccaaggagaaggggcgggtcaaatggaaagtatttaatagcagttctgtggttggacctcctgaaaccagcctgcataccgtggtacaaggcaggggtgaactcatcatatttggaggactcatggacaagaaacagaatgtgaagtactatccaaaaacaaacgccttgtactttgtacgagcaaagagataatgtgttctaaacccctttccttttctgtggcttttaatttggaattttccagtgtgtaagcatttggactgagaattgggaaaacaaaattactcccagaagccaaaactctttaattcccaaccgaagtcactccaggctgggatcaaatctccattaagaaaaaaaattatatataaatatatatatatatattatatagccaactctgttgacaaaaaaagggagagatttccatcctggttcagataaagttgttgctgtgttttaacaggggctgggctgcctttttctaccttgctggtaactagaccaagaagttagagaatagactaacatcagtaacttcccaaaagaaactgaagagccccctgtaaatctttatgtggccttcttggagttaaaaaatgaaagggcatatgtaagttgcaaaggtggagggttttagactctcatgcttcaggtgctgtcggggtaaaagtaactgtttttccccttctcttaaaaccacagaggacctgtgacagctctgcagaaatgccagtgcctggccccctcttgccttttatggctgaggaaagttacccaacaaaggattttattccacatttgtgtgccgggtcattgtgaaataatgtttatgcagccaacatctgaccgcctagtagtgtccattggtctttggagtgcttcttgtgtgtctcagaaaacattttgtgtctgattgtggaaatttctgacaatcaatcatatttggtggcaagttgccaaaaaacatatttattctcctctttcttcccttagaacatggtacttggaaactgccttttccattcacttacaggctgcttttttcttctaccttttttcttttcttttttttttttcatatgtggtgaagtcctaaaacctgtctgactttctgtttcttttacaaagctcaggtgcctacagaaatcagaagctgcttagaaatacttgtggaaccctttccctggtgtcactagggggccagtagggaattctaagatgccaatattgtgagaaatctttgaagcaagcatcaaaagatactgttttttccctatgggcttctttttacttccaaagcacattgagcacactcatcccatatttgtagaatgtggaaattgattctggaagggaattccaataacagttctttttagaaatgtttttttccttgtggtgacatatattcctcttcctggctattggcaggtgatggagttgagaatcatgtacttgacttcttgacgcatggctgacctcagaaacagctccatcctttgcacttgtcttcttcatgtgtcacccaaatagggcttgggtttttactttcacttcatttctgagattaaggtgtaaccaagtagagcatttctttgcttgatacagaaagttactagtctcaaccatggcctgggcataggagatgtcaaaataagtttatttcaaatggcaccatttaaatagggatttttggtgatttctcatcagtggaaagaggatttttgttttgcctttgttttgttttgaaatttaaatcctaatttcaaaacatcaccttgccaccctgacactcctctttttattattagcgtttctcaggcacaaagcctgctgcagctggccctgggtcctggctttcagccagcatctggcagcctaagtgtactgataagtgtgttttctcctgttacatcatgctgaatcctttcccttagccattagcttttatgatgtggtcttcgtaggaaagccaccctggtgccaagcctagcttgtggggaggggtatgtgttccagaaactgctctttgtgttcccttcaatgaggaaacaacatgtgtctacttatgtggcatccaactgcttggagctccacacttccctttcgcgactcaggctctggtgctgttgccaatccttgcttggcaaagactgttcgatcatgtggggtccttatttacaagggaaagctgggccagaaggctagcaattcaggtgttaccgctattgctgtaccttgtgttaggacattgtgtttgtgcatggactgtgcctccaaactcagtagttcctatctaaatataaagtatattagaaacctgaaagtacagaatctcaaccttacagtctttcccttagtcctgtggccttcctaagccagctgttaacgtgttgattccttccacttcccccaagtaggcaggcaacagatatgttgattgtcttagaaagtaatctggttcctctgaactccattgaattccagtttgacgcatactgcctggaaccagactgtttgcttacagctttttaagaaaaatctgccttgtctgcccccattatggttggtcttggtagctcctgggcactgtgggcgtgtaccatgggaaagtgattcaacacagtgaaggtgattgtctcctcaggcctcctgaagccacctgtgcggtgggacttcacgtgtctcggccaaggcgagcatttccacaatgccgtggatgctgcagtcaggccagattgaaccatgaccccatttttcacatgataccaattttgtcttaaaattcactgagaaaaatgagactaaattttttttaaccctcaggagcacctgaagcaaatatttatccgtatttattgaaaattcattttgtttctacttgaagctttaaccccttccattcctgcaagtgtgccttttgagagctcccatggcctagtgacttcactggtcaccttgtccatcttacttaagaattttagtctctccctaccctcttggacagagcttcctgttctcttatttcacaggttatgcagcagagcgggttttgtgttttcattcctatttccacccttcatttggttggtggactccacaacctcaccctaccctacactttgggagcacaaatttggtgttgaaacaagcttaaatttcattttagggcatactgggcttactctcctcccagctgtctgtggattgatttgattttaatgttcgagttttacagcaacagctgaaaaccatgaactattctaggaactgtgttggaactctttaaaataaagaaaagaggaggaggaggaggaagaaagaaaaccaacttaagaagccttgactttggaggacagaaagccaccagccaatggagaacaaagagatgtttccctttcctttctttcaccttgtcattctgggtttccttctgcttcactctttccttcccccttaaaagtggtattcctggttggtctgtctgtctgtccttgtccttgtggtgatcctggcatggtgatatgctccactttgcattatccatggtctcttaccagcgcacaagtcagtggggaggatctaaccacgcctggtggtgaggaagctgaatttccaggcctgcgtcccatgtagcctctccatgaactgcagaaggcatgttctgcatggttaccagtaagtggctccctctcaccgtgttcattgtcaaatgagagcaaactttaggtgttggctccattgtacactctacttgctctgctcccctccctccaaccagggttcatgtcagtgcacaccccatgtgccctggcgaagctggtgctgtgagtgatgtttcccatacaactcagggatgccaggtggcttaccctgagatagtcattttgggcacataacagtgtaggaatgaaacatggatttcattgatatttaaatctgtcaatttcattttttgttaatgttttcccctgatgactttttagcaatttaacaaataaaatggacaattgtcttaactgttttattagcaaaaaaagaa

SEQ ID NO: 307599 - DNA, 6131 bp, Homo sapiens
  misc_feature (25)..(25): n is a, c, g, or t
agcgggtcttctcccggcctgagcngcagcagctgcggcggcggcggcgtttgagtggaggaagatggcggctccgggcggctcggggtcccgccagctgtgaggagccccgagcacggctgtcgcggcctgaggcagagcgcctctgctctggccctgtccctggctccctcattaccgtcgccagcggagcgaacccgagagcgtggagcgggctgggccagctgttgagtggaatgtcatggccagctcctcggacagtgaagatgacagtttcatggctgtggaccaggaagaaactgtgctggaagggacaatggatcaagatgaggagccccacccagtattggaggctgaggagactagacataataggtccatgtcggagctgccagaagaggttttggagtatatcctgtcctttctctcaccgtatcaggaacacaaaactgcggcccttgtctgcaaacagtggtatcgacttatcaaaggtgcatgctattatgatgctaatcagtctatgtatgtgtttggaggctgtacccagagcagctgcaatgctgctttcaatgacctctggagacttgacctaaacagcaaagagtggatccgacctttggcttcagggtcctatccttcccccaaagctggagcaactctggtcgtgtacaaggacttgctagtgctgtttggtggctggacgcggccaagcccttatcccctacaccagccagagagattctttgatgaaatacacacttactcaccctctaaaaattggtggaactgcattgtgacaacccatgggccacctcccatggctggccactcctcctgtgtgatagatgataaaatgattgtctttggtggctctttaggatcccggcaaatgagcaatgatgtctgggtccttgaccttgagcagtgggcgtggtccaagccgaacatctctggccccagtcctcatcctcgaggtggccaatctcagattgtcatagatgatgcaactatcttaatcctcggagggtgtggcggtcccaatgctctattcaaggatgcttggttgttgcacatgcattctggtccttgggcctggcagccactcaaggtagaaaatgaagagcatggggccccagaactgtggtgccatccagcttgccgggtgggacagtgtgtggtggtcttcagccaggctcctagtgggagagccccactcagccccagtttgaactctcgcccatcacctatcagtgccactcctccagctctcgttcctgaaacccgagagtaccgctctcagtctccagtaagaagcatggatgaagctccttgtgttaacggccgctggggaacactgagacccagggctcaaaggcagactccttcaggttcccgggaagggagcctttccccagccagaggagacggctctcctatcctcaatggtgggagtttgtctccaggaacggcagctgtgggtggctcttctttggacagtcctgtacaggccatatctccaagtactccatctgctcctgaaggatacgacctgaaaataggactttctttggccccccgacgaggatcactaccagatcagaaagatctgagattaggatccatagatctgaattgggatctgaaacccgcttccagtagtaatcccatggatggcatggacaataggacagttgggggaagtatgagacaccctcctgaacagacaaatggtgtgcataccccacctcacgtggccagtgcccttgcaggggccgtctccccaggtgccctgcgtcggagtctggaagccatcaaagcgatgtcctccaaaggcccctcggcctctgcagcactaagtcctcctcttgggtcttctccaggctctcctgggagccagagtttgagcagtggagaaacagtgcccatccctcgcccagggcctgcccaaggagatggacattccttacctcccattgctcgccgcctgggccaccaccctccacagtccctaaatgttggcaaacccctataccagagtatgaactgcaagcccatgcagatgtacgtgctggacattaaagacaccaaggagaaggggcgggtcaaatggaaagtatttaatagcagttctgtggttggacctcctgaaaccagcctgcataccgtggtacaaggcaggggtgaactcatcatatttggaggactcatggacaagaaacagaatgtgaagtactatccaaaaacaaacgccttgtactttgtacgagcaaagagataatgtgttctaaacccctttccttttctgtggcttttaatttggaattttccagtgtgtaagcatttggactgagaattgggaaaacaaaattactcccagaagccaaaactctttaattcccaaccgaagtcactccaggctgggatcaaatctccattaagaaaaaaaattatatataaatatatatatatatattatatagccaactctgttgacaaaaaaagggagagatttccatcctggttcagataaagttgttgctgtgttttaacaggggctgggctgcctttttctaccttgctggtaactagaccaagaagttagagaatagactaacatcagtaacttcccaaaagaaactgaagagccccctgtaaatctttatgtggccttcttggagttaaaaaatgaaagggcatatgtaagttgcaaaggtggagggttttagactctcatgcttcaggtgctgtcggggtaaaagtaactgtttttccccttctcttaaaaccacagaggacctgtgacagctctgcagaaatgccagtgcctggccccctcttgccttttatggctgaggaaagttacccaacaaaggattttattccacatttgtgtgccgggtcattgtgaaataatgtttatgcagccaacatctgaccgcctagtagtgtccattggtctttggagtgcttcttgtgtgtctcagaaaacattttgtgtctgattgtggaaatttctgacaatcaatcatatttggtggcaagttgccaaaaaacatatttattctcctctttcttcccttagaacatggtacttggaaactgccttttccattcacttacaggctgcttttttcttctaccttttttcttttcttttttttttttcatatgtggtgaagtcctaaaacctgtctgactttctgtttcttttacaaagctcaggtgcctacagaaatcagaagctgcttagaaatacttgtggaaccctttccctggtgtcactagggggccagtagggaattctaagatgccaatattgtgagaaatctttgaagcaagcatcaaaagatactgttttttccctatgggcttctttttacttccaaagcacattgagcacactcatcccatatttgtagaatgtggaaattgattctggaagggaattccaataacagttctttttagaaatgtttttttccttgtggtgacatatattcctcttcctggctattggcaggtgatggagttgagaatcatgtacttgacttcttgacgcatggctgacctcagaaacagctccatcctttgcacttgtcttcttcatgtgtcacccaaatagggcttgggtttttactttcacttcatttctgagattaaggtgtaaccaagtagagcatttctttgcttgatacagaaagttactagtctcaaccatggcctgggcataggagatgtcaaaataagtttatttcaaatggcaccatttaaatagggatttttggtgatttctcatcagtggaaagaggatttttgttttgcctttgttttgttttgaaatttaaatcctaatttcaaaacatcaccttgccaccctgacactcctctttttattattagcgtttctcaggcacaaagcctgctgcagctggccctgggtcctggctttcagccagcatctggcagcctaagtgtactgataagtgtgttttctcctgttacatcatgctgaatcctttcccttagccattagcttttatgatgtggtcttcgtaggaaagccaccctggtgccaagcctagcttgtggggaggggtatgtgttccagaaactgctctttgtgttcccttcaatgaggaaacaacatgtgtctacttatgtggcatccaactgcttggagctccacacttccctttcgcgactcaggctctggtgctgttgccaatccttgcttggcaaagactgttcgatcatgtggggtccttatttacaagggaaagctgggccagaaggctagcaattcaggtgttaccgctattgctgtaccttgtgttaggacattgtgtttgtgcatggactgtgcctccaaactcagtagttcctatctaaatataaagtatattagaaacctgaaagtacagaatctcaaccttacagtctttcccttagtcctgtggccttcctaagccagctgttaacgtgttgattccttccacttcccccaagtaggcaggcaacagatatgttgattgtcttagaaagtaatctggttcctctgaactccattgaattccagtttgacgcatactgcctggaaccagactgtttgcttacagctttttaagaaaaatctgccttgtctgcccccattatggttggtcttggtagctcctgggcactgtgggcgtgtaccatgggaaagtgattcaacacagtgaaggtgattgtctcctcaggcctcctgaagccacctgtgcggtgggacttcacgtgtctcggccaaggcgagcatttccacaatgccgtggatgctgcagtcaggccagattgaaccatgaccccatttttcacatgataccaattttgtcttaaaattcactgagaaaaatgagactaaattttttttaaccctcaggagcacctgaagcaaatatttatccgtatttattgaaaattcattttgtttctacttgaagctttaaccccttccattcctgcaagtgtgccttttgagagctcccatggcctagtgacttcactggtcaccttgtccatcttacttaagaattttagtctctccctaccctcttggacagagcttcctgttctcttatttcacaggttatgcagcagagcgggttttgtgttttcattcctatttccacccttcatttggttggtggactccacaacctcaccctaccctacactttgggagcacaaatttggtgttgaaacaagcttaaatttcattttagggcatactgggcttactctcctcccagctgtctgtggattgatttgattttaatgttcgagttttacagcaacagctgaaaaccatgaactattctaggaactgtgttggaactctttaaaataaagaaaagaggaggaggaggaggaagaaagaaaaccaacttaagaagccttgactttggaggacagaaagccaccagccaatggagaacaaagagatgtttccctttcctttctttcaccttgtcattctgggtttccttctgcttcactctttccttcccccttaaaagtggtattcctggttggtctgtctgtctgtccttgtccttgtggtgatcctggcatggtgatatgctccactttgcattatccatggtctcttaccagcgcacaagtcagtggggaggatctaaccacgcctggtggtgaggaagctgaatttccaggcctgcgtcccatgtagcctctccatgaactgcagaaggcatgttctgcatggttaccagtaagtggctccctctcaccgtgttcattgtcaaatgagagcaaactttaggtgttggctccattgtacactctacttgctctgctcccctccctccaaccagggttcatgtcagtgcacaccccatgtgccctggcgaagctggtgctgtgagtgatgtttcccatacaactcagggatgccaggtggcttaccctgagatagtcattttgggcacataacagtgtaggaatgaaacatggatttcattgatatttaaatctgtcaatttcattttttgttaatgttttcccctgatgactttttagcaatttaacaaataaaatggacaattgtcttaactgttttattagcaaaaaaagaa

SEQ ID NO: 307600 - DNA, 5637 bp, Homo sapiens
  misc_feature (25)..(25): n is a, c, g, or t
  misc_feature (5608)..(5608): n is a, c, g, or t
  misc_feature (5621)..(5621): n is a, c, g, or t
  misc_feature (5633)..(5633): n is a, c, g, or t
agcgggtcttctcccggcctgagcngcagcagctgcggcggcggcggcgtttgagtggaggaagatggcggctccgggcggctcggggtcccgccagctgtgaggagccccgagcacggctgtcgcggcctgaggcagagcgcctctgctctggccctgtccctggctccctcattaccgtcgccagcggagcgaacccgagagcgtggagcgggctgggccagagatgggatttcgccatgttgcccacgctggtctcgaactcctgacctaaggtgatctgccggcctcagaatcccaaagtgctgggactacaggtgtgagccactgcacccaaccaagaactactatattttctgttgagtggaatgtcatggccagctcctcggacagtgaagatgacagtttcatggctgtggaccaggaagaaactgtgctggaagggacaatggatcaagatgaggagccccacccagtattggaggctgaggagactagacataataggtccatgtcggagctgccagaagaggttttggagtatatcctgtcctttctctcaccgtatcaggaacacaaaactgcggcccttgtctgcaaacagtggtatcgacttatcaaaggtgtagcccatcagtgttatcatggtttcatgaaggctgtccaggaaggaaacattcagtgggagagccgtacctatccttatcctggaaccccaatcactcagcgcttctcgcacagtgcatgctattatgatgctaatcagtctatgtatgtgtttggaggctgtacccagagcagctgcaatgctgctttcaatgacctctggagacttgacctaaacagcaaagagtggatccgacctttggcttcagggtcctatccttcccccaaagctggagcaactctggtcgtgtacaaggacttgctagtgctgtttggtggctggacgcggccaagcccttatcccctacaccagccagagagattctttgatgaaatacacacttactcaccctctaaaaattggtggaactgcattgtgacaacccatgggccacctcccatggctggccactcctcctgtgtgatagatgataaaatgattgtctttggtggctctttaggatcccggcaaatgagcaatgatgtctgggtccttgaccttgagcagtgggcgtggtccaagccgaacatctctggccccagtcctcatcctcgaggtggccaatctcagattgtcatagatgatgcaactatcttaatcctcggagggtgtggcggtcccaatgctctattcaaggatgcttggttgttgcacatgcattctggtccttgggcctggcagccactcaaggtagaaaatgaagagcatggggccccagaactgtggtgccatccagcttgccgggtgggacagtgtgtggtggtcttcagccaggctcctagtgggagagccccactcagccccagtttgaactctcgcccatcacctatcagtgccactcctccagctctcgttcctgaaacccgagagtaccgctctcagtctccagtaagaagcatggatgaagctccttgtgttaacggccgctggggaacactgagacccagggctcaaaggcagactccttcaggttcccgggaagggagcctttccccagccagaggagacggctctcctatcctcaatggtgggagtttgtctccaggaacggcagctgtgggtggctcttctttggacagtcctgtacaggccatatctccaagtactccatctgctcctgaaggatacgacctgaaaataggactttctttggccccccgacgaggatcactaccagatcagaaagatctgagattaggatccatagatctgaattgggatctgaaacccgcttccagtagtaatcccatggatggcatggacaataggacagttgggggaagtatgagacaccctcctgaacagacaaatggtgtgcataccccacctcacgtggccagtgcccttgcaggggccgtctccccaggtgccctgcgtcggagtctggaagccatcaaagcgatgtcctccaaaggcccctcggcctctgcagcactaagtcctcctcttgggtcttctccaggctctcctgggagccagagtttgagcagtggagaaacagtgcccatccctcgcccagggcctgcccaaggagatggacattccttacctcccattgctcgccgcctgggccaccaccctccacagtccctaaatgttggcaaacccctataccagagtatgaactgcaagcccatgcagatgtacgtgctggacattaaagacaccaaggagaaggggcgggtcaaatggaaagtatttaatagcagttctgtggttggacctcctgaaaccagcctgcataccgtggtacaaggcaggggtgaactcatcatatttggaggactcatggacaagaaacagaatgtgaagtactatccaaaaacaaacgccttgtactttgtacgagcaaagagataatgtgttctaaacccctttccttttctgtggcttttaatttggaattttccagtgtgtaagcatttggactgagaattgggaaaacaaaattactcccagaagccaaaactctttaattcccaaccgaagtcactccaggctgggatcaaatctccattaagaaaaaaaattatatataaatatatatatatatattatatagccaactctgttgacaaaaaaagggagagatttccatcctggttcagataaagttgttgctgtgttttaacaggggctgggctgcctttttctaccttgctggtaactagaccaagaagttagagaatagactaacatcagtaacttcccaaaagaaactgaagagccccctgtaaatctttatgtggccttcttggagttaaaaaatgaaagggcatatgtaagttgcaaaggtggagggttttagactctcatgcttcaggtgctgtcggggtaaaagtaactgtttttccccttctcttaaaaccacagaggacctgtgacagctctgcagaaatgccagtgcctggccccctcttgccttttatggctgaggaaagttacccaacaaaggattttattccacatttgtgtgccgggtcattgtgaaataatgtttatgcagccaacatctgaccgcctagtagtgtccattggtctttggagtgcttcttgtgtgtctcagaaaacattttgtgtctgattgtggaaatttctgacaatcaatcatatttggtggcaagttgccaaaaaacatatttattctcctctttcttcccttagaacatggtacttggaaactgccttttccattcacttacaggctgcttttttcttctaccttttttcttttcttttttttttttcatatgtggtgaagtcctaaaacctgtctgactttctgtttcttttacaaagctcaggtgcctacagaaatcagaagctgcttagaaatacttgtggaaccctttccctggtgtcactagggggccagtagggaattctaagatgccaatattgtgagaaatctttgaagcaagcatcaaaagatactgttttttccctatgggcttctttttacttccaaagcacattgagcacactcatcccatatttgtagaatgtggaaattgattctggaagggaattccaataacagttctttttagaaatgtttttttccttgtggtgacatatattcctcttcctggctattggcaggtgatggagttgagaatcatgtacttgacttcttgacgcatggctgacctcagaaacagctccatcctttgcacttgtcttcttcatgtgtcacccaaatagggcttgggtttttactttcacttcatttctgagattaaggtgtaaccaagtagagcatttctttgcttgatacagaaagttactagtctcaaccatggcctgggcataggagatgtcaaaataagtttatttcaaatggcaccatttaaatagggatttttggtgatttctcatcagtggaaagaggatttttgttttgcctttgttttgttttgaaatttaaatcctaatttcaaaacatcaccttgccaccctgacactcctctttttattattagcgtttctcaggcacaaagcctgctgcagctggccctgggtcctggctttcagccagcatctggcagcctaagtgtactgataagtgtgttttctcctgttacatcatgctgaatcctttcccttagccattagcttttatgatgtggtcttcgtaggaaagccaccctggtgccaagcctagcttgtggggaggggtatgtgttccagaaactgctctttgtgttcccttcaatgaggaaacaacatgtgtctacttatgtggcatccaactgcttggagctccacacttccctttcgcgactcaggctctggtgctgttgccaatccttgcttggcaaagactgttcgatcatgtggggtccttatttacaagggaaagctgggccagaaggctagcaattcaggtgttaccgctattgctgtaccttgtgttaggacattgtgtttgtgcatggactgtgcctccaaactcagtagttcctatctaaatataaagtatattagaaacctgaaagtacagaatctcaaccttacagtctttcccttagtcctgtggccttcctaagccagctgttaacgtgttgattccttccacttcccccaagtaggcaggcaacagatatgttgattgtcttagaaagtaatctggttcctctgaactccattgaattccagtttgacgcatactgcctggaaccagactgtttgcttacagctttttaagaaaaatctgccttgtctgcccccattatggttggtcttggtagctcctgggcactgtgggcgtgtaccatgggaaagtgattcaacacagtgaaggtgattgtctcctcaggcctcctgaagccacctgtgcggtgggacttcacgtgtctcggccaaggcgagcatttccacaatgccgtggatgctgcagtcaggccagattgaaccatgaccccatttttcacatgataccaattttgtcttaaaattcactgagaaaaatgagactaaattttttttaaccctcaggagcacctgaagcaaatatttatccgtatttattgaaaattcattttgtttctacttgaagctttaaccccttccattcctgcaagtgtgccttttgagagctcccatggcctagtgacttcactggtcaccttgtccatcttacttaagaattttagtctctccctaccctcttggacagagcttcctgttctcttatttcacaggttatgcagcagagcgggttttgtgttttcattcctatttccacccttcatttggttggtggactccacaacctcaccctaccctacactttgggagcacaaatttggtgttgaaacaagcttaaatttcattttagggcatactgggcttactctcctcccagctgtctgtggattgatttgattttaatgttcgagttttacagcaacagctgaaaaccatgaactattcttggtnaagtggcagacgngatcctctagancact

SEQ ID NO: 307601 - DNA, 6433 bp, Homo sapiens
  misc_feature (25)..(25): n is a, c, g, or t
agcgggtcttctcccggcctgagcngcagcagctgcggcggcggcggcgtttgagtggaggaagatggcggctccgggcggctcggggtcccgccagctgtgaggagccccgagcacggctgtcgcggcctgaggcagagcgcctctgctctggccctgtccctggctccctcattaccgtcgccagcggagcgaacccgagagcgtggagcgggctgggccagagatgggatttcgccatgttgcccacgctggtctcgaactcctgacctaaggtgatctgccggcctcagaatcccaaagtgctgggactacaggtgtgagccactgcacccaaccaagaactactatattttctgttgagtggaatgtcatggccagctcctcggacagtgaagatgacagtttcatggctgtggaccaggaagaaactgtgctggaagggacaatggatcaagatgaggagccccacccagtattggaggctgaggagactagacataataggtccatgtcggagctgccagaagaggttttggagtatatcctgtcctttctctcaccgtatcaggaacacaaaactgcggcccttgtctgcaaacagtggtatcgacttatcaaaggtgtagcccatcagtgttatcatggtttcatgaaggctgtccaggaaggaaacattcagtgggagagccgtacctatccttatcctggaaccccaatcactcagcgcttctcgcacagtgcatgctattatgatgctaatcagtctatgtatgtgtttggaggctgtacccagagcagctgcaatgctgctttcaatgacctctggagacttgacctaaacagcaaagagtggatccgacctttggcttcagggtcctatccttcccccaaagctggagcaactctggtcgtgtacaaggacttgctagtgctgtttggtggctggacgcggccaagcccttatcccctacaccagccagagagattctttgatgaaatacacacttactcaccctctaaaaattggtggaactgcattgtgacaacccatgggccacctcccatggctggccactcctcctgtgtgatagatgataaaatgattgtctttggtggctctttaggatcccggcaaatgagcaatgatgtctgggtccttgaccttgagcagtgggcgtggtccaagccgaacatctctggccccagtcctcatcctcgaggtggccaatctcagattgtcatagatgatgcaactatcttaatcctcggagggtgtggcggtcccaatgctctattcaaggatgcttggttgttgcacatgcattctggtccttgggcctggcagccactcaaggtagaaaatgaagagcatggggccccagaactgtggtgccatccagcttgccgggtgggacagtgtgtggtggtcttcagccaggctcctagtgggagagccccactcagccccagtttgaactctcgcccatcacctatcagtgccactcctccagctctcgttcctgaaacccgagagtaccgctctcagtctccagtaagaagcatggatgaagctccttgtgttaacggccgctggggaacactgagacccagggctcaaaggcagactccttcaggttcccgggaagggagcctttccccagccagaggagacggctctcctatcctcaatggtgggagtttgtctccaggaacggcagctgtgggtggctcttctttggacagtcctgtacaggccatatctccaagtactccatctgctcctgaaggatacgacctgaaaataggactttctttggccccccgacgaggatcactaccagatcagaaagatctgagattaggatccatagatctgaattgggatctgaaacccgcttccagtagtaatcccatggatggcatggacaataggacagttgggggaagtatgagacaccctcctgaacagacaaatggtgtgcataccccacctcacgtggccagtgcccttgcaggggccgtctccccaggtgccctgcgtcggagtctggaagccatcaaagcgatgtcctccaaaggcccctcggcctctgcagcactaagtcctcctcttgggtcttctccaggctctcctgggagccagagtttgagcagtggagaaacagtgcccatccctcgcccagggcctgcccaaggagatggacattccttacctcccattgctcgccgcctgggccaccaccctccacagtccctaaatgttggcaaacccctataccagagtatgaactgcaagcccatgcagatgtacgtgctggacattaaagacaccaaggagaaggggcgggtcaaatggaaagtatttaatagcagttctgtggttggacctcctgaaaccagcctgcataccgtggtacaaggcaggggtgaactcatcatatttggaggactcatggacaagaaacagaatgtgaagtactatccaaaaacaaacgccttgtactttgtacgagcaaagagataatgtgttctaaacccctttccttttctgtggcttttaatttggaattttccagtgtgtaagcatttggactgagaattgggaaaacaaaattactcccagaagccaaaactctttaattcccaaccgaagtcactccaggctgggatcaaatctccattaagaaaaaaaattatatataaatatatatatatatattatatagccaactctgttgacaaaaaaagggagagatttccatcctggttcagataaagttgttgctgtgttttaacaggggctgggctgcctttttctaccttgctggtaactagaccaagaagttagagaatagactaacatcagtaacttcccaaaagaaactgaagagccccctgtaaatctttatgtggccttcttggagttaaaaaatgaaagggcatatgtaagttgcaaaggtggagggttttagactctcatgcttcaggtgctgtcggggtaaaagtaactgtttttccccttctcttaaaaccacagaggacctgtgacagctctgcagaaatgccagtgcctggccccctcttgccttttatggctgaggaaagttacccaacaaaggattttattccacatttgtgtgccgggtcattgtgaaataatgtttatgcagccaacatctgaccgcctagtagtgtccattggtctttggagtgcttcttgtgtgtctcagaaaacattttgtgtctgattgtggaaatttctgacaatcaatcatatttggtggcaagttgccaaaaaacatatttattctcctctttcttcccttagaacatggtacttggaaactgccttttccattcacttacaggctgcttttttcttctaccttttttcttttcttttttttttttcatatgtggtgaagtcctaaaacctgtctgactttctgtttcttttacaaagctcaggtgcctacagaaatcagaagctgcttagaaatacttgtggaaccctttccctggtgtcactagggggccagtagggaattctaagatgccaatattgtgagaaatctttgaagcaagcatcaaaagatactgttttttccctatgggcttctttttacttccaaagcacattgagcacactcatcccatatttgtagaatgtggaaattgattctggaagggaattccaataacagttctttttagaaatgtttttttccttgtggtgacatatattcctcttcctggctattggcaggtgatggagttgagaatcatgtacttgacttcttgacgcatggctgacctcagaaacagctccatcctttgcacttgtcttcttcatgtgtcacccaaatagggcttgggtttttactttcacttcatttctgagattaaggtgtaaccaagtagagcatttctttgcttgatacagaaagttactagtctcaaccatggcctgggcataggagatgtcaaaataagtttatttcaaatggcaccatttaaatagggatttttggtgatttctcatcagtggaaagaggatttttgttttgcctttgttttgttttgaaatttaaatcctaatttcaaaacatcaccttgccaccctgacactcctctttttattattagcgtttctcaggcacaaagcctgctgcagctggccctgggtcctggctttcagccagcatctggcagcctaagtgtactgataagtgtgttttctcctgttacatcatgctgaatcctttcccttagccattagcttttatgatgtggtcttcgtaggaaagccaccctggtgccaagcctagcttgtggggaggggtatgtgttccagaaactgctctttgtgttcccttcaatgaggaaacaacatgtgtctacttatgtggcatccaactgcttggagctccacacttccctttcgcgactcaggctctggtgctgttgccaatccttgcttggcaaagactgttcgatcatgtggggtccttatttacaagggaaagctgggccagaaggctagcaattcaggtgttaccgctattgctgtaccttgtgttaggacattgtgtttgtgcatggactgtgcctccaaactcagtagttcctatctaaatataaagtatattagaaacctgaaagtacagaatctcaaccttacagtctttcccttagtcctgtggccttcctaagccagctgttaacgtgttgattccttccacttcccccaagtaggcaggcaacagatatgttgattgtcttagaaagtaatctggttcctctgaactccattgaattccagtttgacgcatactgcctggaaccagactgtttgcttacagctttttaagaaaaatctgccttgtctgcccccattatggttggtcttggtagctcctgggcactgtgggcgtgtaccatgggaaagtgattcaacacagtgaaggtgattgtctcctcaggcctcctgaagccacctgtgcggtgggacttcacgtgtctcggccaaggcgagcatttccacaatgccgtggatgctgcagtcaggccagattgaaccatgaccccatttttcacatgataccaattttgtcttaaaattcactgagaaaaatgagactaaattttttttaaccctcaggagcacctgaagcaaatatttatccgtatttattgaaaattcattttgtttctacttgaagctttaaccccttccattcctgcaagtgtgccttttgagagctcccatggcctagtgacttcactggtcaccttgtccatcttacttaagaattttagtctctccctaccctcttggacagagcttcctgttctcttatttcacaggttatgcagcagagcgggttttgtgttttcattcctatttccacccttcatttggttggtggactccacaacctcaccctaccctacactttgggagcacaaatttggtgttgaaacaagcttaaatttcattttagggcatactgggcttactctcctcccagctgtctgtggattgatttgattttaatgttcgagttttacagcaacagctgaaaaccatgaactattctaggaactgtgttggaactctttaaaataaagaaaagaggaggaggaggaggaagaaagaaaaccaacttaagaagccttgactttggaggacagaaagccaccagccaatggagaacaaagagatgtttccctttcctttctttcaccttgtcattctgggtttccttctgcttcactctttccttcccccttaaaagtggtattcctggttggtctgtctgtctgtccttgtccttgtggtgatcctggcatggtgatatgctccactttgcattatccatggtctcttaccagcgcacaagtcagtggggaggatctaaccacgcctggtggtgaggaagctgaatttccaggcctgcgtcccatgtagcctctccatgaactgcagaaggcatgttctgcatggttaccagtggcatccaaggctctgctgtctgtccacagcatccggacctctcatctgtctacacccattgcttcaggcttggtccctccgccgtcagtaatgtccagcttcactcaggccgctcacctgcgctttacattccaacatctgctgaactcctgcttctccctgcctctaaatggaccccaactgctcctgctcgcctgatggttcctgcgcctgtgccggctcctgcaaatgaaaagagtgcacatgcacctcctgcaagaagagctgctgctcctgctgccctgtgggctgtgccaagtgtgcccagggctgcatctgcaaagggacgtcggacaactgcagctgctgtgcctgatgccaggacagccctgctctcagatgtaaatagagcaaccttataaacctggatttttt

SEQ ID NO: 307602 - DNA, 6360 bp, Homo sapiens
  misc_feature (25)..(25): n is a, c, g, or t
agcgggtcttctcccggcctgagcngcagcagctgcggcggcggcggcgtttgagtggaggaagatggcggctccgggcggctcggggtcccgccagctgtgaggagccccgagcacggctgtcgcggcctgaggcagagcgcctctgctctggccctgtccctggctccctcattaccgtcgccagcggagcgaacccgagagcgtggagcgggctgggccagagatgggatttcgccatgttgcccacgctggtctcgaactcctgacctaaggtgatctgccggcctcagaatcccaaagtgctgggactacaggtgtgagccactgcacccaaccaagaactactatattttctgttgagtggaatgtcatggccagctcctcggacagtgaagatgacagtttcatggctgtggaccaggaagaaactgtgctggaagggacaatggatcaagatgaggagccccacccagtattggaggctgaggagactagacataataggtccatgtcggagctgccagaagaggttttggagtatatcctgtcctttctctcaccgtatcaggaacacaaaactgcggcccttgtctgcaaacagtggtatcgacttatcaaaggtgtagcccatcagtgttatcatggtttcatgaaggctgtccaggaaggaaacattcagtgggagagccgtacctatccttatcctggaaccccaatcactcagcgcttctcgcacagtgcatgctattatgatgctaatcagtctatgtatgtgtttggaggctgtacccagagcagctgcaatgctgctttcaatgacctctggagacttgacctaaacagcaaagagtggatccgacctttggcttcagggtcctatccttcccccaaagctggagcaactctggtcgtgtacaaggacttgctagtgctgtttggtggctggacgcggccaagcccttatcccctacaccagccagagagattctttgatgaaatacacacttactcaccctctaaaaattggtggaactgcattgtgacaacccatgggccacctcccatggctggccactcctcctgtgtgatagatgataaaatgattgtctttggtggctctttaggatcccggcaaatgagcaatgatgtctgggtccttgaccttgagcagtgggcgtggtccaagccgaacatctctggccccagtcctcatcctcgaggtggccaatctcagattgtcatagatgatgcaactatcttaatcctcggagggtgtggcggtcccaatgctctattcaaggatgcttggttgttgcacatgcattctggtccttgggcctggcagccactcaaggtagaaaatgaagagcatggggccccagaactgtggtgccatccagcttgccgggtgggacagtgtgtggtggtcttcagccaggctcctagtgggagagccccactcagccccagtttgaactctcgcccatcacctatcagtgccactcctccagctctcgttcctgaaacccgagagtaccgctctcagtctccagtaagaagcatggatgaagctccttgtgttaacggccgctggggaacactgagacccagggctcaaaggcagactccttcaggttcccgggaagggagcctttccccagccagaggagacggctctcctatcctcaatggtgggagtttgtctccaggaacggcagctgtgggtggctcttctttggacagtcctgtacaggccatatctccaagtactccatctgctcctgaaggatacgacctgaaaataggactttctttggccccccgacgaggatcactaccagatcagaaagatctgagattaggatccatagatctgaattgggatctgaaacccgcttccagtagtaatcccatggatggcatggacaataggacagttgggggaagtatgagacaccctcctgaacagacaaatggtgtgcataccccacctcacgtggccagtgcccttgcaggggccgtctccccaggtgccctgcgtcggagtctggaagccatcaaagcgatgtcctccaaaggcccctcggcctctgcagcactaagtcctcctcttgggtcttctccaggctctcctgggagccagagtttgagcagtggagaaacagtgcccatccctcgcccagggcctgcccaaggagatggacattccttacctcccattgctcgccgcctgggccaccaccctccacagtccctaaatgttggcaaacccctataccagagtatgaactgcaagcccatgcagatgtacgtgctggacattaaagacaccaaggagaaggggcgggtcaaatggaaagtatttaatagcagttctgtggttggacctcctgaaaccagcctgcataccgtggtacaaggcaggggtgaactcatcatatttggaggactcatggacaagaaacagaatgtgaagtactatccaaaaacaaacgccttgtactttgtacgagcaaagagataatgtgttctaaacccctttccttttctgtggcttttaatttggaattttccagtgtgtaagcatttggactgagaattgggaaaacaaaattactcccagaagccaaaactctttaattcccaaccgaagtcactccaggctgggatcaaatctccattaagaaaaaaaattatatataaatatatatatatatattatatagccaactctgttgacaaaaaaagggagagatttccatcctggttcagataaagttgttgctgtgttttaacaggggctgggctgcctttttctaccttgctggtaactagaccaagaagttagagaatagactaacatcagtaacttcccaaaagaaactgaagagccccctgtaaatctttatgtggccttcttggagttaaaaaatgaaagggcatatgtaagttgcaaaggtggagggttttagactctcatgcttcaggtgctgtcggggtaaaagtaactgtttttccccttctcttaaaaccacagaggacctgtgacagctctgcagaaatgccagtgcctggccccctcttgccttttatggctgaggaaagttacccaacaaaggattttattccacatttgtgtgccgggtcattgtgaaataatgtttatgcagccaacatctgaccgcctagtagtgtccattggtctttggagtgcttcttgtgtgtctcagaaaacattttgtgtctgattgtggaaatttctgacaatcaatcatatttggtggcaagttgccaaaaaacatatttattctcctctttcttcccttagaacatggtacttggaaactgccttttccattcacttacaggctgcttttttcttctaccttttttcttttcttttttttttttcatatgtggtgaagtcctaaaacctgtctgactttctgtttcttttacaaagctcaggtgcctacagaaatcagaagctgcttagaaatacttgtggaaccctttccctggtgtcactagggggccagtagggaattctaagatgccaatattgtgagaaatctttgaagcaagcatcaaaagatactgttttttccctatgggcttctttttacttccaaagcacattgagcacactcatcccatatttgtagaatgtggaaattgattctggaagggaattccaataacagttctttttagaaatgtttttttccttgtggtgacatatattcctcttcctggctattggcaggtgatggagttgagaatcatgtacttgacttcttgacgcatggctgacctcagaaacagctccatcctttgcacttgtcttcttcatgtgtcacccaaatagggcttgggtttttactttcacttcatttctgagattaaggtgtaaccaagtagagcatttctttgcttgatacagaaagttactagtctcaaccatggcctgggcataggagatgtcaaaataagtttatttcaaatggcaccatttaaatagggatttttggtgatttctcatcagtggaaagaggatttttgttttgcctttgttttgttttgaaatttaaatcctaatttcaaaacatcaccttgccaccctgacactcctctttttattattagcgtttctcaggcacaaagcctgctgcagctggccctgggtcctggctttcagccagcatctggcagcctaagtgtactgataagtgtgttttctcctgttacatcatgctgaatcctttcccttagccattagcttttatgatgtggtcttcgtaggaaagccaccctggtgccaagcctagcttgtggggaggggtatgtgttccagaaactgctctttgtgttcccttcaatgaggaaacaacatgtgtctacttatgtggcatccaactgcttggagctccacacttccctttcgcgactcaggctctggtgctgttgccaatccttgcttggcaaagactgttcgatcatgtggggtccttatttacaagggaaagctgggccagaaggctagcaattcaggtgttaccgctattgctgtaccttgtgttaggacattgtgtttgtgcatggactgtgcctccaaactcagtagttcctatctaaatataaagtatattagaaacctgaaagtacagaatctcaaccttacagtctttcccttagtcctgtggccttcctaagccagctgttaacgtgttgattccttccacttcccccaagtaggcaggcaacagatatgttgattgtcttagaaagtaatctggttcctctgaactccattgaattccagtttgacgcatactgcctggaaccagactgtttgcttacagctttttaagaaaaatctgccttgtctgcccccattatggttggtcttggtagctcctgggcactgtgggcgtgtaccatgggaaagtgattcaacacagtgaaggtgattgtctcctcaggcctcctgaagccacctgtgcggtgggacttcacgtgtctcggccaaggcgagcatttccacaatgccgtggatgctgcagtcaggccagattgaaccatgaccccatttttcacatgataccaattttgtcttaaaattcactgagaaaaatgagactaaattttttttaaccctcaggagcacctgaagcaaatatttatccgtatttattgaaaattcattttgtttctacttgaagctttaaccccttccattcctgcaagtgtgccttttgagagctcccatggcctagtgacttcactggtcaccttgtccatcttacttaagaattttagtctctccctaccctcttggacagagcttcctgttctcttatttcacaggttatgcagcagagcgggttttgtgttttcattcctatttccacccttcatttggttggtggactccacaacctcaccctaccctacactttgggagcacaaatttggtgttgaaacaagcttaaatttcattttagggcatactgggcttactctcctcccagctgtctgtggattgatttgattttaatgttcgagttttacagcaacagctgaaaaccatgaactattctaggaactgtgttggaactctttaaaataaagaaaagaggaggaggaggaggaagaaagaaaaccaacttaagaagccttgactttggaggacagaaagccaccagccaatggagaacaaagagatgtttccctttcctttctttcaccttgtcattctgggtttccttctgcttcactctttccttcccccttaaaagtggtattcctggttggtctgtctgtctgtccttgtccttgtggtgatcctggcatggtgatatgctccactttgcattatccatggtctcttaccagcgcacaagtcagtggggaggatctaaccacgcctggtggtgaggaagctgaatttccaggcctgcgtcccatgtagcctctccatgaactgcagaaggcatgttctgcatggttaccagtggcatccaaggctctgctgtctgtccacagcatccggacctctcatctgtctacacccattgcttcaggcttggtccctccgccgtcagtaatgtccagcttcactcaggccgctcacctgcgctttacattccaacatctgctgtgagtgtgtcctctctgggcagccccccaccctccctcactccccaggggctcctcctctgaccctgtgcgcttcctccatgcttcccccacagttaggggcaccaccatccatccagtcacctgggaatgatcccagggtcaggtgatctgaggatggagaattgaccactgagcttggtggcgaggctggtgccc

SEQ ID NO: 307603 - DNA, 5410 bp, Homo sapiens
tgtcatttctcaagagaatcctgcattttatgtggttgacattcatgttaatatttgatcaacaaagaatgtatcctttcaggtgaattatcagtaatttattcacagggatcagaattgatatgtttttaggagaatggagaggttatggtaactagaatattcccatttgggagctaggtaggctattctcatataccagtgaagcatagaaagtcagaaacctgtgtctttgtaggtttattttcaatgtcttcccctcctcagattgtcatagatgatgcaactatcttaatcctcggagggtgtggcggtcccaatgctctattcaaggatgcttggttgttgcacatgcattctggtccttgggcctggcagccactcaaggtagaaaatgaagagcatggggccccagaactgtggtgccatccagcttgccgggtgggacagtgtgtggtggtcttcagccaggctcctagtgggagagccccactcagccccagtttgaactctcgcccatcacctatcagtgccactcctccagctctcgttcctgaaacccgagagtaccgctctcagtctccagtaagaagcatggatgaagctccttgtgttaacggccgctggggaacactgagacccagggctcaaaggcagactccttcaggttcccgggaagggagcctttccccagccagaggagacggctctcctatcctcaatggtgggagtttgtctccaggaacggcagctgtgggtggctcttctttggacagtcctgtacaggccatatctccaagtactccatctgctcctgaaggatacgacctgaaaataggactttctttggccccccgacgaggatcactaccagatcagaaagatctgagattaggatccatagatctgaattgggatctgaaacccgcttccagtagtaatcccatggatggcatggacaataggacagttgggggaagtatgagacaccctcctgaacagacaaatggtgtgcataccccacctcacgtggccagtgcccttgcaggggccgtctccccaggtgccctgcgtcggagtctggaagccatcaaagcgatgtcctccaaaggcccctcggcctctgcagcactaagtcctcctcttgggtcttctccaggctctcctgggagccagagtttgagcagtggagaaacagtgcccatccctcgcccagggcctgcccaaggagatggacattccttacctcccattgctcgccgcctgggccaccaccctccacagtccctaaatgttggcaaacccctataccagagtatgaactgcaagcccatgcagatgtacgtgctggacattaaagacaccaaggagaaggggcgggtcaaatggaaagtatttaatagcagttctgtggttggacctcctgaaaccagcctgcataccgtggtacaaggcaggggtgaactcatcatatttggaggactcatggacaagaaacagaatgtgaagtactatccaaaaacaaacgccttgtactttgtacgagcaaagagataatgtgttctaaacccctttccttttctgtggcttttaatttggaattttccagtgtgtaagcatttggactgagaattgggaaaacaaaattactcccagaagccaaaactctttaattcccaaccgaagtcactccaggctgggatcaaatctccattaagaaaaaaaattatatataaatatatatatatatattatatagccaactctgttgacaaaaaaagggagagatttccatcctggttcagataaagttgttgctgtgttttaacaggggctgggctgcctttttctaccttgctggtaactagaccaagaagttagagaatagactaacatcagtaacttcccaaaagaaactgaagagccccctgtaaatctttatgtggccttcttggagttaaaaaatgaaagggcatatgtaagttgcaaaggtggagggttttagactctcatgcttcaggtgctgtcggggtaaaagtaactgtttttccccttctcttaaaaccacagaggacctgtgacagctctgcagaaatgccagtgcctggccccctcttgccttttatggctgaggaaagttacccaacaaaggattttattccacatttgtgtgccgggtcattgtgaaataatgtttatgcagccaacatctgaccgcctagtagtgtccattggtctttggagtgcttcttgtgtgtctcagaaaacattttgtgtctgattgtggaaatttctgacaatcaatcatatttggtggcaagttgccaaaaaacatatttattctcctctttcttcccttagaacatggtacttggaaactgccttttccattcacttacaggctgcttttttcttctaccttttttcttttcttttttttttttcatatgtggtgaagtcctaaaacctgtctgactttctgtttcttttacaaagctcaggtgcctacagaaatcagaagctgcttagaaatacttgtggaaccctttccctggtgtcactagggggccagtagggaattctaagatgccaatattgtgagaaatctttgaagcaagcatcaaaagatactgttttttccctatgggcttctttttacttccaaagcacattgagcacactcatcccatatttgtagaatgtggaaattgattctggaagggaattccaataacagttctttttagaaatgtttttttccttgtggtgacatatattcctcttcctggctattggcaggtgatggagttgagaatcatgtacttgacttcttgacgcatggctgacctcagaaacagctccatcctttgcacttgtcttcttcatgtgtcacccaaatagggcttgggtttttactttcacttcatttctgagattaaggtgtaaccaagtagagcatttctttgcttgatacagaaagttactagtctcaaccatggcctgggcataggagatgtcaaaataagtttatttcaaatggcaccatttaaatagggatttttggtgatttctcatcagtggaaagaggatttttgttttgcctttgttttgttttgaaatttaaatcctaatttcaaaacatcaccttgccaccctgacactcctctttttattattagcgtttctcaggcacaaagcctgctgcagctggccctgggtcctggctttcagccagcatctggcagcctaagtgtactgataagtgtgttttctcctgttacatcatgctgaatcctttcccttagccattagcttttatgatgtggtcttcgtaggaaagccaccctggtgccaagcctagcttgtggggaggggtatgtgttccagaaactgctctttgtgttcccttcaatgaggaaacaacatgtgtctacttatgtggcatccaactgcttggagctccacacttccctttcgcgactcaggctctggtgctgttgccaatccttgcttggcaaagactgttcgatcatgtggggtccttatttacaagggaaagctgggccagaaggctagcaattcaggtgttaccgctattgctgtaccttgtgttaggacattgtgtttgtgcatggactgtgcctccaaactcagtagttcctatctaaatataaagtatattagaaacctgaaagtacagaatctcaaccttacagtctttcccttagtcctgtggccttcctaagccagctgttaacgtgttgattccttccacttcccccaagtaggcaggcaacagatatgttgattgtcttagaaagtaatctggttcctctgaactccattgaattccagtttgacgcatactgcctggaaccagactgtttgcttacagctttttaagaaaaatctgccttgtctgcccccattatggttggtcttggtagctcctgggcactgtgggcgtgtaccatgggaaagtgattcaacacagtgaaggtgattgtctcctcaggcctcctgaagccacctgtgcggtgggacttcacgtgtctcggccaaggcgagcatttccacaatgccgtggatgctgcagtcaggccagattgaaccatgaccccatttttcacatgataccaattttgtcttaaaattcactgagaaaaatgagactaaattttttttaaccctcaggagcacctgaagcaaatatttatccgtatttattgaaaattcattttgtttctacttgaagctttaaccccttccattcctgcaagtgtgccttttgagagctcccatggcctagtgacttcactggtcaccttgtccatcttacttaagaattttagtctctccctaccctcttggacagagcttcctgttctcttatttcacaggttatgcagcagagcgggttttgtgttttcattcctatttccacccttcatttggttggtggactccacaacctcaccctaccctacactttgggagcacaaatttggtgttgaaacaagcttaaatttcattttagggcatactgggcttactctcctcccagctgtctgtggattgatttgattttaatgttcgagttttacagcaacagctgaaaaccatgaactattctaggaactgtgttggaactctttaaaataaagaaaagaggaggaggaggaggaagaaagaaaaccaacttaagaagccttgactttggaggacagaaagccaccagccaatggagaacaaagagatgtttccctttcctttctttcaccttgtcattctgggtttccttctgcttcactctttccttcccccttaaaagtggtattcctggttggtctgtctgtctgtccttgtccttgtggtgatcctggcatggtgatatgctccactttgcattatccatggtctcttaccagcgcacaagtcagtggggaggatctaaccacgcctggtggtgaggaagctgaatttccaggcctgcgtcccatgtagcctctccatgaactgcagaaggcatgttctgcatggttaccagtaagtggctccctctcaccgtgttcattgtcaaatgagagcaaactttaggtgttggctccattgtacactctacttgctctgctcccctccctccaaccagggttcatgtcagtgcacaccccatgtgccctggcgaagctggtgctgtgagtgatgtttcccatacaactcagggatgccaggtggcttaccctgagatagtcattttgggcacataacagtgtaggaatgaaacatggatttcattgatatttaaatctgtcaatttcattttttgttaatgttttcccctgatgactttttagcaatttaacaaataaaatggacaattgtcttaactgttttattagcaaaaaaagaa

SEQ ID NO: 307604 - DNA, 5210 bp, Homo sapiens
gtctttcagttaggacgggagagggaggagggagtcaggtttattttcaatgtcttcccctcctcagattgtcatagatgatgcaactatcttaatcctcggagggtgtggcggtcccaatgctctattcaaggatgcttggttgttgcacatgcattctggtccttgggcctggcagccactcaaggtagaaaatgaagagcatggggccccagaactgtggtgccatccagcttgccgggtgggacagtgtgtggtggtcttcagccaggctcctagtgggagagccccactcagccccagtttgaactctcgcccatcacctatcagtgccactcctccagctctcgttcctgaaacccgagagtaccgctctcagtctccagtaagaagcatggatgaagctccttgtgttaacggccgctggggaacactgagacccagggctcaaaggcagactccttcaggttcccgggaagggagcctttccccagccagaggagacggctctcctatcctcaatggtgggagtttgtctccaggaacggcagctgtgggtggctcttctttggacagtcctgtacaggccatatctccaagtactccatctgctcctgaaggatacgacctgaaaataggactttctttggccccccgacgaggatcactaccagatcagaaagatctgagattaggatccatagatctgaattgggatctgaaacccgcttccagtagtaatcccatggatggcatggacaataggacagttgggggaagtatgagacaccctcctgaacagacaaatggtgtgcataccccacctcacgtggccagtgcccttgcaggggccgtctccccaggtgccctgcgtcggagtctggaagccatcaaagcgatgtcctccaaaggcccctcggcctctgcagcactaagtcctcctcttgggtcttctccaggctctcctgggagccagagtttgagcagtggagaaacagtgcccatccctcgcccagggcctgcccaaggagatggacattccttacctcccattgctcgccgcctgggccaccaccctccacagtccctaaatgttggcaaacccctataccagagtatgaactgcaagcccatgcagatgtacgtgctggacattaaagacaccaaggagaaggggcgggtcaaatggaaagtatttaatagcagttctgtggttggacctcctgaaaccagcctgcataccgtggtacaaggcaggggtgaactcatcatatttggaggactcatggacaagaaacagaatgtgaagtactatccaaaaacaaacgccttgtactttgtacgagcaaagagataatgtgttctaaacccctttccttttctgtggcttttaatttggaattttccagtgtgtaagcatttggactgagaattgggaaaacaaaattactcccagaagccaaaactctttaattcccaaccgaagtcactccaggctgggatcaaatctccattaagaaaaaaaattatatataaatatatatatatatattatatagccaactctgttgacaaaaaaagggagagatttccatcctggttcagataaagttgttgctgtgttttaacaggggctgggctgcctttttctaccttgctggtaactagaccaagaagttagagaatagactaacatcagtaacttcccaaaagaaactgaagagccccctgtaaatctttatgtggccttcttggagttaaaaaatgaaagggcatatgtaagttgcaaaggtggagggttttagactctcatgcttcaggtgctgtcggggtaaaagtaactgtttttccccttctcttaaaaccacagaggacctgtgacagctctgcagaaatgccagtgcctggccccctcttgccttttatggctgaggaaagttacccaacaaaggattttattccacatttgtgtgccgggtcattgtgaaataatgtttatgcagccaacatctgaccgcctagtagtgtccattggtctttggagtgcttcttgtgtgtctcagaaaacattttgtgtctgattgtggaaatttctgacaatcaatcatatttggtggcaagttgccaaaaaacatatttattctcctctttcttcccttagaacatggtacttggaaactgccttttccattcacttacaggctgcttttttcttctaccttttttcttttcttttttttttttcatatgtggtgaagtcctaaaacctgtctgactttctgtttcttttacaaagctcaggtgcctacagaaatcagaagctgcttagaaatacttgtggaaccctttccctggtgtcactagggggccagtagggaattctaagatgccaatattgtgagaaatctttgaagcaagcatcaaaagatactgttttttccctatgggcttctttttacttccaaagcacattgagcacactcatcccatatttgtagaatgtggaaattgattctggaagggaattccaataacagttctttttagaaatgtttttttccttgtggtgacatatattcctcttcctggctattggcaggtgatggagttgagaatcatgtacttgacttcttgacgcatggctgacctcagaaacagctccatcctttgcacttgtcttcttcatgtgtcacccaaatagggcttgggtttttactttcacttcatttctgagattaaggtgtaaccaagtagagcatttctttgcttgatacagaaagttactagtctcaaccatggcctgggcataggagatgtcaaaataagtttatttcaaatggcaccatttaaatagggatttttggtgatttctcatcagtggaaagaggatttttgttttgcctttgttttgttttgaaatttaaatcctaatttcaaaacatcaccttgccaccctgacactcctctttttattattagcgtttctcaggcacaaagcctgctgcagctggccctgggtcctggctttcagccagcatctggcagcctaagtgtactgataagtgtgttttctcctgttacatcatgctgaatcctttcccttagccattagcttttatgatgtggtcttcgtaggaaagccaccctggtgccaagcctagcttgtggggaggggtatgtgttccagaaactgctctttgtgttcccttcaatgaggaaacaacatgtgtctacttatgtggcatccaactgcttggagctccacacttccctttcgcgactcaggctctggtgctgttgccaatccttgcttggcaaagactgttcgatcatgtggggtccttatttacaagggaaagctgggccagaaggctagcaattcaggtgttaccgctattgctgtaccttgtgttaggacattgtgtttgtgcatggactgtgcctccaaactcagtagttcctatctaaatataaagtatattagaaacctgaaagtacagaatctcaaccttacagtctttcccttagtcctgtggccttcctaagccagctgttaacgtgttgattccttccacttcccccaagtaggcaggcaacagatatgttgattgtcttagaaagtaatctggttcctctgaactccattgaattccagtttgacgcatactgcctggaaccagactgtttgcttacagctttttaagaaaaatctgccttgtctgcccccattatggttggtcttggtagctcctgggcactgtgggcgtgtaccatgggaaagtgattcaacacagtgaaggtgattgtctcctcaggcctcctgaagccacctgtgcggtgggacttcacgtgtctcggccaaggcgagcatttccacaatgccgtggatgctgcagtcaggccagattgaaccatgaccccatttttcacatgataccaattttgtcttaaaattcactgagaaaaatgagactaaattttttttaaccctcaggagcacctgaagcaaatatttatccgtatttattgaaaattcattttgtttctacttgaagctttaaccccttccattcctgcaagtgtgccttttgagagctcccatggcctagtgacttcactggtcaccttgtccatcttacttaagaattttagtctctccctaccctcttggacagagcttcctgttctcttatttcacaggttatgcagcagagcgggttttgtgttttcattcctatttccacccttcatttggttggtggactccacaacctcaccctaccctacactttgggagcacaaatttggtgttgaaacaagcttaaatttcattttagggcatactgggcttactctcctcccagctgtctgtggattgatttgattttaatgttcgagttttacagcaacagctgaaaaccatgaactattctaggaactgtgttggaactctttaaaataaagaaaagaggaggaggaggaggaagaaagaaaaccaacttaagaagccttgactttggaggacagaaagccaccagccaatggagaacaaagagatgtttccctttcctttctttcaccttgtcattctgggtttccttctgcttcactctttccttcccccttaaaagtggtattcctggttggtctgtctgtctgtccttgtccttgtggtgatcctggcatggtgatatgctccactttgcattatccatggtctcttaccagcgcacaagtcagtggggaggatctaaccacgcctggtggtgaggaagctgaatttccaggcctgcgtcccatgtagcctctccatgaactgcagaaggcatgttctgcatggttaccagtaagtggctccctctcaccgtgttcattgtcaaatgagagcaaactttaggtgttggctccattgtacactctacttgctctgctcccctccctccaaccagggttcatgtcagtgcacaccccatgtgccctggcgaagctggtgctgtgagtgatgtttcccatacaactcagggatgccaggtggcttaccctgagatagtcattttgggcacataacagtgtaggaatgaaacatggatttcattgatatttaaatctgtcaatttcattttttgttaatgttttcccctgatgactttttagcaatttaacaaataaaatggacaattgtcttaactgttttattagcaaaaaaagaa

SEQ ID NO: 307605 - DNA, 6000 bp, Homo sapiens
  misc_feature (25)..(25): n is a, c, g, or t
agcgggtcttctcccggcctgagcngcagcagctgcggcggcggcggcgtttgagtggaggaagatggcggctccgggcggctcggggtcccgccagctgtgaggagccccgagcacggctgtcgcggcctgaggcagagcgcctctgctctggccctgtccctggctccctcattaccgtcgccagcggagcgaacccgagagcgtggagcgggctgggccagagatgggatttcgccatgttgcccacgctggtctcgaactcctgacctaaggtgatctgccggcctcagaatcccaaagtgctgggactacaggtgtgagccactgcacccaaccaagaactactatattttctgttgagtggaatgtcatggccagctcctcggacagtgaagatgacagtttcatggctgtggaccaggaagaaactgtgctggaagggacaatggatcaagatgaggagccccacccagtattggaggctgaggagactagacataataggtccatgtcggagctgccagaagaggttttggagtatatcctgtcctttctctcaccgtatcaggaacacaaaactgcggcccttgtctgcaaacagtggtatcgacttatcaaaggtgtagcccatcagtgttatcatggtttcatgaaggctgtccaggaaggaaacattcagtgggagagccgtacctatccttatcctggaaccccaatcactcagcgcttctcgcacagtgcatgctattatgatgctaatcagtctatgtatgtgtttggaggctgtacccagagcagctgcaatgctgctttcaatgacctctggagacttgacctaaacagcaaagagtggatccgacctttggcttcagggtcctatccttcccccaaagctggagcaactctggtcgtgtacaaggacttgctagtgctgtttggtggctggacgcggccaagcccttatcccctacaccagccagagagattctttgatgaaatacacacttactcaccctctaaaaattggtggaactgcattgtgacaacccatgggccacctcccatggctggccactcctcctgtgtgatagatgataaaatgattgtctttggtggctctttaggatcccggcaaatgagcaatgatgtctgggtccttgaccttgagcagtgggcgtggtccaagccgaacatctctggccccagtcctcatcctcgaggtggccaatctcagattgtcatagatgatgcaactatcttaatcctcggagggtgtggcggtcccaatgctctattcaaggatgcttggttgttgcacatgcattctggtccttgggcctggcagccactcaaggtagaaaatgaagagcatggggccccagaactgtggtgccatccagcttgccgggtgggacagtgtgtggtggtcttcagccaggctcctagtgggagagccccactcagccccagtttgaactctcgcccatcacctatcagtgccactcctccagctctcgttcctgaaacccgagagtaccgctctcagtctccagtaagaagcatggatgaagctccttgtgttaacggccgctggggaacactgagacccagggctcaaaggcagactccttcaggttcccgggaagggagcctttccccagccagaggagacggctctcctatcctcaatggtgggagtttgtctccaggaacggcagctgtgggtggctcttctttggacagtcctgtacaggccatatctccaagtactccatctgctcctgaaggatacgacctgaaaataggactttctttggccccccgacgaggatcactaccagatcagaaagatctgagattaggatccatagtccctaaatgttggcaaacccctataccagagtatgaactgcaagcccatgcagatgtacgtgctggacattaaagacaccaaggagaaggggcgggtcaaatggaaagtatttaatagcagttctgtggttggacctcctgaaaccagcctgcataccgtggtacaaggcaggggtgaactcatcatatttggaggactcatggacaagaaacagaatgtgaagtactatccaaaaacaaacgccttgtactttgtacgagcaaagagataatgtgttctaaacccctttccttttctgtggcttttaatttggaattttccagtgtgtaagcatttggactgagaattgggaaaacaaaattactcccagaagccaaaactctttaattcccaaccgaagtcactccaggctgggatcaaatctccattaagaaaaaaaattatatataaatatatatatatatattatatagccaactctgttgacaaaaaaagggagagatttccatcctggttcagataaagttgttgctgtgttttaacaggggctgggctgcctttttctaccttgctggtaactagaccaagaagttagagaatagactaacatcagtaacttcccaaaagaaactgaagagccccctgtaaatctttatgtggccttcttggagttaaaaaatgaaagggcatatgtaagttgcaaaggtggagggttttagactctcatgcttcaggtgctgtcggggtaaaagtaactgtttttccccttctcttaaaaccacagaggacctgtgacagctctgcagaaatgccagtgcctggccccctcttgccttttatggctgaggaaagttacccaacaaaggattttattccacatttgtgtgccgggtcattgtgaaataatgtttatgcagccaacatctgaccgcctagtagtgtccattggtctttggagtgcttcttgtgtgtctcagaaaacattttgtgtctgattgtggaaatttctgacaatcaatcatatttggtggcaagttgccaaaaaacatatttattctcctctttcttcccttagaacatggtacttggaaactgccttttccattcacttacaggctgcttttttcttctaccttttttcttttcttttttttttttcatatgtggtgaagtcctaaaacctgtctgactttctgtttcttttacaaagctcaggtgcctacagaaatcagaagctgcttagaaatacttgtggaaccctttccctggtgtcactagggggccagtagggaattctaagatgccaatattgtgagaaatctttgaagcaagcatcaaaagatactgttttttccctatgggcttctttttacttccaaagcacattgagcacactcatcccatatttgtagaatgtggaaattgattctggaagggaattccaataacagttctttttagaaatgtttttttccttgtggtgacatatattcctcttcctggctattggcaggtgatggagttgagaatcatgtacttgacttcttgacgcatggctgacctcagaaacagctccatcctttgcacttgtcttcttcatgtgtcacccaaatagggcttgggtttttactttcacttcatttctgagattaaggtgtaaccaagtagagcatttctttgcttgatacagaaagttactagtctcaaccatggcctgggcataggagatgtcaaaataagtttatttcaaatggcaccatttaaatagggatttttggtgatttctcatcagtggaaagaggatttttgttttgcctttgttttgttttgaaatttaaatcctaatttcaaaacatcaccttgccaccctgacactcctctttttattattagcgtttctcaggcacaaagcctgctgcagctggccctgggtcctggctttcagccagcatctggcagcctaagtgtactgataagtgtgttttctcctgttacatcatgctgaatcctttcccttagccattagcttttatgatgtggtcttcgtaggaaagccaccctggtgccaagcctagcttgtggggaggggtatgtgttccagaaactgctctttgtgttcccttcaatgaggaaacaacatgtgtctacttatgtggcatccaactgcttggagctccacacttccctttcgcgactcaggctctggtgctgttgccaatccttgcttggcaaagactgttcgatcatgtggggtccttatttacaagggaaagctgggccagaaggctagcaattcaggtgttaccgctattgctgtaccttgtgttaggacattgtgtttgtgcatggactgtgcctccaaactcagtagttcctatctaaatataaagtatattagaaacctgaaagtacagaatctcaaccttacagtctttcccttagtcctgtggccttcctaagccagctgttaacgtgttgattccttccacttcccccaagtaggcaggcaacagatatgttgattgtcttagaaagtaatctggttcctctgaactccattgaattccagtttgacgcatactgcctggaaccagactgtttgcttacagctttttaagaaaaatctgccttgtctgcccccattatggttggtcttggtagctcctgggcactgtgggcgtgtaccatgggaaagtgattcaacacagtgaaggtgattgtctcctcaggcctcctgaagccacctgtgcggtgggacttcacgtgtctcggccaaggcgagcatttccacaatgccgtggatgctgcagtcaggccagattgaaccatgaccccatttttcacatgataccaattttgtcttaaaattcactgagaaaaatgagactaaattttttttaaccctcaggagcacctgaagcaaatatttatccgtatttattgaaaattcattttgtttctacttgaagctttaaccccttccattcctgcaagtgtgccttttgagagctcccatggcctagtgacttcactggtcaccttgtccatcttacttaagaattttagtctctccctaccctcttggacagagcttcctgttctcttatttcacaggttatgcagcagagcgggttttgtgttttcattcctatttccacccttcatttggttggtggactccacaacctcaccctaccctacactttgggagcacaaatttggtgttgaaacaagcttaaatttcattttagggcatactgggcttactctcctcccagctgtctgtggattgatttgattttaatgttcgagttttacagcaacagctgaaaaccatgaactattctaggaactgtgttggaactctttaaaataaagaaaagaggaggaggaggaggaagaaagaaaaccaacttaagaagccttgactttggaggacagaaagccaccagccaatggagaacaaagagatgtttccctttcctttctttcaccttgtcattctgggtttccttctgcttcactctttccttcccccttaaaagtggtattcctggttggtctgtctgtctgtccttgtccttgtggtgatcctggcatggtgatatgctccactttgcattatccatggtctcttaccagcgcacaagtcagtggggaggatctaaccacgcctggtggtgaggaagctgaatttccaggcctgcgtcccatgtagcctctccatgaactgcagaaggcatgttctgcatggttaccagtaagtggctccctctcaccgtgttcattgtcaaatgagagcaaactttaggtgttggctccattgtacactctacttgctctgctcccctccctccaaccagggttcatgtcagtgcacaccccatgtgccctggcgaagctggtgctgtgagtgatgtttcccatacaactcagggatgccaggtggcttaccctgagatagtcattttgggcacataacagtgtaggaatgaaacatggatttcattgatatttaaatctgtcaatttcattttttgttaatgttttcccctgatgactttttagcaatttaacaaataaaatggacaattgtcttaactgttttattagcaaaaaaagaa

SEQ ID NO: 307606 - DNA, 3316 bp, Homo sapiens
  misc_feature (25)..(25): n is a, c, g, or t
agcgggtcttctcccggcctgagcngcagcagctgcggcggcggcggcgtttgagtggaggaagatggcggctccgggcggctcggggtcccgccagctgtgaggagccccgagcacggctgtcgcggcctgaggcagagcgcctctgctctggccctgtccctggctccctcattaccgtcgccagcggagcgaacccgagagcgtggagcgggctgggccagagatgggatttcgccatgttgcccacgctggtctcgaactcctgacctaaggtgatctgccggcctcagaatcccaaagtgctgggactacaggtgtgagccactgcacccaaccaagaactactatattttctgttgagtggaatgtcatggccagctcctcggacagtgaagatgacagtttcatggctgtggaccaggaagaaactgtgctggaagggacaatggatcaagatgaggagccccacccagtattggaggctgaggagactagacataataggtccatgtcggagctgccagaagaggttttggagtatatcctgtcctttctctcaccgtatcaggaacacaaaactgcggcccttgtctgcaaacagtggtatcgacttatcaaaggtgtagcccatcagtgttatcatggtttcatgaaggctgtccaggaaggaaacattcagtgggagagccgtacctatccttatcctggaaccccaatcactcagcgcttctcgcacagtgcatgctattatgatgctaatcagtctatgtatgtgtttggaggctgtacccagagcagctgcaatgctgctttcaatgacctctggagacttgacctaaacagcaaagagtggatccgacctttggcttcagggtcctatccttcccccaaagctggagcaactctggtcgtgtacaaggacttgctagtgctgtttggtggctggacgcggccaagcccttatcccctacaccagccagagagattctttgatgaaatacacacttactcaccctctaaaaattggtggaactgcattgtgacaacccatgggccacctcccatggctggccactcctcctgtgtgatagatgataaaatgattgtctttggtggctctttaggatcccggcaaatgagcaatgatgtctgggtccttgaccttgagcagtgggcgtggtccaagccgaacatctctggccccagtcctcatcctcgaggtggccaatctcagattgtcatagatgatgcaactatcttaatcctcggagggtgtggcggtcccaatgctctattcaaggatgcttggttgttgcacatgcattctggtccttgggcctggcagccactcaaggtagaaaatgaagagcatggggccccagaactgtggtgccatccagcttgccgggtgggacagtgtgtggtggtcttcagccaggctcctagtgggagagccccactcagccccagtttgaactctcgcccatcacctatcagtgccactcctccagctctcgttcctgaaacccgagagtaccgctctcagtctccagtaagaagcatggatgaagctccttgtgttaacggccgctggggaacactgagacccagggctcaaaggcagactccttcaggttcccgggaagggagcctttccccagccagaggagacggctctcctatcctcaatggtgggagtttgtctccaggaacggcagctgtgggtggctcttctttggacagtcctgtacaggccatatctccaagtactccatctgctcctgaaggatacgacctgaaaataggactttctttggccccccgacgaggatcactaccagatcagaaagatctgagattaggatccatagatctgaattgggatctgaaacccgcttccagtagtaatcccatggatggcatggacaataggacagttgggggaagtatgagacaccctcctgaacagacaaatggtgtgcataccccacctcacgtggccagtgcccttgcaggggccgtctccccaggtgccctgcgtcggagtctggaagccatcaaagcgatgtcctccaaaggcccctcggcctctgcagcactaagtcctcctcttgggtcttctccaggctctcctgggagccagagtttgagcagtggagaaacagtgcccatccctcgcccagggcctgcccaaggagatggacattccttacctcccattgctcgccgcctgggccaccaccctccacagtccctaaatgttggcaaacccctataccagagtatgaactgcaagcccatgcagatgtacgtgctggacattaaagacaccaaggagaaggggcgggtcaaatggaaagtatttaatagcagttctgtggttggacctcctgaaaccagcctgcataccgtggtacaaggcaggggtgaactcatcatatttggaggactcatggacaagaaacagaatgtgaagtactatccaaaaacaaacgccttgtactttgtacgagcaaagagataatgtgttctaaacccctttccttttctgtggcttttaatttggaattttccagtgtgtaagcatttggactgagaattgggaaaacaaaattactcccagaagccaaaactctttaattcccaaccgaagtcactccaggctgggatcaaatctccattaagaaaaaaaattatatataaatatatatatatatattatatagccaactctgttgacaaaaaaagggagagatttccatcctggttcagataaagttgttgctgtgttttaaaaaaaaagaaaagataaaataaaaagaaagaagaaaaaaaaaaaaaaaaaaaaaaaaaaaaaaacacaaaaccggcagggcactctattatgatccgggggggggaaaaaggggcacgaaacgggccaggggcaaagagggatccgggaaccaagtttctgtggtcacacacgcgggaaacactcggggggaccccatataagaggagacgaactaaatgcgagaaaccgcggtataccgtgatagaggcgtggcgaagacaaccgagacgagaggacagaggagggcgggcacagaacaggcggacacccaaaacgaacacagcaaaacggcgagagaaaacagacaagacaaactgagcacgcaaacacacaatcacagcccacaagaagaaaccaaaaggagaagagcacacaaaagaacaaacaggagggagcaacacaaaggaaagcaagagaaacgaaggaggggagaagaagaaacaggacacagacaaccaaggagaggaccgagtgctg

SEQ ID NO: 307607 - DNA, 3027 bp, Homo sapiens
  misc_feature (25)..(25): n is a, c, g, or t
agcgggtcttctcccggcctgagcngcagcagctgcggcggcggcggcgtttgagtggaggaagatggcggctccgggcggctcggggtcccgccagctgtgaggagccccgagcacggctgtcgcggcctgaggcagagcgcctctgctctggccctgtccctggctccctcattaccgtcgccagcggagcgaacccgagagcgtggagcgggctgggccagagatgggatttcgccatgttgcccacgctggtctcgaactcctgacctaaggtgatctgccggcctcagaatcccaaagtgctgggactacaggtgtgagccactgcacccaaccaagaactactatattttctgttgagtggaatgtcatggccagctcctcggacagtgaagatgacagtttcatggctgtggaccaggaagaaactgtgctggaagggacaatggatcaagatgaggagccccacccagtattggaggctgaggagactagacataataggtccatgtcggagctgccagaagaggttttggagtatatcctgtcctttctctcaccgtatcaggaacacaaaactgcggcccttgtctgcaaacagtggtatcgacttatcaaaggtgtagcccatcagtgttatcatggtttcatgaaggctgtccaggaaggaaacattcagtgggagagccgtacctatccttatcctggaaccccaatcactcagcgcttctcgcacagtgcatgctattatgatgctaatcagtctatgtatgtgtttggaggctgtacccagagcagctgcaatgctgctttcaatgacctctggagacttgacctaaacagcaaagagtggatccgacctttggcttcagggtcctatccttcccccaaagctggagcaactctggtcgtgtacaaggacttgctagtgctgtttggtggctggacgcggccaagcccttatcccctacaccagccagagagattctttgatgaaatacacacttactcaccctctaaaaattggtggaactgcattgtgacaacccatgggccacctcccatggctggccactcctcctgtgtgatagatgataaaatgattgtctttggtggctctttaggatcccggcaaatgagcaatgatgtctgggtccttgaccttgagcagtgggcgtggtccaagccgaacatctctggccccagtcctcatcctcgaggtggccaatctcagattgtcatagatgatgcaactatcttaatcctcggagggtgtggcggtcccaatgctctattcaaggatgcttggttgttgcacatgcattctggtccttgggcctggcagccactcaaggtagaaaatgaagagcatggggccccagaactgtggtgccatccagcttgccgggtgggacagtgtgtggtggtcttcagccaggctcctagtgggagagccccactcagccccagtttgaactctcgcccatcacctatcagtgccactcctccagctctcgttcctgaaacccgagagtaccgctctcagtctccagtaagaagcatggatgaagctccttgtgttaacggccgctggggaacactgagacccagggctcaaaggcagactccttcaggttcccgggaagggagcctttccccagccagaggagacggctctcctatcctcaatggtgggagtttgtctccaggaacggcagctgtgggtggctcttctttggacagtcctgtacaggccatatctccaagtactccatctgctcctgaaggatacgacctgaaaataggactttctttggccccccgacgaggatcactaccagatcagaaagatctgagattaggatccatagatctgaattgggatctgaaacccgcttccagtagtaatcccatggatggcatggacaataggacagttgggggaagtatgagacaccctcctgaacagacaaatggtgtgcataccccacctcacgtggccagtgcccttgcaggggccgtctccccaggtgccctgcgtcggagtctggaagccatcaaagcgatgtcctccaaaggcccctcggcctctgcagcactaagtcctcctcttgggtcttctccaggctctcctgggagccagagtttgagcagtggagaaacagtgcccatccctcgcccagggcctgcccaaggagatggacattccttacctcccattgctcgccgcctgggccaccaccctccacagtccctaaatgttggcaaacccctataccagagtatgaactgcaagcccatgcagatgtacgtgctggacattaaagacaccaaggagaaggggcgggtcaaatggaaagtatttaatagcagttctgtggttggacctcctgaaaccagcctgcataccgtggtacaaggcaggggtgaactcatcatatttggaggactcatggacaagaaacagaatgtgaagtactatccaaaaacaaacgccttgtactttgtacgagcaaagagataatgtgttctaaaccccaaaaaaaaaaaaaaaaaaaaaaaaaaaaaaacacaaaaccggcagggcactctattatgatccgggggggggaaaaaggggcacgaaacgggccaggggcaaagagggatccgggaaccaagtttctgtggtcacacacgcgggaaacactcggggggaccccatataagaggagacgaactaaatgcgagaaaccgcggtataccgtgatagaggcgtggcgaagacaaccgagacgagaggacagaggagggcgggcacagaacaggcggacacccaaaacgaacacagcaaaacggcgagagaaaacagacaagacaaactgagcacgcaaacacacaatcacagcccacaagaagaaaccaaaaggagaagagcacacaaaagaacaaacaggagggagcaacacaaaggaaagcaagagaaacgaaggaggggagaagaagaaacaggacacagacaaccaaggagaggaccgagtgctg

SEQ ID NO: 307608 - DNA, 586 bp, Homo sapiens
gcccacaagagatggcgtccaaggagtagcatcgctccccagccatgcttccctgggatttgggcaagcctccctgcacaccaaacatgagcctcagggcgggctggaggagggggtttccggttcttctgcctctcctgggtctgacctcgtcgttgtcattgcccaggtggcatccaaggctctgctgtctgtccacagcatccggacctctcatctgtctacacccattgcttcaggcttggtccctccgccgtcagtaatgtccagcttcactcaggccgctcacctgcgctttacattccaacatctgctgaactcctgcttctccctgcctctaaatggaccccaactgctcctgctcgcctgatggttcctgcgcctgtgccggctcctgcaaatgaaaagagtgcacatgcacctcctgcaagaagagctgctgctcctgctgccctgtgggctgtgccaagtgtgcccagggctgcatctgcaaagggacgtcggacaactgcagctgctgtgcctgatgccaggacagccctgctctcagatgtaaatagagcaaccttataaacctggatttttt

SEQ ID NO: 307609 - DNA, 6387 bp, Homo sapiens
  misc_feature (396)..(396): n is a, c, g, or t
  misc_feature (1591)..(1591): n is a, c, g, or t
  misc_feature (1617)..(1617): n is a, c, g, or t
  misc_feature (1848)..(1848): n is a, c, g, or t
  misc_feature (2331)..(2331): n is a, c, g, or t
  misc_feature (2411)..(2411): n is a, c, g, or t
  misc_feature (3907)..(3907): n is a, c, g, or t
gatgggccagcagcaccccaagccattcactccatggggcccggtaggacaggacaagaaatggcttggggcagggacagaacagccacctgtggaggacgcagccctcgtcagcgaccagggtcacccatcacgggggtgtcccctctggggtccctgttcagagagaagaggcctaaggagcactggggtccagtcccaagacagtctgatgtccagggatacagaggcgcccccaccccctcacagctctgcaggccatgcacgaaggcctgtgtggatgagaaccgtgtgtgttggtaagaggcacagccctcgccctctggggcctcgcctcctctttgaactcagattctgaaagagcccccatcacattcccctgtgcctctgcggccnttccctgcagatcatctgcccagcggccccctccaccccacaggtgaccctcacaaggggccaggaggaacagagccacagccatgcctcctgtggccaggggtcctcctcagtctagacagcacctgcgatgctccacggcacctgtgtccctcctcctgtgcctggtggccaggacccactccctggctcagactgtgggcaagacaggcagcacccctcagggcagccatgtgagtcccatcgcacctgtcactcagccatggactgtccgtctgcccagcacccctccccaccgggggacttcacggctcttagggtcagtgcatatgtgtgcgtgtgcatgtgctcgcacatcctgaagtccccctgggctcagcccttcactggctttgagctcctctgcctgaggactcctgggtggacaagtgggctggccagaggtgaaggcagcagtgactgggggcctcgggagaaggctgtggcccagtgtgacctccacagggcagaaagggcatgcagaggagaggctggacagcggcttgtaggaatgaagtcccaggcagcaaagacaggagtacgaggttgaccagatggctctggggccgggggtgttgaggatttctgtgattttaagtgatcacgtagtgaattatttttacgcttaacaaagccaccgaggtatggaaatccatcctgacagcagaagactaggtgtgtgaattcactttagaagtcactctgtgttggggggtttggaggggcctctgtggagtccacaccttgccccctctgccttctgggctggccccgggcttggaggcagaggccccttggggtcctggtgggatgagccgttgtgtggggagggcctactgtggccacgctgggagagaggctggacgccagctccgcagcaggattgcacctccccctctcctcctggccatgcctgtgctgaggccctgggagggcggtgcctgacctcagagaatgtcgctctaatggtggaatttcaggtactgccacgtagggaagagtctcgtgggaagggcattttccagcctctgtcacaaaatctccaagggaattcagacctcatctagttccatcctcttattttgcagaagaggaggctgagggcccgggagaccaaggctgcccacctgtgggtggcagagcccaggcacccagngcccccagctccctgccccctgctcnttccgcccacccacacacccagcagctggcctctctgcggccagcctgctcgcttgctggacacctcgacagccccaccgccagccgcaggtgcgcgcaagggacccgtcacaagcatcttgccctgtggcctcctgagaagcgagtgagtggaccacagaggtcatttcccagccacgtggccaggcccagcccgaggcaggaccgggctcagggtgggaagcagggctnctcagaggagccaggatggggcggccaagccgacggcctgcggggccgcctccggactcctaacgcggcaggtgtttttactcctgctgtcacttatgtatcagtgtcactcttgcttcatcttatctgtttccttccaggtccagctttaggggcagctgccaggccttaggagcctttgcaatggttttgtattcctgtagacaccagatataaacagatttatatatttgtgtccctcccctgctccccccagttccccagcccgacgcacactctacacgcaggccactctgacctctgaccccgtgttccatgtggcaggagggcccgccccgggccaggccccaggtcatggctgctggctgtctgtggcggaagtccttggttgtttcctctcccctcctcccggctctcaccattctgtccgtctatctcgtcttgtcctcagtttcaaagcaatgtcacgaagggcttcctttncatgcctaaaaggaaacaatatgtttttggaaagaggtggggttggagcgggttctggggcaacttggggccctcggtcntggggcgatcagaggatatctctggattggctggcatcacagccagttgggagcctcccaagcctgggtcacgttggagaatctgccacccaaggcaggcagggccgggctgggatgcgtcggcctgctttggtggagacaccagggcctgcagtgggctgaaccgtattgtttccctttgaggccagtcctggtcctcgtccccatccatagctcatgctttttgatttgcatctttttttgcatggacatgccgagtagtgataagcagggttttctgttcttttgggcgtctctggtcagactcttctctttcagatcccgtgtcacagcattaggttcaggtgtgtcattgccgtgtcctttgagccctaaaaccaagggcatgaccaaggtgtgcagggagatctagccctgtgaggaagcggcacggtggccgcagggcaggaggtaaggacaccctggtctctgtgcctaggtccgtgcaagacagcggccagggcggccgggagaagctggagctcgtcctgtcgaacctgcaggcagacgtcctggagttgctgctggagtttgtctacacgggctccctggtcatcgactcggccaacgccaagacactgctggaggcggccagcaagttccagttccacaccttctgcaaagtctgcgtgtcctttctcgagaagcagctgacggccagcaactgcctgggcgtgctggccatggccgaggccatgcagtgcagcgagctctaccacatggccaaggccttcgcgctgcagatcttccccgaggtggccgcccaggaggagatcctcagcatctccaaggacgacttcatcgcctacgtctccaacgacagcctcaacaccaaggctgaggagctggtgtacgagacagtcatcaagtggatcaagaaggaccccgcgacacgcacacagtacgcggctgagctcctggccgtggtccgcctccccttcatccaccccagctacctgctcaatgtggttgacaatgaagagctgatcaagtcatcagaagcctgccgggacctggtgaacgaggccaaacgctaccatatgctgccccacgcccgccaggagatgcagacgccccgaacccggccgcgcctctctgcaggtgtggctgaggtcatcgtcttggttgggggccgtcagatggtggggatgacccagcgctcgctggtggccgtcacctgctggaacccgcagaacaacaagtggtaccccttggcctcgctgcccttctatgaccgcgagttcttcagtgtagtgagtgcaggggacaacatctacctctcaggtgggatggaatcaggggtgacgctggctgatgtctggtgctacatgtccctgcttgataactggaacctcgtctccagaatgacagtcccccgctgtcggcacaatagcctcgtctacgatgggaagatttacaccctcgggggacttggcgtggcaggcaacgtggaccangtggagaggtacgacaccatcaccaaccaatgggaggcggtggcccctctgcccaaggcagtacactctgctgcagccacagtgtgtggcggcaagatctacgtgtttggtggggtgaacgaggcaggccgagctgccggcgtcctccagtcttacgttcctcagaccaacacgtggagcttcatcgagtccccaatgattgacaacaagtatgcccccgctgtcacgctcaatggcttcgttttcatcctgggcggggcttatgccagagctaccaccatctacgaccctgagaaaggaaacattaaggcgggcccaaacatgaaccactctcgccagttctgcagtgctgtggtgcttgatggcaagatttatgcaactggaggtattgtcagcagtgaagggcccgcgctgggcaacatggaggcctacgagcccacaaccaacacatggaccctcctcccccacatgccctgccctgtgttcagacacggctgcgtcgtgataaagaaatatattcaaagcggctgacatcagcagaaagcccacgataagactgtggacaagtctggtgaggcaagtgccacgcaatgataattttccagcgacaccaacaagaggccaacaaaacacaatcaaggaactcactgcgctcaacatgttgaatattctctacattgaatgtagaaaatcatcctcgcctttggatgaaacggaggcaccgcgcttggagccgcaggaaccacgatcccgccatggggctggctgcctcctgaacaggggcgctcgctctgccaggtgcaatagagtttcacgtatttttcaactgggagagagaagctgttttttccttcctgcagagcaagcttgatccctaaacaaccatagatcagttatcttatgacaacattaggcatcaggctctcttggaataagatcaaagtgtccttatcactttgattcctacttttgttttttaaccgatctacactttcagtggccgacagaaaacgagggacaatactgtgcatcacaaggcctaggaggctgctggtccccactggggctgaagagaagcccagctgcccacgcggagccaggggtggcagctgtgggacagccggggagcagggacagcggtctgtccttcacaggtttttctactgtgtttttgctggagaaggacagtgattgcgctagctttctcttacccggtatgaattatttagatttctgaggcattttcttgataaacaaaaggctatttttaagtactgagaggaggagcaggccacaagagggataatgttgtgggaattcccaaagctctttgtaggtagtgccagaggggggcttttgctctcatttttctatgtgcagaatagaggatctctcctggggtgggcgatgcccccattttatttttagaaaaagtaactcccagacagccccataaaagctgtgcccaaggaagaagagtctgctctagaaggagcccggttctggctcaggacaccggcccagctccctccatgaggtcaagctgaggaccaggccagtgggaagggaaggagggagaattagcgtctataaagcacaggagactatttttgatattcatagctatatattaaggcacctgccacaagagctctcaggatggggacagccttcttagtggagccatggcagcaaggcctgagggcatgagcagaaccactcttcttgtcacatacgaacctgagaaaagggaagccaggagggaggtcacaccatggctcaaaagggaaaggccttcccacttgtccttagcccctcaaacctcacacggtcaacagtttccattccagggcaggagaatgctgccgccactgcgctgttgagttgaagttggtaccaaatacacatttaccacttttatatctgggaagtcaacttgccatcgtttcatgataacaaccatttataagagaaaaagacaggacacgctttccatcgttcagtatttgatgacacaaaattccagttctaatgttgggcatcaacttctagcactacgagtgtggctcccacttggacaagataccgagcttcgttatgcagtttttaatattatttattattttaaaaagtaataagcacaaaactacatacattgtatgtcatttaaagtatttatgtcaaacagggtgcaagtgtgaacccaaggactggagcacaaattcctaactgcctggggcagggctaatgttagcattggtgtgcgtctgcctccaaaggaggttctagttgtcagcgagactcaacacagatgacattgaaattcgtttctctcctcatctatcacactggagcaaaactggctatttctgtgaatgatataaaacagggttctctgtaatggtattgtacatagtatatgtttactgttaagttcttgttatattataataaatatatttatagatctagacttggaa

SEQ ID NO: 307610 - DNA, 4344 bp, Homo sapiens
  misc_feature (1864)..(1864): n is a, c, g, or t
gggcgggggcgatgctgccggagccgccgccgccgccgccgcctcgatgagagccgcgccgcaccgctcatagccgcacaggctgacaggcaggaggaccgacttccctctcccgggcatcctccctgggctgccgggacgggcggcggcggaggaggaggaggaacgaggggagaaggcggagagcaggaacgcgaggaggaggacctggatccgtttcctccggccaggacccgagcggccccagccaccgctacccgccggcgctgtccgctctccatcagccctcctgcgcccacccgcgaccccggtcattggggtgaccccctcactgcctccccacgtggggccccagctcccgctgatgccaggccactactcgctccctcagccgccctctcagccactgagcagcgtggtggtcaacatgcctgcccaggccctgtatgccagccctcagcccctggccgtgtccacactgcccggtgtggggcaggtggcccgcccaggacccaccgctgtgggcaacggccacatggcagggcccctgctgcctccaccgccgccagcccagccgtccgccactctccccagtggtgcccctgccaccaatgggccccccacaaccgactcggcccacgggctgcagatgctgcggaccattggcgtggggaagtatgagttcaccgacccggggcaccccagagaaatgttgaaggaattgaaccagcaacgcagagcgaaagcgtttacagacctgaaaattgttgttgaaggcagagagtttgaagtccaccaaaatgttctagcttcctgcagcttgtatttcaaggacctgattcaaaggtccgtgcaagacagcggccagggcggccgggagaagctggagctcgtcctgtcgaacctgcaggcagacgtcctggagttgctgctggagtttgtctacacgggctccctggtcatcgactcggccaacgccaagacactgctggaggcggccagcaagttccagttccacaccttctgcaaagtctgcgtgtcctttctcgagaagcagctgacggccagcaactgcctgggcgtgctggccatggccgaggccatgcagtgcagcgagctctaccacatggccaaggccttcgcgctgcagatcttccccgaggtggccgcccaggaggagatcctcagcatctccaaggacgacttcatcgcctacgtctccaacgacagcctcaacaccaaggctgaggagctggtgtacgagacagtcatcaagtggatcaagaaggaccccgcgacacgcacacagtacgcggctgagctcctggccgtggtccgcctccccttcatccaccccagctacctgctcaatgtggttgacaatgaagagctgatcaagtcatcagaagcctgccgggacctggtgaacgaggccaaacgctaccatatgctgccccacgcccgccaggagatgcagacgccccgaacccggccgcgcctctctgcaggtgtggctgaggtcatcgtcttggttgggggccgtcagatggtggggatgacccagcgctcgctggtggccgtcacctgctggaacccgcagaacaacaagtggtaccccttggcctcgctgcccttctatgaccgcgagttcttcagtgtagtgagtgcaggggacaacatctacctctcaggtgggatggaatcaggggtgacgctggctgatgtctggtgctacatgtccctgcttgataactggaacctcgtctccagaatgacagtcccccgctgtcggcacaatagcctcgtctacgatgggaagatttacaccctcgggggacttggcgtggcaggcaacgtggaccangtggagaggtacgacaccatcaccaaccaatgggaggcggtggcccctctgcccaaggcagtacactctgctgcagccacagtgtgtggcggcaagatctacgtgtttggtggggtgaacgaggcaggccgagctgccggcgtcctccagtcttacgttcctcagaccaacacgtggagcttcatcgagtccccaatgattgacaacaagtatgcccccgctgtcacgctcaatggcttcgttttcatcctgggcggggcttatgccagagctaccaccatctacgaccctgagaaaggaaacattaaggcgggcccaaacatgaaccactctcgccagttctgcagtgctgtggtgcttgatggcaagatttatgcaactggaggtattgtcagcagtgaagggcccgcgctgggcaacatggaggcctacgagcccacaaccaacacatggaccctcctcccccacatgccctgccctgtgttcagacacggctgcgtcgtgataaagaaatatattcaaagcggctgacatcagcagaaagcccacgataagactgtggacaagtctggtgaggcaagtgccacgcaatgataattttccagcgacaccaacaagaggccaacaaaacacaatcaaggaactcactgcgctcaacatgttgaatattctctacattgaatgtagaaaatcatcctcgcctttggatgaaacggaggcaccgcgcttggagccgcaggaaccacgatcccgccatggggctggctgcctcctgaacaggggcgctcgctctgccaggtgcaatagagtttcacgtatttttcaactgggagagagaagctgttttttccttcctgcagagcaagcttgatccctaaacaaccatagatcagttatcttatgacaacattaggcatcaggctctcttggaataagatcaaagtgtccttatcactttgattcctacttttgttttttaaccgatctacactttcagtggccgacagaaaacgagggacaatactgtgcatcacaaggcctaggaggctgctggtccccactggggctgaagagaagcccagctgcccacgcggagccaggggtggcagctgtgggacagccggggagcagggacagcggtctgtccttcacaggtttttctactgtgtttttgctggagaaggacagtgattgcgctagctttctcttacccggtatgaattatttagatttctgaggcattttcttgataaacaaaaggctatttttaagtactgagaggaggagcaggccacaagagggataatgttgtgggaattcccaaagctctttgtaggtagtgccagaggggggcttttgctctcatttttctatgtgcagaatagaggatctctcctggggtgggcgatgcccccattttatttttagaaaaagtaactcccagacagccccataaaagctgtgcccaaggaagaagagtctgctctagaaggagcccggttctggctcaggacaccggcccagctccctccatgaggtcaagctgaggaccaggccagtgggaagggaaggagggagaattagcgtctataaagcacaggagactatttttgatattcatagctatatattaaggcacctgccacaagagctctcaggatggggacagccttcttagtggagccatggcagcaaggcctgagggcatgagcagaaccactcttcttgtcacatacgaacctgagaaaagggaagccaggagggaggtcacaccatggctcaaaagggaaaggccttcccacttgtccttagcccctcaaacctcacacggtcaacagtttccattccagggcaggagaatgctgccgccactgcgctgttgagttgaagttggtaccaaatacacatttaccacttttatatctgggaagtcaacttgccatcgtttcatgataacaaccatttataagagaaaaagacaggacacgctttccatcgttcagtatttgatgacacaaaattccagttctaatgttgggcatcaacttctagcactacgagtgtggctcccacttggacaagataccgagcttcgttatgcagtttttaatattatttattattttaaaaagtaataagcacaaaactacatacattgtatgtcatttaaagtatttatgtcaaacagggtgcaagtgtgaacccaaggactggagcacaaattcctaactgcctggggcagggctaatgttagcattggtgtgcgtctgcctccaaaggaggttctagttgtcagcgagactcaacacagatgacattgaaattcgtttctctcctcatctatcacactggagcaaaactggctatttctgtgaatgatataaaacagggttctctgtaatggtattgtacatagtatatgtttactgttaagttcttgttatattataataaatatatttatagatctagacttggaa

SEQ ID NO: 307611 - DNA, 2707 bp, Homo sapiens
tgaaaatgtaaccagcagatgacgtttcttccatctcccttgcaggcacagggccatgggtgaccacggtggccgccgggaaccagcccaccctgatcgcacactcctatggagtggcccagcctcccaccttcagcccggctgtgaacgtccaggccccggtcattggggtgaccccctcactgcctccccacgtggggccccagctcccgctgatgccaggccactactcgctccctcagccgccctctcagccactgagcagcgtggtggtcaacatgcctgcccaggccctgtatgccagccctcagcccctggccgtgtccacactgcccggtgtggggcaggtggcccgcccaggacccaccgctgtgggcaacggccacatggcagggcccctgctgcctccaccgccgccagcccagccgtccgccactctccccagtggtgcccctgccaccaatgggccccccacaaccgactcggcccacgggctgcagatgctgcggaccattggcgtggggaagtatgagttcaccgacccggggcaccccagaggtaagtcctgctgccacgtgcctccccacgggcctgcgtctgcacctccctgcgcggtcactgcaacaccaccgggacagggggtgcttcatgccagctccttcactggcctccccaacccagaggctgcagtggagcctccacctgcccaagacaactggcctgagatgggggagggagggggaaggtgtggagggcgggacaaacaaagtgggaaaatgcgccggggtaagaagaggaaggaagggagagcctgcaaagcccagagcccgtccccctccagcccaagccctggccattctcacctccaacccccaaggccaggccaagctgcaaaagggtgagagtcatccactcctcttagggcaccgcagcagaacagtccctttgggggccttctccacattccatccatgaggacattcagagcatgtactgtgtccttcccagggaaggcactctctgtcgtgccatcggatgagagcactgtccacggcaaacagtctggcccaacggggtgtctacatctcttttgaaagaggacactagacggtcccagaaagtatgcatctctgggcacaacttcccagccttcccacataaaaccccttgagatggcatttcggggtgctctgcctttcggcagagcaaggaaccccactagccactctcctgtcttctctcccaagtctcttcctttgtcatttcaagcaattttcatgccttgtcaagcatcccaacaataaagctcatgtctggatctctgttgggtttaattcccaatctgactgagccctgactgcctttgttttggaaatcagcactagttttaaatgacaaaattgtagaaaattacatctaaattctggtaaactcttgctttaagatctttttttaaaaaatgactaaattgatttttttctttgcattgttttggttaagctctgtctccctttaaaaaaaaaaaaaaaaaagaaagaaagaaacttactcccagttcaagttcatgagttaccaactctgacaactgggcagcgggcatcctacttccaaggctatgccaaagcccaaggcaccgggtggcatattctgtccccacatagcccctctgggctaatgcaagatcttgctggcttgccacgttccaggcacgcatctaggaaaaggagctgttttgtgcaaaaaggtaactagctgagataggactggagtccctagtttggggctcagcaccaagctgggatctgccccaccaaagctgctgggtgcaggcagctaaacattgtcagccctgagcccatgagatcagaaagacacaggtggcggggacaggaccctgcaggacttctgtgcccactgggtcaatgaccattgcagagctgttcctgtaacctctgtgcaaggacctgagggtgtgaaccatcctctgtggtggtcctgagccaatggaagggaggggacaagaaataggggccctgctaagattccctctaccaggccccactgggcagaccgagggccaggtgtgagggccagggatggggtgggcctagaaagtgtcctcagccctgccttctggtgagccagcgggacccaccagctctagccagtgacaacaactgaccggtccatcaccctgatttccagaggttgccagcacactggctctttcctcgaaattccatgtaactcgcttctctatttacggcctcatcagctgatggagccccttatatttgcagggaagaaagagtgacgcacgcgcctacaaatgcctccaaactcaagcctgggtgggttttttctttttttaatatataagtaatttctcttttcatttctaatcttaaaagcctttattgctgaagctataatttgtctgtcagatctaatgtcaaacaactgcatattttttaaaataagaaacccgaattttgaaactaaatctttgaaacttgccatgtgagagtcgtgttcctgacaggaccacgtgggcttggatctgggtcacttttaattttgcccctagggattttacatctctgaagcccaattgatttcacactcctaaatgacagacagctggctccaggcaggaacaggaggctctgcgtgatggcgtcaacacaagtcagaactccactttaga

SEQ ID NO: 307612 - DNA, 496 bp, Homo sapiens
gggcgggggcgatgctgccggagccgccgccgccgccgccgcctcgatgagagccgcgccgcaccgctcatagccgcacaggctgacaggcaggaggaccgacttccctctcccgggcatcctccctgggctgccgggacgggcggcggcggaggaggaggaggaacgaggggagaaggcggagagcaggaacgcgaggaggaggacctggatccgtttcctccggccaggacccgagcggccccagccaccgctacccgccggcgctgtccgctctccatcagccctcctgcgcccacccgcgaccccgggctctctgcgcgtcgggccggggccggagccgcgcgccggagactatctggcttcctggtgatgctcacgctttgctaagtgttggcggccatcgtggttttcgcatcctggggacgaatcctgagcttgccagagacgggcggcgcaaggtccgggctctgtttccctgtgagaagccgcctcg

SEQ ID NO: 307613 - DNA, 3304 bp, Homo sapiens
  misc_feature (1867)..(1867): n is a, c, g, or t
  misc_feature (2122)..(2122): n is a, c, g, or t
  misc_feature (2675)..(2675): n is a, c, g, or t
cagcgaggccatcaccagcctcgtggccagctctgcgtctgcggtcaccaccaaggctcccggcatctccaaaggggacagtcagtcccagggactggcgaccagcatccggtgggggcagacgcctatcaatcagtccacaccctgggacactgatgagccaccctccaaacagatgagagagagtgacaatccaggcacagggccatgggtgaccacggtggccgccgggaaccagcccaccctgatcgcacactcctatggagtggcccagcctcccaccttcagcccggctgtgaacgtccaggccccggtcattggggtgaccccctcactgcctccccacgtggggccccagctcccgctgatgccaggccactactcgctccctcagccgccctctcagccactgagcagcgtggtggtcaacatgcctgcccaggccctgtatgccagccctcagcccctggccgtgtccacactgcccggtgtggggcaggtggcccgcccaggacccaccgctgtgggcaacggccacatggcagggcccctgctgcctccaccgccgccagcccagccgtccgccactctccccagtggtgcccctgccaccaatgggccccccacaaccgactcggcccacgggctgcagatgctgcggaccattggcgtggggaagtatgagttcaccgacccggggcaccccagagaaatgttgaaggaattgaaccagcaacgcagagcgaaagcgtttacagacctgaaaattgttgttgaaggcagagagtttgaagtccaccaaaatgttctagcttcctgcagcttgtatttcaaggacctgattcaaaggtccgtgcaagacagcggccagggcggccgggagaagctggagctcgtcctgtcgaacctgcaggcagacgtcctggagttgctgctggagtttgtctacacgggctccctggtcatcgactcggccaacgccaagacactgctggaggcggccagcaagttccagttccacaccttctgcaaagtctgcgtgtcctttctcgagaagcagctgacggccagcaactgcctgggcgtgctggccatggccgaggccatgcagtgcagcgagctctaccacatggccaaggccttcgcgctgcagatcttccccgaggtggccgcccaggaggagatcctcagcatctccaaggacgacttcatcgcctacgtctccaacgacagcctcaacaccaaggctgaggagctggtgtacgagacagtcatcaagtggatcaagaaggaccccgcgacacgcacacagtacgcggctgagctcctggccgtggtccgcctccccttcatccaccccagctacctgctcaatgtggttgacaatgaagagctgatcaagtcatcagaagcctgccgggacctggtgaacgaggccaaacgctaccatatgctgccccacgcccgccaggagatgcagacgccccgaacccggccgcgcctctctgcaggtgtggctgaggtcatcgtcttggttgggggccgtcagatggtggggatgacccagcgctcgctggtggccgtcacctgctggaacccgcagaacaacaagtggtaccccttggcctcgctgcccttctatgaccgcgagttcttcagtgtagtgagtgcaggggacaacatctacctctcaggtgggatggaatcaggggtgacgctggctgatgtctggtgctacatgtccctgcttgataactggaacctcgtctccagaatgacagtcccccgctgtcggcacaatagcctcgtctacgatgggaagatttacaccctcgggggacttggcgtggcaggcaacgtggaccangtggagaggtaatgaggccacggtcaggacaggggcatgctctttgctcaccaagaactgaaatcacgtcactcactgtacctcccaacacccactcagtggcgatggagcagagcctggaccattcatatgggcagtcatcccaggctcttcagtcacagcaccgggggcagcagggtgtgggatacaagcagatgggatgacatctgtgtcacctttgcagtcgctgagatgggagatggggcgcttctgtcncgacaacccatttaggtgtcagacaagctggaggcccaagatccagttgcagaaggcctgggatgagccagaccctcctggccaggcagtcagggaacaccctgcaccatgagcaccagcccagagactgctggggtttcgggcaaagctggaagcaatgtttaaaatgcaggtcatgccagtggcggtgcctccttgtcctgccaagcggggggtcccacaccagggagctcccttcctccctccagccacacacaccaggacatctgttcgtaatacagagaaaggccactgcatacaaactaagcaatttagggagaacattcttgccaaccctctagaactttccagaagaaaaaataagccaaaggaccacgtgtgaacctgccctccgctgggagtcccagcctggcttcctcccaaggccattgtggagggtcagatacaggcatgaggggcgtgggctgaagtgggtgcttccggatgagaatacaaaatccttttcccttgagccagggagactgttctttcttacagagaacagatgcctggnggaaaagctcaggaagctttgtcaggcagcagaacggaggcttagtcctgcttttggagaaactagtgcctggagggtaacccgtcaggctgacctggcccaaagcacaacccaggggagacagctaagattgccagagcccctcctgcacctgagcccaccacccccaccgccatgtgtcaccagaaagcacatcttcccgtgggacatcatgttgcctatgaagccacacatacccctcaatttgtatttttcccccttggtggctaattggacacttgacaaatgttacagcaaagacggttgcagagtgaggcaggctctgaatgctcattgtgggcttttaactcctcccccaagtagagcccagagatggctcagtaacaacatttagttatcatattgatctggcaatcatgggcattcccacgtgaaaatgaggatattagcgcagttgctggagctgggttggccccggtgctggcagccttcagtgtgacccactgcccagctatgcataccccaagcattctggaagcatcggcttccgatcatttgtcatccaataataaacaaacacatgaaaaatgagacattttctctgtaggagtaaactgaactggatccgt

SEQ ID NO: 307614 - DNA, 2723 bp, Homo sapiens
tctgcacagacgctgccataggcagaaagagcccactgatgttccagaggaaggccgagagggctagtttggacgagaccccaggaggtcttgagtgtctcatcgcagtgccccccactgctggtgtgatctcaggctatgctggccatgctgagggcgaggagcagatggcagtttgctgcccttgcttgtgacctctgccccgcacaaggtccatcttgaccctgggctctttttctcctctcctgcaggtacgacaccatcaccaaccaatgggaggcggtggcccctctgcccaaggcagtacactctgctgcagccacagtgtgtggcggcaagatctacgtgtttggtggggtgaacgaggcaggccgagctgccggcgtcctccagtcttacgttcctcagaccaacacgtggagcttcatcgagtccccaatgattgacaacaagtatgcccccgctgtcacgctcaatggcttcgttttcatcctgggcggggcttatgccagagctaccaccatctacgaccctgagaaaggaaacattaaggcgggcccaaacatgaaccactctcgccagttctgcagtgctgtggtgcttgatggcaagatttatgcaactggaggtattgtcagcagtgaagggcccgcgctgggcaacatggaggcctacgagcccacaaccaacacatggaccctcctcccccacatgccctgccctgtgttcagacacggctgcgtcgtgataaagaaatatattcaaagcggctgacatcagcagaaagcccacgataagactgtggacaagtctggtgaggcaagtgccacgcaatgataattttccagcgacaccaacaagaggccaacaaaacacaatcaaggaactcactgcgctcaacatgttgaatattctctacattgaatgtagaaaatcatcctcgcctttggatgaaacggaggcaccgcgcttggagccgcaggaaccacgatcccgccatggggctggctgcctcctgaacaggggcgctcgctctgccaggtgcaatagagtttcacgtatttttcaactgggagagagaagctgttttttccttcctgcagagcaagcttgatccctaaacaaccatagatcagttatcttatgacaacattaggcatcaggctctcttggaataagatcaaagtgtccttatcactttgattcctacttttgttttttaaccgatctacactttcagtggccgacagaaaacgagggacaatactgtgcatcacaaggcctaggaggctgctggtccccactggggctgaagagaagcccagctgcccacgcggagccaggggtggcagctgtgggacagccggggagcagggacagcggtctgtccttcacaggtttttctactgtgtttttgctggagaaggacagtgattgcgctagctttctcttacccggtatgaattatttagatttctgaggcattttcttgataaacaaaaggctatttttaagtactgagaggaggagcaggccacaagagggataatgttgtgggaattcccaaagctctttgtaggtagtgccagaggggggcttttgctctcatttttctatgtgcagaatagaggatctctcctggggtgggcgatgcccccattttatttttagaaaaagtaactcccagacagccccataaaagctgtgcccaaggaagaagagtctgctctagaaggagcccggttctggctcaggacaccggcccagctccctccatgaggtcaagctgaggaccaggccagtgggaagggaaggagggagaattagcgtctataaagcacaggagactatttttgatattcatagctatatattaaggcacctgccacaagagctctcaggatggggacagccttcttagtggagccatggcagcaaggcctgagggcatgagcagaaccactcttcttgtcacatacgaacctgagaaaagggaagccaggagggaggtcacaccatggctcaaaagggaaaggccttcccacttgtccttagcccctcaaacctcacacggtcaacagtttccattccagggcaggagaatgctgccgccactgcgctgttgagttgaagttggtaccaaatacacatttaccacttttatatctgggaagtcaacttgccatcgtttcatgataacaaccatttataagagaaaaagacaggacacgctttccatcgttcagtatttgatgacacaaaattccagttctaatgttgggcatcaacttctagcactacgagtgtggctcccacttggacaagataccgagcttcgttatgcagtttttaatattatttattattttaaaaagtaataagcacaaaactacatacattgtatgtcatttaaagtatttatgtcaaacagggtgcaagtgtgaacccaaggactggagcacaaattcctaactgcctggggcagggctaatgttagcattggtgtgcgtctgcctccaaaggaggttctagttgtcagcgagactcaacacagatgacattgaaattcgtttctctcctcatctatcacactggagcaaaactggctatttctgtgaatgatataaaacagggttctctgtaatggtattgtacatagtatatgtttactgttaagttcttgttatattataataaatatatttatagatctagacttggaa

SEQ ID NO: 307615 - DNA, 1117 bp, Homo sapiens
cagcgaggccatcaccagcctcgtggccagctctgcgtctgcggtcaccaccaaggctcccggcatctccaaaggggacagtcagtcccagggactggcgaccagcatccggtgggggcagacgcctatcaatcagtccacaccctgggacactgatgagccaccctccaaacagatgagagagagtgacaatccaggcacagggccatgggtgaccacggtggccgccgggaaccagcccaccctgatcgcacactcctatggagtggcccagcctcccaccttcagcccggctgtgaacgtccaggccccggtcattggggtgaccccctcactgcctccccacgtggggccccagctcccgctgatgccaggccactactcgctccctcagccgccctctcagccactgagcagcgtggtggtcaacatgcctgcccaggccctgtatgccagccctcagcccctggccgtgtccacactgcccggtgtggggcaggtggcccgcccaggacccaccgctgtgggcaacggccacatggcagggcccctgctgcctccaccgccgccagcccagccgtccgccactctccccagtggtgcccctgccaccaatgggccccccacaaccgactcggcccacgggctgcagatgctgcggaccattggcgtggggaagtatgagttcaccgacccggggcaccccagagaaatgttgaaggaattgaaccagcaacgcagagcgaaagcgtttacagacctgaaaattgttgttgaaggcagagagtttgaagtccaccaaaatgttctagcttcctgcagcttgtatttcaaggacctgattcaaaggtccgtgcaagacagcggccagggcggccgggagaagctggagctcgtcctgtcgaacctgcaggcagacgtcctggagttgctgctggagtttgtctacacgggctccctggtcatcgactcggccaacgccaagacactgctggaggcggccagcaagttccagttccacaccttctgcaaagtctgcgtgtcctttctcggtgagcccgggggccacatatgtcgcttggggggaagagtgcagatgggcggcgttggatgcagt

SEQ ID NO: 307616 - DNA, 510 bp, Homo sapiens
aggtgggttgcagaggcaggctgcatcccggaatcatgttgtcccactgcctattaatagaacaagtgaagggcagaatgctggaacacaccagacatagagggagggaggtcctgccagatgtgtctacacaactgtctacatagcatgacagtagcagtggattcgggacccacctgtacatgtttccaaagctccttcctgcacactcgggacctcagctccaaggcgtgactcatttctcagtctcaccatcctttgttggctcagacatcgcatgcctctgccccactggggttgtgtgcctgcgtctctcacttctttgaggttggggaaagcctagtccagaaaatgaaaacccatagaccagcctaacttcctttcaaccaagtgacggcctcctggttcctctcagttcatcatcaaaatcagtgtgtacatgtcatacaagccaagagtgttcatgtcctcgttcctttcaaatgaaggtgatatatactttttcactga

SEQ ID NO: 307617 - DNA, 2411 bp, Homo sapiens
aggtgggttgcagaggcaggctgcatcccggaatcatgttgtcccactgcctattaatagaacaagtgaagggcagaatgctggaacacaccagacatagagggagggaggtcctgccagatgtgtctacacaactgtctacatagcatgacagtagcagtggattcgggacccacctgtacatgtttccaaagctccttcctgcacactcgggacctcagctccaaggcgtgactcatttctcagtctcaccatcctttgttggctcagacatcgcatgcctctgccccactggggttgtgtgcctgcgtctctcacttctttgaggttggggaaagcctagtccagaaaatgaaaacccatagaccagcctaacttcctttcaaccaagtgacggcctcctggttcctctcagttcatcatcaaaatcagtgtgtacatgtcatacaagccaagagtgttcatgtcctcgttcctttcaaatgaaggtgatatatactttttcactgagtttttattcctgaaattctttcttctggagcaggaagcaaatgtcctggaatcgtagacttttacagtcagaagggtcattcacgttcatctagtgcccctctcactctgcagggatcctcctgcctctcctctgcccctgtccagtgcctggtggtccagcctgtgatgggcaggcctaggctgccatccgcaggctctgtagttctgctttctattgaaccaagatgtttctacgttgcctattggtcgtggttctgtccagagcagttcaggctggggctgttcacttgcccctccttgaggcagacctttagatattttcagttttcatcacatgtctaacaccacttccaccccacccctcacctcttaggctaaatccaagctaaatcccccaatgtcttttttttttttttttttttgagacgagtctcatctgtcacccaggctggagtgcaatggcatggtctcggctcactgcaacctccgcctcctgggttcaagctattctgcctcagcctcccaaggagccaggactacaggtgcatgccaccacgcccggctaatttttgtattttttagtagagacagggtttcacccagccattgagacaagctggtttcaaactcctgaccttgtggtccgcccgccccggcctcccagagtgctgggattacaggcgtgagccaccgcgcccatctcccctgcaatgtctttagttagaccttttccaccatcatgtctaactgggctacggtttggggaaagtgtccaaattagtccgtgttatcctaaaaggggtgtgccccggattagcagggccagggctagggtgagacaaatgaggcacctggggcatacatttaagttggtgcttgcttgcaggtgccaagagagtgctccttgggtttacccccgtggtgcctcctttacctcattctggccccagccctggggttagagtcgcaccagtgtggtccaagtggcataattatctccctaaatgcttgggcagcatcagctttcagtagctgtgccccatgggaggcacattaagctagtggcaagttgagactgcagacctcagcttaatatcagttgttgcccaagacagatctcaccccacatcttcatgacaggcctaacaacaaggcactttgcccttaatcctctactactgcctgctcttcattttgggccaactgtacagctcattttgagatagtagctgatcatttttctgatcagttaactttgtcttattaagcaaaatggagaatataatgttgggaaataagtgtgttgattaaaagaaagtatccccttctaccatcttccatttgtgtctgggttgtgctgggtaaagttctagacttactaacgcagacttcattttggtccggtttccacagcatgcctcgggcatcagtgtccaggagtagctgtatttgaggtttccttcactctggtaggttcctgattcctgatgaaaataacttgaaaaaaaaataattatactactgatcctcttttgggataatgaaattgcgaaggaatgttgttgattataacttttattttttaatgtacagatgtactgtctctcattgagcactgatagaatttatttttctttcaatagtttaaaatcacttatgtggagacacatacttaagtgtgttcaactcgttttcttcccacatatctagtgtgacctttaaaaaccacaactttattttggacattaaatgtgcaatattcactacttattcattgttccacatttttcatacttgtacaaagggtaagtttttatataatggtgagaaacaggaagaaatgacaactggttaagtaaaattctgcaaataaactagattcgaatttaatttaaaca

SEQ ID NO: 307618 - DNA, 2014 bp, Homo sapiens
aggtgggttgcagaggcaggctgcatcccggaatcatgttgtcccactgcctattaatagaacaagtgaagggcagaatgctggaacacaccagacatagagggagggaggtcctgccagatgtgtctacacaactgtctacatagcatgacagtagcagtggattcgggacccacctgtacatgtttccaaagctccttcctgcacactcgggacctcagctccaaggcgtgactcatttctcagtctcaccatcctttgttggctcagacatcgcatgcctctgccccactggggttgtgtgcctgcgtctctcacttctttgaggttggggaaagcctagtccagaaaatgaaaacccatagaccagcctaacttcctttcaaccaagtgacggcctcctggttcctctcagttcatcatcaaaatcagtgtgtacatgtcatacaagccaagagtgttcatgtcctcgttcctttcaaatgaaggtgatatatactttttcactgagtttttattcctgaaattctttcttctggagcaggaagcaaatgtcctggaatcgtagacttttacagtcagaagggtcattcacgttcatctagtgcccctctcactctgcagggatcctcctgcctctcctctgcccctgtccagtgcctggtggtccagcctgtgatgggcaggcctaggctgccatccgcaggctctgtagttctgctttctattgaaccaagatgtttctacgttgcctattggtcgtggttctgtccagagcagttcaggctggggctgttcacttgcccctccttgaggcagacctttagatattttcagttttcatcacatgtctaacaccacttccaccccacccctcacctcttaggctaaatccaagctaaatcccccaatgtcttttttttttttttttttttgagacgagtctcatctgtcacccaggctggagtgcaatggcatggtctcggctcactgcaacctccgcctcctgggttcaagctattctgcctcagcctcccaaggagccaggactacaggtgcatgccaccacgcccggctaatttttgtattttttagtagagacagggtttcacccagccattgagacaagctggtttcaaactcctgaccttgtggtccgcccgccccggcctcccagagtgctgggattacaggcgtgagccaccgcgcccatctcccctgcaatgtctttagttagaccttttccaccatcatgtctaactgggctacggtttggggaaagtgtccaaattagtccgtgttatcctaaaaggggtgtgccccggattagcagggccagggctagggtgagacaaatgaggcacctggggcatacatttaagttggtgcttgcttgcaggtgccaagagagtgctccttgggtttacccccgtggtgcctcctttacctcattctggccccagccctggggttagagtcgcaccagtgtggtccaagtggcataattatctccctaaatgcttgggcagcatcagctttcagtagctgtgccccatgggaggcacattaagctagtggcaagttgagactgcagacctcagcttaatatcagttgttgcccaagacagatctcaccccacatcttcatgacaggcctaacaacaaggcactttgcccttaatcctctactactgcctgctcttcattttgggccaactgtacagctcattttgagatagtagctgatcatttttctgatcagttaactttgtcttattaagcaaaatggagaatataatgttgggaaataagtgtgttgattaaaagaaagtatccccttctaccatcttccatttgtgtctgggttgtgctgggtaaagccaccccctcccctccctttctcccatgcccccagggttgggccagttttgggtggggcagagggtcccagattggctcacactgagaatgtaagaactacaaacagaatttcaattaaattaaattttgtgtc

SEQ ID NO: 307619 - DNA, 1483 bp, Homo sapiens
  misc_feature (518)..(518): n is a, c, g, or t
gggcgtcttcggctcccaccccggggcgtgggcctgggggtccctcttcactgcgcagccacctctagcccgccgctttcgggactctcagccttcttttcccttccctgagggccggccggcaccacaacggggccaaaggcagtaactcggttgaaaggcgcgccctgggacaggtcagcgggctccgccatgcgcggcacgcatcccgcaggagcgggtgccagagcagggtaggccgggagttagcagcccagccaggccgctggactcgggctaggggcggggccagcgcagggggcgcaggcgcacaccgcctccgcggcagcatggcggacgcagctcctcaactaggcaagaggaagcgcgaattggacgtggaggaggcccacgccgccagcacagaggaaaaggaggcaggagttggaaatggtacctgtgctcctgtccgcttaccgttctccggcttcagactgcagaaggtgctgagggagtctgcgcgggacaaaatcattttnctacacgggaaggtgaatgaggcctctggggatggggatggagaggatgccgttgtgatcctggagaagacgccatttcaggtggaacaggtggctcagctcctgacgggcagccctgagctccaattgcagttctccaatgatatctacagcacctatcacttgttccctccaagacaactgaatgatgtaaagacgaccgtggtttaccctgccacagagaaacacctgcagaagtacctgcgccaggacctccgcctgatccgagagacgggagatgactacaggaatattactttaccccacctggagtcccagagcctcagcatccagtgggtgtataacattctcgacaagaaggctgaagcggaccggattgttttcgagaacccagatccctctgatggttttgtcctcatccctgacctcaagtggaaccaacagcagctcgatgacttgtacttgatcgccatctgccatcgccggggcatcagatccctacgcgaccttactccggagcacttgccgctgctcaggaacatcctccaccaggggcaggaggccatcctgcagcgctaccggatgaagggagaccatctgcgagtatacctgcactacctgccctcctactaccacctgcatgtgcacttcaccgccctgggcttcgaggcccccggctcaggcgtggagcgggcccacctgctggctgaggtgatcgagaacttggagtgtgaccctaggcactaccagcagcgcacgctcaccttcgccctcagggctgacgaccccctgctcaagctcttgcaggaggctcagcaaagctgaattaactcaggcagaagagcacagatgtgtgggattgggggaggagtggggacaagattttttatctccaagtgaattttctaaaaatgtattttataccggcttattcctagtattgaataaactagcgggctcactca

SEQ ID NO: 307620 - DNA, 678 bp, Homo sapiens
gttaaataagttgaagcgtcgatactaaaaaaatttcgcgtgctcgtgggtgtataacattctcgacaagaaggctgaagcggaccggattgttttcgagaacccagatccctctgatggttttgtcctcatccctgacctcaagtggaaccaacagcagctcgatgacttgtacttgatcgccatctgccatcgccggggcatcagatccctacgcgaccttactccggagcacttgccgctgctcaggaacatcctccaccaggggcaggaggccatcctgcagcgctaccggatgaagggagaccatctgcgagtatacctgcactacctgccctcctactaccacctgcatgtgcacttcaccgccctgggcttcgaggcccccggctcaggcgtggagcgggcccacctgctggctgaggtgatcgagaacttggagtgtgaccctaggcactaccagcagcgcacgctcaccttcgccctcagggctgacgaccccctgctcaagctcttgcaggaggctcagcaaagctgaattaactcaggcagaagagcacagatgtgtgggattgggggaggagtggggacaagattttttatctccaagtgaattttctaaaaatgtattttataccggcttattcctagtattgaataaactagcgggctcactca

SEQ ID NO: 307621 - DNA, 680 bp, Homo sapiens
gagaggggggtagggggttatatattgtcccaaccagcagcggcgtcgtgggtgtataacattctcgacaagaaggctgaagcggaccggattgttttcgagaacccagatccctctgatggttttgtcctcatccctgacctcaagtggaaccaacagcagctcgatgacttgtacttgatcgccatctgccatcgccggggcatcagatccctacgcgaccttactccggagcacttgccgctgctcaggaacatcctccaccaggggcaggaggccatcctgcagcgctaccggatgaagggagaccatctgcgagtatacctgcactacctgccctcctactaccacctgcatgtgcacttcaccgccctgggcttcgaggcccccggctcaggcgtggagcgggcccacctgctggctgaggtgatcgagaacttggagtgtgaccctaggcactaccagcagcgcacgctcaccttcgccctcagggctgacgaccccctgctcaagctcttgcaggaggctcagcaaagctgaattaactcaggcagaagagcacagatgtgtgggattgggggaggagtggggacaagattttttatctccaagtgaattttctaaaaatgtattttataccggcttattcctagtattgaataaactagcgggctcactca

SEQ ID NO: 307622 - DNA, 495 bp, Homo sapiens
cggacgcgtgggtctatcaccctatagattgggcgaccttactccggagcacttgccgctgctcaggaacatcctccaccaggggcaggaggccatcctgcagcgctaccggatgaagggagaccatctgcgagtatacctgcactacctgccctcctactaccacctgcatgtgcacttcaccgccctgggcttcgaggcccccggctcaggcgtggagcgggcccacctgctggctgaggtgatcgagaacttggagtgtgaccctaggcactaccagcagcgcacgctcaccttcgccctcagggctgacgaccccctgctcaagctcttgcaggaggctcagcaaagctgaattaactcaggcagaagagcacagatgtgtgggattgggggaggagtggggacaagattttttatctccaagtgaattttctaaaaatgtattttataccggcttattcctagtattgaataaactagcgggctcactca

SEQ ID NO: 307623 - DNA, 1178 bp, Homo sapiens
  misc_feature (213)..(213): n is a, c, g, or t
tatacaggctaggtagcgaggcctgggttgcgcgcagctcctcaactaggcaagaggaagcgcgaattggacgtggaggaggcccacgccgccagcacagaggaaaaggaggcaggagttggaaatggtacctgtgctcctgtccgcttaccgttctccggcttcagactgcagaaggtgctgagggagtctgcgcgggacaaaatcattttnctacacgggaaggtgaatgaggcctctggggatggggatggagaggatgccgttgtgatcctggagaagacgccatttcaggtggaacaggtggctcagctcctgacgggcagccctgagctccaattgcagttctccaatgatatctacagcacctatcacttgttccctccaagacaactgaatgatgtaaagacgaccgtggtttaccctgccacagagaaacacctgcagaagtacctgcgccaggacctccgcctgatccgagagacgggagatgactacaggaatattactttaccccacctggagtcccagagcctcagcatccagtgggtgtataacattctcgacaagaaggctgaagcggaccggattgttttcgagaacccagatccctctgatggttttgtcctcatccctgacctcaagtggaaccaacagcagctcgatgacttgtacttgatcgccatctgccatcgccggggcatcagatccctacgcgaccttactccggagcacttgccgctgctcaggaacatcctccaccaggggcaggaggccatcctgcagcgctaccggatgaagggagaccatctgcgagtatacctgcactacctgccctcctactaccacctgcatgtgcacttcaccgccctgggcttcgaggcccccggctcaggcgtggagcgggcccacctgctggctgaggtgatcgagaacttggagtgtgaccctaggcactaccagcagcgcacgctcaccttcgccctcagggctgacgaccccctgctcaagctcttgcaggaggctcagcaaagctgaattaactcaggcagaagagcacagatgtgtgggattgggggaggagtggggacaagattttttatctccaagtgaattttctaaaaatgtattttataccggcttattcctagtattgaataaactagcgggctcactca

SEQ ID NO: 307624 - DNA, 1130 bp, Homo sapiens
tatacaggctaggtagcgaggcctgggttgcgcgcagctcctcaactaggcaagaggaagcgcgaattggacgtggaggaggcccacgccgccagcacagaggaaaaggaggcaggagttggaaatggtacctgtgctcctgtccgcttaccgttctccggcttcagactgcagaaggtgaatgaggcctctggggatggggatggagaggatgccgttgtgatcctggagaagacgccatttcaggtggaacaggtggctcagctcctgacgggcagccctgagctccaattgcagttctccaatgatatctacagcacctatcacttgttccctccaagacaactgaatgatgtaaagacgaccgtggtttaccctgccacagagaaacacctgcagaagtacctgcgccaggacctccgcctgatccgagagacgggagatgactacaggaatattactttaccccacctggagtcccagagcctcagcatccagtgggtgtataacattctcgacaagaaggctgaagcggaccggattgttttcgagaacccagatccctctgatggttttgtcctcatccctgacctcaagtggaaccaacagcagctcgatgacttgtacttgatcgccatctgccatcgccggggcatcagatccctacgcgaccttactccggagcacttgccgctgctcaggaacatcctccaccaggggcaggaggccatcctgcagcgctaccggatgaagggagaccatctgcgagtatacctgcactacctgccctcctactaccacctgcatgtgcacttcaccgccctgggcttcgaggcccccggctcaggcgtggagcgggcccacctgctggctgaggtgatcgagaacttggagtgtgaccctaggcactaccagcagcgcacgctcaccttcgccctcagggctgacgaccccctgctcaagctcttgcaggaggctcagcaaagctgaattaactcaggcagaagagcacagatgtgtgggattgggggaggagtggggacaagattttttatctccaagtgaattttctaaaaatgtattttataccggcttattcctagtattgaataaactagcgggctcactca

SEQ ID NO: 307625 - DNA, 1726 bp, Homo sapiens
  misc_feature (518)..(518): n is a, c, g, or t
gggcgtcttcggctcccaccccggggcgtgggcctgggggtccctcttcactgcgcagccacctctagcccgccgctttcgggactctcagccttcttttcccttccctgagggccggccggcaccacaacggggccaaaggcagtaactcggttgaaaggcgcgccctgggacaggtcagcgggctccgccatgcgcggcacgcatcccgcaggagcgggtgccagagcagggtaggccgggagttagcagcccagccaggccgctggactcgggctaggggcggggccagcgcagggggcgcaggcgcacaccgcctccgcggcagcatggcggacgcagctcctcaactaggcaagaggaagcgcgaattggacgtggaggaggcccacgccgccagcacagaggaaaaggaggcaggagttggaaatggtacctgtgctcctgtccgcttaccgttctccggcttcagactgcagaaggtgctgagggagtctgcgcgggacaaaatcattttnctacacgggaaggtgaatgaggcctctggggatggggatggagaggatgccgttgtgatcctggagaagacgccatttcaggtggaacaggtggctcagctcctgacgggcagccctgagctccaattgcagttctccaatgatatctacagcacctatcacttgttccctccaagacaactgaatggggacacattggcaatgtctggagacattttgggttgtcacaacttggggagggtgctactaacatcccaacagaggccacagggatgcagctgaacatccttcaatgcacaggacagcccctgcaacagaattatccaggccaaaatgtcagtggtgctgagattgagaaaccctggattaaacatcacagcacttatgtggtgtttactgtgtgccagacattgttttaagaacttcacagatgtaaagacgaccgtggtttaccctgccacagagaaacacctgcagaagtacctgcgccaggacctccgcctgatccgagagacgggagatgactacaggaatattactttaccccacctggagtcccagagcctcagcatccagtgggtgtataacattctcgacaagaaggctgaagcggaccggattgttttcgagaacccagatccctctgatggttttgtcctcatccctgacctcaagtggaaccaacagcagctcgatgacttgtacttgatcgccatctgccatcgccggggcatcagatccctacgcgaccttactccggagcacttgccgctgctcaggaacatcctccaccaggggcaggaggccatcctgcagcgctaccggatgaagggagaccatctgcgagtatacctgcactacctgccctcctactaccacctgcatgtgcacttcaccgccctgggcttcgaggcccccggctcaggcgtggagcgggcccacctgctggctgaggtgatcgagaacttggagtgtgaccctaggcactaccagcagcgcacgctcaccttcgccctcagggctgacgaccccctgctcaagctcttgcaggaggctcagcaaagctgaattaactcaggcagaagagcacagatgtgtgggattgggggaggagtggggacaagattttttatctccaagtgaattttctaaaaatgtattttataccggcttattcctagtattgaataaactagcgggctcactca

SEQ ID NO: 307626 - DNA, 1175 bp, Homo sapiens
gaagtaatctatgggagatattttgagactgtgcctgtgtatcgtgtttcccaacgtgttttcacctgatggtttgattgtttattgagcattgactcctgaccaaactcctcctgaagttcagctgcaggtcaacatcttgacgggcattgaggggacacattggcaatgtctggagacattttgggttgtcacaacttggggagggtgctactaacatcccaacagaggccacagggatgcagctgaacatccttcaatgcacaggacagcccctgcaacagaattatccaggccaaaatgtcagtggtgctgagattgagaaaccctggattaaacatcacagcacttatgtggtgtttactgtgtgccagacattgttttaagaacttcacagatgtaaagacgaccgtggtttaccctgccacagagaaacacctgcagaagtacctgcgccaggacctccgcctgatccgagagacgggagatgactacaggaatattactttaccccacctggagtcccagagcctcagcatccagtgggtgtataacattctcgacaagaaggctgaagcggaccggattgttttcgagaacccagatccctctgatggttttgtcctcatccctgacctcaagtggaaccaacagcagctcgatgacttgtacttgatcgccatctgccatcgccggggcatcagatccctacgcgaccttactccggagcacttgccgctgctcaggaacatcctccaccaggggcaggaggccatcctgcagcgctaccggatgaagggagaccatctgcgagtatacctgcactacctgccctcctactaccacctgcatgtgcacttcaccgccctgggcttcgaggcccccggctcaggcgtggagcgggcccacctgctggctgaggtgatcgagaacttggagtgtgaccctaggcactaccagcagcgcacgctcaccttcgccctcagggctgacgaccccctgctcaagctcttgcaggaggctcagcaaagctgaattaactcaggcagaagagcacagatgtgtgggattgggggaggagtggggacaagattttttatctccaagtgaattttctaaaaatgtattttataccggcttattcctagtattgaataaactagcgggctcactca

SEQ ID NO: 307627 - DNA, 892 bp, Homo sapiens
atctgctgagtgatctagaggatcccactagtcacggttggttacatcattcattgcagttctccaatgatatctacagcacctatcacttgttccctccaagacaactgaatgatgtaaagacgaccgtggtttaccctgccacagagaaacacctgcagaagtacctgcgccaggacctccgcctgatccgagagacgggagatgactacaggaatattactttaccccacctggagtcccagagcctcagcatccagtgggtgtataacattctcgacaagaaggctgaagcggaccggattgttttcgagaacccagatccctctgatggttttgtcctcatccctgacctcaagtggaaccaacagcagctcgatgacttgtacttgatcgccatctgccatcgccggggcatcagatccctacgcgaccttactccggagcacttgccgctgctcaggaacatcctccaccaggggcaggaggccatcctgcagcgctaccggatgaagggagaccatctgcgagtatacctgcactacctgccctcctactaccacctgcatgtgcacttcaccgccctgggcttcgaggcccccggctcaggcgtggagcgggcccacctgctggctgaggtgatcgagaacttggagtgtgaccctaggcactaccagcagcgcacgctcaccttcgccctcagggctgacgaccccctgctcaagctcttgcaggaggctcagcaaagctgaattaactcaggcagaagagcacagatgtgtgggattgggggaggagtggggacaagattttttatctccaagtgaattttctaaaaatgtattttataccggcttattcctagtattgaataaactagcgggctcactca

SEQ ID NO: 307628 - DNA, 1913 bp, Homo sapiens
  misc_feature (518)..(518): n is a, c, g, or t
gggcgtcttcggctcccaccccggggcgtgggcctgggggtccctcttcactgcgcagccacctctagcccgccgctttcgggactctcagccttcttttcccttccctgagggccggccggcaccacaacggggccaaaggcagtaactcggttgaaaggcgcgccctgggacaggtcagcgggctccgccatgcgcggcacgcatcccgcaggagcgggtgccagagcagggtaggccgggagttagcagcccagccaggccgctggactcgggctaggggcggggccagcgcagggggcgcaggcgcacaccgcctccgcggcagcatggcggacgcagctcctcaactaggcaagaggaagcgcgaattggacgtggaggaggcccacgccgccagcacagaggaaaaggaggcaggagttggaaatggtacctgtgctcctgtccgcttaccgttctccggcttcagactgcagaaggtgctgagggagtctgcgcgggacaaaatcattttnctacacgggaaggtgaatgaggcctctggggatggggatggagaggatgccgttgtgatcctggagaagacgccatttcaggtggaacaggtggctcagctcctgacgggcagccctgagctccaattgcagttctccaatgatatctacagcacctatcacttgttccctccaagacaactgaatgatgtaaagacgaccgtggtttaccctgccacagagaaacacctgcagaagtacctgcgccaggacctccgcctgatccgagagacgggagatgactacaggaatattactttaccccacctggagtcccagagcctcagcatccagtgggtgtataacattctcgacaagaaggctgaagcggaccggattgttttcgagaacccagatccctctgatggttttgtcctcatccctgacctcaagtggaaccaacagcagctcgatgacttgtacttgatcgccatctgccatcgccggggcatcagatccctacgcgaccttactccggagcacttgccgctgctcaggaacatcctccaccaggggcaggaggccatcctgcagcgctaccggatgaagggagaccatctgcgagtatacctgcactacctgccctcctactaccacctgcatgtgcacttcaccgccctgggcttcgaggcccccggctcaggcgtggagcgggcccacctgctggctgaggtgatcgagaacttggagtgtgaccctaggcactaccagcagcgcacgctcaccttcgccctcagggctgacgaccccctgctcaagctcttgcaggaggctcagcaaagctgaattaactcaggcagaagagcacagatgtgtgggattgggggaggagtggggacaagattttttatctccaagtgaattttctaaaaatgtattttataccggcttattcctagtattgaataaactagcgggctcactcaaaaaaaaaaaaagaaaaaaagaagacgaaagcactaagagaggggcggcggccgccacctcagaggaagtctcccccgcgggggggggccaccaaccatgatgagacatctgacaccccaacgattcgtgtagagcacacgaagcggcgggcccccacacaaaatgaggaagggctgcgtaaataaatagaacacacggacatcccgagccgcgcgacgatataacagaaaccgagcccggcagacagggcggacaaccgcacgcgtgcacagcagggagagacagaacctggcggtggaaagcagcacacaaccaaacaaatgagctgggggggcgggggcgaaacaaccaaatcgtggggcgcaaacactcacctcacgagcagagaatgacatcagacagccgatcgcagcaggacgacgccaatac

SEQ ID NO: 307629 - DNA, 684 bp, Homo sapiens
  misc_feature (41)..(41): n is a, c, g, or t
ccaaaataccgcgacgcctggaggtggcagcgccccgaccnacaccctctcgtgggtgtataacattctcgacaagaaggctgaagcggaccggattgttttcgagaacccagatccctctgatggttttgtcctcatccctgacctcaagtggaaccaacagcagctcgatgacttgtacttgatcgccatctgccatcgccggggcatcagatccctacgcgaccttactccggagcacttgccgctgctcaggaacatcctccaccaggggcaggaggccatcctgcagcgctaccggatgaagggagaccatctgcgagtatacctgcactacctgccctcctactaccacctgcatgtgcacttcaccgccctgggcttcgaggcccccggctcaggcgtggagcgggcccacctgctggctgaggtgatcgagaacttggagtgtgaccctaggcactaccagcagcgcacgctcaccttcgccctcagggctgacgaccccctgctcaagctcttgcaggaggctcagcaaagctgaattaactcaggcagaagagcacagatgtgtgggattgggggaggagtggggacaagattttttatctccaagtgaattttctaaaaatgtattttataccggcttattcctagtattgaataaactagcgggctcactca

SEQ ID NO: 307630 - DNA, 968 bp, Homo sapiens
  misc_feature (518)..(518): n is a, c, g, or t
gggcgtcttcggctcccaccccggggcgtgggcctgggggtccctcttcactgcgcagccacctctagcccgccgctttcgggactctcagccttcttttcccttccctgagggccggccggcaccacaacggggccaaaggcagtaactcggttgaaaggcgcgccctgggacaggtcagcgggctccgccatgcgcggcacgcatcccgcaggagcgggtgccagagcagggtaggccgggagttagcagcccagccaggccgctggactcgggctaggggcggggccagcgcagggggcgcaggcgcacaccgcctccgcggcagcatggcggacgcagctcctcaactaggcaagaggaagcgcgaattggacgtggaggaggcccacgccgccagcacagaggaaaaggaggcaggagttggaaatggtacctgtgctcctgtccgcttaccgttctccggcttcagactgcagaaggtgctgagggagtctgcgcgggacaaaatcattttnctacacgggaaggtgaatgaggcctctggggatggggatggagaggatgccgttgtgatcctggagaagacgccatttcaggtggaacaggtggctcagctcctgacgggcagccctgagctccaattgcagttctccaatgatatctacagcacctatcacttgttccctccaagacaactgaatgatgtaaagacgtctacacctgccacgtggagcaccccagcctccagaaccccatcatcgtggagtggcggctcctgcactgactcctgagactattttaactgggattggttatcacttttctgtaacgcctgcttgtccctgcccagaattcccagctgcctgtgtcagcctgtccccctgagatcagagtcctacagtggctgtcacgcagccaccaggtcatctcctttcatcccggtgggaagtcgggtgccgagctcg

SEQ ID NO: 307631 - DNA, 724 bp, Homo sapiens
cagagtggctgcctacacttggaaaatgaacaggatctggtctcaagccttcctgagctccaaccagccctgcctgagcgaccttgggtgtatcatctgtcctgctgagcctcacattttccccacgtaaactggcgtgtggggtgagcacagccacagagagctcctctggctgagtgccgagtctgtgaggaaccggagctgggggttcagctgcagttggagctcgacctggatgaatggatggcacatggaggatgctgggtgtcactctgttgcccaggctggagtgcagtgatgagatctgagcccattgcaacctctgcctcctgggttaagcgatcctcccacctttgcctcccaagcagctggattacagacactgaagactcagcagagatcaagagagacaatatttcctgtacttctggaactcatggaagctggagagagacagaatttgcaaatgtctctcagcctgagtttccttccagaatttccatgaaccagggggttggctgcagtgtctgttgaaagatgtggctgggggtatgaagggactgccttgaagctgagtgaccatggcaggctcaccttataaaactatggatggggctcaaccccagccacgctgtcctcgtgctcctgagtacagggtctcgggcccctccaggtcctactctgaagcagccacggctgctggaagaaggtccggacgaacggg

SEQ ID NO: 307632 - DNA, 3124 bp, Homo sapiens
ccgcagaacttggggagccgccgccgccatccgccgccgcagccagcttccgccgccgcaggaccggcccctgccccagcctccgcagccgcggcgcgtccacgcccgcccgcgcccagggcgagtcggggtcgccgcctgcacgcttctcagtgttccccgcgccccgcatgtaacccggccaggcccccgcaactgtgtcccctgcagctccagccccgggctgcacccccccgccccgacaccagctctccagcctgctcgtccaggatggccgcggccaaggccgagatgcagctgatgtccccgctgcagatctctgacccgttcggatcctttcctcactcgcccaccatggacaactaccctaagctggaggagatgatgctgctgagcaacggggctccccagttcctcggcgccgccggggccccagagggcagcggcagcaacagcagcagcagcagcagcgggggcggtggaggcggcgggggcggcagcaacagcagcagcagcagcagcaccttcaaccctcaggcggacacgggcgagcagccctacgagcacctgaccgcagagtcttttcctgacatctctctgaacaacgagaaggtgctggtggagaccagttaccccagccaaaccactcgactgccccccatcacctatactggccgcttttccctggagcctgcacccaacagtggcaacaccttgtggcccgagcccctcttcagcttggtcagtggcctagtgagcatgaccaacccaccggcctcctcgtcctcagcaccatctccagcggcctcctccgcctccgcctcccagagcccacccctgagctgcgcagtgccatccaacgacagcagtcccatttactcagcggcacccaccttccccacgccgaacactgacattttccctgagccacaaagccaggccttcccgggctcggcagggacagcgctccagtacccgcctcctgcctaccctgccgccaagggtggcttccaggttcccatgatccccgactacctgtttccacagcagcagggggatctgggcctgggcaccccagaccagaagcccttccagggcctggagagccgcacccagcagccttcgctaacccctctgtctactattaaggcctttgccactcagtcgggctcccaggacctgaaggccctcaataccagctaccagtcccagctcatcaaacccagccgcatgcgcaagtaccccaaccggcccagcaagacgcccccccacgaacgcccttacgcttgcccagtggagtcctgtgatcgccgcttctcccgctccgacgagctcacccgccacatccgcatccacacaggccagaagcccttccagtgccgcatctgcatgcgcaacttcagccgcagcgaccacctcaccacccacatccgcacccacacaggcgaaaagcccttcgcctgcgacatctgtggaagaaagtttgccaggagcgatgaacgcaagaggcataccaagatccacttgcggcagaaggacaagaaagcagacaaaagtgttgtggcctcttcggccacctcctctctctcttcctacccgtccccggttgctacctcttacccgtccccggttactacctcttatccatccccggccaccacctcatacccatcccctgtgcccacctccttctcctctcccggctcctcgacctacccatcccctgtgcacagtggcttcccctccccgtcggtggccaccacgtactcctctgttccccctgctttcccggcccaggtcagcagcttcccttcctcagctgtcaccaactccttcagcgcctccacagggctttcggacatgacagcaaccttttctcccaggacaattgaaatttgctaaagggaaaggggaaagaaagggaaaagggagaaaaagaaacacaagagacttaaaggacaggaggaggagatggccataggagaggagggttcctcttaggtcagatggaggttctcagagccaagtcctccctctctactggagtggaaggtctattggccaacaatcctttctgcccacttccccttccccaattactattccctttgacttcagctgcctgaaacagccatgtccaagttcttcacctctatccaaagaacttgatttgcatggattttggataaatcatttcagtatcatctccatcatatgcctgaccccttgctcccttcaatgctagaaaatcgagttggcaaaatggggtttgggcccctcagagccctgccctgcacccttgtacagtgtctgtgccatggatttcgtttttcttggggtactcttgatgtgaagataatttgcatattctattgtattatttggagttaggtcctcacttgggggaaaaaaaaaaaagaaaagccaagcaaaccaatggtgatcctctattttgtgatgatgctgtgacaataagtttgaacctttttttttgaaacagcagtcccagtattctcagagcatgtgtcagagtgttgttccgttaacctttttgtaaatactgcttgaccgtactctcacatgtggcaaaatatggtttggtttttctttttttttttttttgaaagtgttttttcttcgtccttttggtttaaaaagtttcacgtcttggtgccttttgtgtgatgcgccttgctgatggcttgacatgtgcaattgtgagggacatgctcacctctagccttaaggggggcagggagtgatgatttgggggaggctttgggagcaaaataaggaagagggctgagctgagcttcggttctccagaatgtaagaaaacaaaatctaaaacaaaatctgaactctcaaaagtctatttttttaactgaaaatgtaaatttataaatatattcaggagttggaatgttgtagttacctactgagtaggcggcgatttttgtatgttatgaacatgcagttcattattttgtggttctattttactttgtacttgtgtttgcttaaacaaagtgactgtttggcttataaacacattgaatgcgctttattgcccatgggatatgtggtgtatatccttccaaaaaattaaaacgaaaataaagta

SEQ ID NO: 307633 - DNA, 3235 bp, Homo sapiens
ccgcagaacttggggagccgccgccgccatccgccgccgcagccagcttccgccgccgcaggaccggcccctgccccagcctccgcagccgcggcgcgtccacgcccgcccgcgcccagggcgagtcggggtcgccgcctgcacgcttctcagtgttccccgcgccccgcatgtaacccggccaggcccccgcaactgtgtcccctgcagctccagccccgggctgcacccccccgccccgacaccagctctccagcctgctcgtccaggatggccgcggccaaggccgagatgcagctgatgtccccgctgcagatctctgacccgttcggatcctttcctcactcgcccaccatggacaactaccctaagctggaggagatgatgctgctgagcaacggggctccccagttcctcggcgccgccggggccccagagggcagcggcagcaacagcagcagcagcagcagcgggggcggtggaggcggcgggggcggcagcaacagcagcagcagcagcagcaccttcaaccctcaggcggacacgggcgagcagccctacgagcacctgaccgcagagtcttttcctgacatctctctgaacaacgagaaggtgctggtggagaccagttaccccagccaaaccactcgactgccccccatcacctatactggccgcttttccctggagcctgcacccaacagtggcaacaccttgtggcccgagcccctcttcagcttggtcagtggcctagtgagcatgaccaacccaccggcctcctcgtcctcagcaccatctccagcggcctcctccgcctccgcctcccagagcccacccctgagctgcgcagtgccatccaacgacagcagtcccatttactcagcggcacccaccttccccacgccgaacactgacattttccctgagccacaaagccaggccttcccgggctcggcagggacagcgctccagtacccgcctcctgcctaccctgccgccaagggtggcttccaggttcccatgatccccgactacctgtttccacagcagcagggggatctgggcctgggcaccccagaccagaagcccttccagggcctggagagccgcacccagcagccttcgctaacccctctgtctactattaaggcctttgccactcagtcgggctcccaggacctgaaggccctcaataccagctaccagtcccagctcatcaaacccagccgcatgcgcaagtaccccaaccggcccagcaagacgcccccccacgaacgcccttacgcttgcccagtggagtcctgtgatcgccgcttctcccgctccgacgagctcacccgccacatccgcatccacacaggccagaagcccttccagtgccgcatctgcatgcgcaacttcagccgcagcgaccacctcaccacccacatccgcacccacacaggcgaaaagcccttcgcctgcgacatctgtggaagaaagtttgccaggagcgatgaacgcaagaggcataccaagatccacttgcggcagaaggacaagaaagcagacaaaagtgttgtggcctcttcggccacctcctctctctcttcctacccgtccccggttgctacctcttacccgtccccggttactacctcttatccatccccggccaccacctcatacccatcccctgtgcccacctccttctcctctcccggctcctcgacctacccatcccctgtgcacagtggcttcccctccccgtcggtggccaccacgtactcctctgttccccctgctttcccggcccaggtcagcagcttcccttcctcagctgtcaccaactccttcagcgcctccacagggctttcggacatgacagcaaccttttctcccaggacaattgaaatttgctaaagggaaaggggaaagaaagggaaaagggagaaaaagaaacacaagagacttaaaggacaggaggaggagatggccataggagaggagggttcctcttaggtcagatggaggttctcagagccaagtcctccctctctactggagtggaaggtctattggccaacaatcctttctgcccacttccccttccccaattactattccctttgacttcagctgcctgaaacagccatgtccaagttcttcacctctatccaaagaacttgatttgcatggattttggataaatcatttcagtatcatctccatcatatgcctgaccccttgctcccttcaatgctagaaaatcgagttggcaaaatggggtttgggcccctcagagccctgccctgcacccttgtacagtgtctgtgccatggatttcgtttttcttggggtactcttgatgtgaagataatttgcatattctattgtattatttggagttaggtcctcacttgggggaaaaaaaaaaaagaaaagccaagcaaaccaatggtgatcctctattttgtgatgatgctgtgacaataagtttgaacctttttttttgaaacagcagtcccagtattctcagagcatgtgtcagagtgttgttccgttaacctttttgtaaatactgcttgaccgtactctcacatgtggcaaaatatggtttggtttttctttttttttttttttgaaagtgttttttcttcgtccttttggtttaaaaagtttcacgtcttggtgccttttgtgtgatgcgccttgctgatggcttgacatgtgcaattgtgagggacatgctcacctctagccttaaggggggcagggagtgatgatttgggggaggctttgggagcaaaataaggaagagggctgagctgagcttcggttctccagaatgtaagaaaacaaaatctaaaacaaaatctgaactctcaaaagtctatttttttaactgaaaatgtaaatttataaatatattcaggagttggaatgttgtagttacctactgagtaggcggcgatttttgtatgttatgaacatgcagttcattattttgtggttctattttactttgtacttgtgtttgcttaaacaaagtgactgtttggcttataaacacattgaatgcgctttattgcccatgggatatgtggtgtatatccttccaaaaaattaaaacgaaaataaagtagctgcgattgggtatgtgtttcctgggttaggggaaggactctgccctattgagggctgtgaggttttctgaagacttggcctttagagatacaaggatcctccagccagc

SEQ ID NO: 307634 - DNA, 467 bp, Homo sapiens
gaacattgcaatgtgctgctatcaattattaactacctcgggagtcactggtagccggcccggtctcttgcctggcagctcgggtcgtcctcgtcctccagtgattgctttccagtaaccaggcctcccgcttctctctctcctgccagagtcttttcctgacatctctctgaacaacgagaaggtgctggtggagaccagttaccccagccaaaccactcgactgccccccatcacctatactggccgcttttccctggagcctgcacccaacagtggcaacaccttgtggcccgagcccctcttcagcttggtcagtggcctagtgagcatgaccaacccaccggcctcctcgtcctcagcaccatctccactctcaagtagctgctattacaggcacacgccaccatgcctggctaattttgttgcttttgtagagacaaagttatatacctgatgcagctcag

SEQ ID NO: 307635 - DNA, 874 bp, Homo sapiens
ccgcagaacttggggagccgccgccgccatccgccgccgcagccagcttccgccgccgcaggaccggcccctgccccagcctccgcagccgcggcgcgtccacgcccgcccgcgcccagggcgagtcggggtcgccgcctgcacgcttctcagtgttccccgcgccccgcatgtaacccggccaggcccccgcaactgtgtcccctgcagctccagccccgggctgcacccccccgccccgacaccagctctccagcctgctcgtccaggatggccgcggccaaggccgagatgcagctgatgtccccgctgcagatctctgacccgttcggatcctttcctcactcgcccaccatggacaactaccctaagctggaggagatgatgctgctgagcaacggggctccccagttcctcggcgccgccggggccccagagggcagcggcagcaacagcagcagcagcagcagcgggggcggtggaggcggcgggggcggcagcaacagcagcagcagcagcagcaccttcaaccctcaggcggacacgggcgagcagccctacgagcacctgaccgcagagtcttttcctgacatctctctgaacaacgagaaggtgctggtggagaccagttaccccagccaaaccactcgactgccccccatcacctatactggccgcttttccctggagcctgcacccaacagtggcaacaccttgtggcccgagcccctcttcagcttggtcagtggcctagtgagcatgaccaacccaccggcctcctcgtcctcagcaccatctccaagcacgccaccacaccaggccaccccagcgcaagtgccttccttggacgcagagaggagccattcgtcctcct

SEQ ID NO: 307636 - DNA, 509 bp, Homo sapiens
agccaaacggtcacttgtttaagcaaacacaagtacaaagtaaaatagaaccacaaaataatgaactgcatgttcataacatacaaaaatcgccgcctactcagtaggtaactacaacattccaactcctgaatatatttataaatttacattttcagttaaaaaaatagacttttgagagttcagattttgttttagattttgttttcttacattctggagaaccgaatcccagctcatcaaacccagccgcatgcgcaagtaccccaaccggcccagcaagacgcccccccacgaacgcccttacgcttgcccagtggagtcctgtgatcgccgcttctcccgctcccaaagcctcccccaaatcatcactccctgccccccttaaggctagaggtgagcatgtccctcacaattgcacatgtcaagccatcagcaaggcgcatcacacaaaaggcaccaagacgtgaaactttttaaaccaaaaggacgaagaaaaaacactttca

SEQ ID NO: 307637 - DNA, 2696 bp, Homo sapiens
gaacattgcaatgtgctgctatcaattattaactacctcgggagtcactggtagccggcccggtctcttgcctggcagctcgggtcgtcctcgtcctccagtgattgctttccagtaaccaggcctcccgcttctctctctcctgccagagtcttttcctgacatctctctgaacaacgagaaggtgctggtggagaccagttaccccagccaaaccactcgactgccccccatcacctatactggccgcttttccctggagcctgcacccaacagtggcaacaccttgtggcccgagcccctcttcagcttggtcagtggcctagtgagcatgaccaacccaccggcctcctcgtcctcagcaccatctccagcggcctcctccgcctccgcctcccagagcccacccctgagctgcgcagtgccatccaacgacagcagtcccatttactcagcggcacccaccttccccacgccgaacactgacattttccctgagccacaaagccaggccttcccgggctcggcagggacagcgctccagtacccgcctcctgcctaccctgccgccaagggtggcttccaggttcccatgatccccgactacctgtttccacagcagcagggggatctgggcctgggcaccccagaccagaagcccttccagggcctggagagccgcacccagcagccttcgctaacccctctgtctactattaaggcctttgccactcagtcgggctcccaggacctgaaggccctcaataccagctaccagtcccagctcatcaaacccagccgcatgcgcaagtaccccaaccggcccagcaagacgcccccccacgaacgcccttacgcttgcccagtggagtcctgtgatcgccgcttctcccgctccgacgagctcacccgccacatccgcatccacacaggccagaagcccttccagtgccgcatctgcatgcgcaacttcagccgcagcgaccacctcaccacccacatccgcacccacacaggcgaaaagcccttcgcctgcgacatctgtggaagaaagtttgccaggagcgatgaacgcaagaggcataccaagatccacttgcggcagaaggacaagaaagcagacaaaagtgttgtggcctcttcggccacctcctctctctcttcctacccgtccccggttgctacctcttacccgtccccggttactacctcttatccatccccggccaccacctcatacccatcccctgtgcccacctccttctcctctcccggctcctcgacctacccatcccctgtgcacagtggcttcccctccccgtcggtggccaccacgtactcctctgttccccctgctttcccggcccaggtcagcagcttcccttcctcagctgtcaccaactccttcagcgcctccacagggctttcggacatgacagcaaccttttctcccaggacaattgaaatttgctaaagggaaaggggaaagaaagggaaaagggagaaaaagaaacacaagagacttaaaggacaggaggaggagatggccataggagaggagggttcctcttaggtcagatggaggttctcagagccaagtcctccctctctactggagtggaaggtctattggccaacaatcctttctgcccacttccccttccccaattactattccctttgacttcagctgcctgaaacagccatgtccaagttcttcacctctatccaaagaacttgatttgcatggattttggataaatcatttcagtatcatctccatcatatgcctgaccccttgctcccttcaatgctagaaaatcgagttggcaaaatggggtttgggcccctcagagccctgccctgcacccttgtacagtgtctgtgccatggatttcgtttttcttggggtactcttgatgtgaagataatttgcatattctattgtattatttggagttaggtcctcacttgggggaaaaaaaaaaaagaaaagccaagcaaaccaatggtgatcctctattttgtgatgatgctgtgacaataagtttgaacctttttttttgaaacagcagtcccagtattctcagagcatgtgtcagagtgttgttccgttaacctttttgtaaatactgcttgaccgtactctcacatgtggcaaaatatggtttggtttttctttttttttttttttgaaagtgttttttcttcgtccttttggtttaaaaagtttcacgtcttggtgccttttgtgtgatgcgccttgctgatggcttgacatgtgcaattgtgagggacatgctcacctctagccttaaggggggcagggagtgatgatttgggggaggctttgggagcaaaataaggaagagggctgagctgagcttcggttctccagaatgtaagaaaacaaaatctaaaacaaaatctgaactctcaaaagtctatttttttaactgaaaatgtaaatttataaatatattcaggagttggaatgttgtagttacctactgagtaggcggcgatttttgtatgttatgaacatgcagttcattattttgtggttctattttactttgtacttgtgtttgcttaaacaaagtgactgtttggcttataaacacattgaatgcgctttattgcccatgggatatgtggtgtatatccttccaaaaaattaaaacgaaaataaagta

SEQ ID NO: 307638 - DNA, 2531 bp, Homo sapiens
attgaaggctgggatagctcatccagaactggatgcaatcatgatgggcgcatcagcttcgatgagtactggaccttgataggcggcatcaccggccccagtcgccaaactcatccatgagcaggagcagcagagcagcagctagagacccctttggccacaccttccaggcactggcctgatgccccgccctggtgctctccccagggcggcctcctccgcctccgcctcccagagcccacccctgagctgcgcagtgccatccaacgacagcagtcccatttactcagcggcacccaccttccccacgccgaacactgacattttccctgagccacaaagccaggccttcccgggctcggcagggacagcgctccagtacccgcctcctgcctaccctgccgccaagggtggcttccaggttcccatgatccccgactacctgtttccacagcagcagggggatctgggcctgggcaccccagaccagaagcccttccagggcctggagagccgcacccagcagccttcgctaacccctctgtctactattaaggcctttgccactcagtcgggctcccaggacctgaaggccctcaataccagctaccagtcccagctcatcaaacccagccgcatgcgcaagtaccccaaccggcccagcaagacgcccccccacgaacgcccttacgcttgcccagtggagtcctgtgatcgccgcttctcccgctccgacgagctcacccgccacatccgcatccacacaggccagaagcccttccagtgccgcatctgcatgcgcaacttcagccgcagcgaccacctcaccacccacatccgcacccacacaggcgaaaagcccttcgcctgcgacatctgtggaagaaagtttgccaggagcgatgaacgcaagaggcataccaagatccacttgcggcagaaggacaagaaagcagacaaaagtgttgtggcctcttcggccacctcctctctctcttcctacccgtccccggttgctacctcttacccgtccccggttactacctcttatccatccccggccaccacctcatacccatcccctgtgcccacctccttctcctctcccggctcctcgacctacccatcccctgtgcacagtggcttcccctccccgtcggtggccaccacgtactcctctgttccccctgctttcccggcccaggtcagcagcttcccttcctcagctgtcaccaactccttcagcgcctccacagggctttcggacatgacagcaaccttttctcccaggacaattgaaatttgctaaagggaaaggggaaagaaagggaaaagggagaaaaagaaacacaagagacttaaaggacaggaggaggagatggccataggagaggagggttcctcttaggtcagatggaggttctcagagccaagtcctccctctctactggagtggaaggtctattggccaacaatcctttctgcccacttccccttccccaattactattccctttgacttcagctgcctgaaacagccatgtccaagttcttcacctctatccaaagaacttgatttgcatggattttggataaatcatttcagtatcatctccatcatatgcctgaccccttgctcccttcaatgctagaaaatcgagttggcaaaatggggtttgggcccctcagagccctgccctgcacccttgtacagtgtctgtgccatggatttcgtttttcttggggtactcttgatgtgaagataatttgcatattctattgtattatttggagttaggtcctcacttgggggaaaaaaaaaaaagaaaagccaagcaaaccaatggtgatcctctattttgtgatgatgctgtgacaataagtttgaacctttttttttgaaacagcagtcccagtattctcagagcatgtgtcagagtgttgttccgttaacctttttgtaaatactgcttgaccgtactctcacatgtggcaaaatatggtttggtttttctttttttttttttttgaaagtgttttttcttcgtccttttggtttaaaaagtttcacgtcttggtgccttttgtgtgatgcgccttgctgatggcttgacatgtgcaattgtgagggacatgctcacctctagccttaaggggggcagggagtgatgatttgggggaggctttgggagcaaaataaggaagagggctgagctgagcttcggttctccagaatgtaagaaaacaaaatctaaaacaaaatctgaactctcaaaagtctatttttttaactgaaaatgtaaatttataaatatattcaggagttggaatgttgtagttacctactgagtaggcggcgatttttgtatgttatgaacatgcagttcattattttgtggttctattttactttgtacttgtgtttgcttaaacaaagtgactgtttggcttataaacacattgaatgcgctttattgcccatgggatatgtggtgtatatccttccaaaaaattaaaacgaaaataaagta

SEQ ID NO: 307639 - DNA, 2146 bp, Homo sapiens
  misc_feature (145)..(145): n is a, c, g, or t
gagacagagtctcgctgtcccccaggctggagtgcagtggcgtcatctcggctcactgcaggctctgccccccgggttcatgccattctcctgcctcaccctcccgagtagctgggagtacaggcgcccgccagggtggcaaagnccttaatagtagacagaggggttagcgaaggctgctgggtgcggctctcccaggacctgaaggccctcaataccagctaccagtcccagctcatcaaacccagccgcatgcgcaagtaccccaaccggcccagcaagacgcccccccacgaacgcccttacgcttgcccagtggagtcctgtgatcgccgcttctcccgctccgacgagctcacccgccacatccgcatccacacaggccagaagcccttccagtgccgcatctgcatgcgcaacttcagccgcagcgaccacctcaccacccacatccgcacccacacaggcgaaaagcccttcgcctgcgacatctgtggaagaaagtttgccaggagcgatgaacgcaagaggcataccaagatccacttgcggcagaaggacaagaaagcagacaaaagtgttgtggcctcttcggccacctcctctctctcttcctacccgtccccggttgctacctcttacccgtccccggttactacctcttatccatccccggccaccacctcatacccatcccctgtgcccacctccttctcctctcccggctcctcgacctacccatcccctgtgcacagtggcttcccctccccgtcggtggccaccacgtactcctctgttccccctgctttcccggcccaggtcagcagcttcccttcctcagctgtcaccaactccttcagcgcctccacagggctttcggacatgacagcaaccttttctcccaggacaattgaaatttgctaaagggaaaggggaaagaaagggaaaagggagaaaaagaaacacaagagacttaaaggacaggaggaggagatggccataggagaggagggttcctcttaggtcagatggaggttctcagagccaagtcctccctctctactggagtggaaggtctattggccaacaatcctttctgcccacttccccttccccaattactattccctttgacttcagctgcctgaaacagccatgtccaagttcttcacctctatccaaagaacttgatttgcatggattttggataaatcatttcagtatcatctccatcatatgcctgaccccttgctcccttcaatgctagaaaatcgagttggcaaaatggggtttgggcccctcagagccctgccctgcacccttgtacagtgtctgtgccatggatttcgtttttcttggggtactcttgatgtgaagataatttgcatattctattgtattatttggagttaggtcctcacttgggggaaaaaaaaaaaagaaaagccaagcaaaccaatggtgatcctctattttgtgatgatgctgtgacaataagtttgaacctttttttttgaaacagcagtcccagtattctcagagcatgtgtcagagtgttgttccgttaacctttttgtaaatactgcttgaccgtactctcacatgtggcaaaatatggtttggtttttctttttttttttttttgaaagtgttttttcttcgtccttttggtttaaaaagtttcacgtcttggtgccttttgtgtgatgcgccttgctgatggcttgacatgtgcaattgtgagggacatgctcacctctagccttaaggggggcagggagtgatgatttgggggaggctttgggagcaaaataaggaagagggctgagctgagcttcggttctccagaatgtaagaaaacaaaatctaaaacaaaatctgaactctcaaaagtctatttttttaactgaaaatgtaaatttataaatatattcaggagttggaatgttgtagttacctactgagtaggcggcgatttttgtatgttatgaacatgcagttcattattttgtggttctattttactttgtacttgtgtttgcttaaacaaagtgactgtttggcttataaacacattgaatgcgctttattgcccatgggatatgtggtgtatatccttccaaaaaattaaaacgaaaataaagta

SEQ ID NO: 307640 - DNA, 1666 bp, Homo sapiens
  misc_feature (23)..(23): n is a, c, g, or t
gatgatcgagctcggtaccgtangatgagcgagagcgatgaacgcaagaggcataccaagatccacttgcggcagaaggacaagaaagcagacaaaagtgttgtggcctcttcggccacctcctctctctcttcctacccgtccccggttgctacctcttacccgtccccggttactacctcttatccatccccggccaccacctcatacccatcccctgtgcccacctccttctcctctcccggctcctcgacctacccatcccctgtgcacagtggcttcccctccccgtcggtggccaccacgtactcctctgttccccctgctttcccggcccaggtcagcagcttcccttcctcagctgtcaccaactccttcagcgcctccacagggctttcggacatgacagcaaccttttctcccaggacaattgaaatttgctaaagggaaaggggaaagaaagggaaaagggagaaaaagaaacacaagagacttaaaggacaggaggaggagatggccataggagaggagggttcctcttaggtcagatggaggttctcagagccaagtcctccctctctactggagtggaaggtctattggccaacaatcctttctgcccacttccccttccccaattactattccctttgacttcagctgcctgaaacagccatgtccaagttcttcacctctatccaaagaacttgatttgcatggattttggataaatcatttcagtatcatctccatcatatgcctgaccccttgctcccttcaatgctagaaaatcgagttggcaaaatggggtttgggcccctcagagccctgccctgcacccttgtacagtgtctgtgccatggatttcgtttttcttggggtactcttgatgtgaagataatttgcatattctattgtattatttggagttaggtcctcacttgggggaaaaaaaaaaaagaaaagccaagcaaaccaatggtgatcctctattttgtgatgatgctgtgacaataagtttgaacctttttttttgaaacagcagtcccagtattctcagagcatgtgtcagagtgttgttccgttaacctttttgtaaatactgcttgaccgtactctcacatgtggcaaaatatggtttggtttttctttttttttttttttgaaagtgttttttcttcgtccttttggtttaaaaagtttcacgtcttggtgccttttgtgtgatgcgccttgctgatggcttgacatgtgcaattgtgagggacatgctcacctctagccttaaggggggcagggagtgatgatttgggggaggctttgggagcaaaataaggaagagggctgagctgagcttcggttctccagaatgtaagaaaacaaaatctaaaacaaaatctgaactctcaaaagtctatttttttaactgaaaatgtaaatttataaatatattcaggagttggaatgttgtagttacctactgagtaggcggcgatttttgtatgttatgaacatgcagttcattattttgtggttctattttactttgtacttgtgtttgcttaaacaaagtgactgtttggcttataaacacattgaatgcgctttattgcccatgggatatgtggtgtatatccttccaaaaaattaaaacgaaaataaagta

SEQ ID NO: 307641 - DNA, 1533 bp, Homo sapiens
  misc_feature (33)..(33): n is a, c, g, or t
aaggggaagtgggcagaaaggattgttggccantagaccttccactccagtagagagggaggactggctctgagaacctccatctgacctaagaggaaccctcctctcccggctcctcgacctacccatcccctgtgcacagtggcttcccctccccgtcggtggccaccacgtactcctctgttccccctgctttcccggcccaggtcagcagcttcccttcctcagctgtcaccaactccttcagcgcctccacagggctttcggacatgacagcaaccttttctcccaggacaattgaaatttgctaaagggaaaggggaaagaaagggaaaagggagaaaaagaaacacaagagacttaaaggacaggaggaggagatggccataggagaggagggttcctcttaggtcagatggaggttctcagagccaagtcctccctctctactggagtggaaggtctattggccaacaatcctttctgcccacttccccttccccaattactattccctttgacttcagctgcctgaaacagccatgtccaagttcttcacctctatccaaagaacttgatttgcatggattttggataaatcatttcagtatcatctccatcatatgcctgaccccttgctcccttcaatgctagaaaatcgagttggcaaaatggggtttgggcccctcagagccctgccctgcacccttgtacagtgtctgtgccatggatttcgtttttcttggggtactcttgatgtgaagataatttgcatattctattgtattatttggagttaggtcctcacttgggggaaaaaaaaaaaagaaaagccaagcaaaccaatggtgatcctctattttgtgatgatgctgtgacaataagtttgaacctttttttttgaaacagcagtcccagtattctcagagcatgtgtcagagtgttgttccgttaacctttttgtaaatactgcttgaccgtactctcacatgtggcaaaatatggtttggtttttctttttttttttttttgaaagtgttttttcttcgtccttttggtttaaaaagtttcacgtcttggtgccttttgtgtgatgcgccttgctgatggcttgacatgtgcaattgtgagggacatgctcacctctagccttaaggggggcagggagtgatgatttgggggaggctttgggagcaaaataaggaagagggctgagctgagcttcggttctccagaatgtaagaaaacaaaatctaaaacaaaatctgaactctcaaaagtctatttttttaactgaaaatgtaaatttataaatatattcaggagttggaatgttgtagttacctactgagtaggcggcgatttttgtatgttatgaacatgcagttcattattttgtggttctattttactttgtacttgtgtttgcttaaacaaagtgactgtttggcttataaacacattgaatgcgctttattgcccatgggatatgtggtgtatatccttccaaaaaattaaaacgaaaataaagta

SEQ ID NO: 307642 - DNA, 3282 bp, Homo sapiens
ccgcagaacttggggagccgccgccgccatccgccgccgcagccagcttccgccgccgcaggaccggcccctgccccagcctccgcagccgcggcgcgtccacgcccgcccgcgcccagggcgagtcggggtcgccgcctgcacgcttctcagtgttccccgcgccccgcatgtaacccggccaggcccccgcaactgtgtcccctgcagctccagccccgggctgcacccccccgccccgacaccagctctccagcctgctcgtccaggatggccgcggccaaggccgagatgcagctgatgtccccgctgcagatctctgacccgttcggatcctttcctcactcgcccaccatggacaactaccctaagctggaggagatgatgctgctgagcaacggggctccccagttcctcggcgccgccggggccccagagggcagcggcagcaacagcagcagcagcagcagcgggggcggtggaggcggcgggggcggcagcaacagcagcagcagcagcagcaccttcaaccctcaggcggacacgggcgagcagccctacgagcacctgaccgcagagtcttttcctgacatctctctgaacaacgagaaggtgctggtggagaccagttaccccagccaaaccactcgactgccccccatcacctatactggccgcttttccctggagcctgcacccaacagtggcaacaccttgtggcccgagcccctcttcagcttggtcagtggcctagtgagcatgaccaacccaccggcctcctcgtcctcagcaccatctccagcggcctcctccgcctccgcctcccagagcccacccctgagctgcgcagtgccatccaacgacagcagtcccatttactcagcggcacccaccttccccacgccgaacactgacattttccctgagccacaaagccaggccttcccgggctcggcagggacagcgctccagtacccgcctcctgcctaccctgccgccaagggtggcttccaggttcccatgatccccgactacctgtttccacagcagcagggggatctgggcctgggcaccccagaccagaagcccttccagggcctggagagccgcacccagcagccttcgctaacccctctgtctactattaaggcctttgccactcagtcgggctcccaggacctgaaggccctcaataccagctaccagtcccagctcatcaaacccagccgcatgcgcaagtaccccaaccggcccagcaagacgcccccccacgaacgcccttacgcttgcccagtggagtcctgtgatcgccgcttctcccgctccgacgagctcacccgccacatccgcatccacacaggccagaagcccttccagtgccgcatctgcatgcgcaacttcagccgcagcgaccacctcaccacccacatccgcacccacacaggcgaaaagcccttcgcctgcgacatctgtggaagaaagtttgccaggagcgatgaacgcaagaggcataccaagatccacttgcggcagaaggacaagaaagcagacaaaagtgttgtggcctcttcggccacctcctctctctcttcctacccgtccccggttgctacctcttacccgtccccggttactacctcttatccatccccggccaccacctcatacccatcccctgtgcccacctccttctcctctcccggctcctcgacctacccatcccctgtgcacagtggcttcccctccccgtcggtggccaccacgtactcctctgttccccctgctttcccggcccaggtcagcagcttcccttcctcagctgtcaccaactccttcagcgcctccacagggctttcggacatgacagcaaccttttctcccaggacaattgaaatttgctaaagggaaaggggaaagaaagggaaaagggagaaaaagaaacacaagagacttaaaggacaggaggaggagatggccataggagaggagggttcctcttaggtcagatggaggttctcagagccaagtcctccctctctactggagtggaaggtctattggccaacaatcctttctgcccacttccccttccccaattactattccctttgacttcagctgcctgaaacagccatgtccaagttcttcacctctatccaaagaacttgatttgcatggattttggataaatcatttcagtatcatctccatcatatgcctgaccccttgctcccttcaatgctagaaaatcgagttggcaaaatggggtttgggcccctcagagccctgccctgcacccttgtacagtgtctgtgccatggatttcgtttttcttggggtactcttgatgtgaagataatttgcatattctattgtattatttggagttaggtcctcacttgggggaaaaaaaaaaaagaaaagccaagcaaaccaatggtgatcctctattttgtgatgatgctgtgacaataagtttgaacctttttttttgaaacagcagtcccagtattctcagagcatgtgtcagagtgttgttccgttaacctttttgtaaatactgcttgaccgtactctcacatgtggcaaaatatggtttggtttttctttttttttttttttgaaagtgttttttcttcgtccttttggtttaaaaagtttcacgtcttggtgccttttgtgtgatgcgccttgctgatggcttgacatgtgcaattgtgagggacatgctcacctctagccttaaggggggcagggagtgatgatttgggggaggctttgggagcaaaataaggaagagggctgagctgagcttcggttctccagaatgtaagaaaacaaaatctaaaacaaaatctgaactctcaaaagtctatttttttaactgaaaatgtaaatttataaatatattcaggagttggaatgttgtagttacctactgagtaggcggcgatttttgtatgttatgaacatgcagttcattattttgtggttctattttactttgtacttgtgtttgcttaaacaaagtgactgtttggcttataaacacattgaatgcgctttattgcccatgggatatgtggtgtatatccttccaaaaaattaaaacgaaaataaagtataaaaaaccacaatatatatacagctacacacactaacaaaaaaaaggggggcgcggggctaaaaagattcccccgagaggggcgcaaagtttacgtaacaccccagttttttgaaagaaggggggccccattggaggaccgaaaaaaagacaaggga

SEQ ID NO: 307643 - DNA, 1258 bp, Homo sapiens
ctcgttacccctgggctggggaaaagggctgggctggagaacagggctgggctggggaaaagggagaaaaagaaacacaagagacttaaaggacaggaggaggagatggccataggagaggagggttcctcttaggtcagatggaggttctcagagccaagtcctccctctctactggagtggaaggtctattggccaacaatcctttctgcccacttccccttccccaattactattccctttgacttcagctgcctgaaacagccatgtccaagttcttcacctctatccaaagaacttgatttgcatggattttggataaatcatttcagtatcatctccatcatatgcctgaccccttgctcccttcaatgctagaaaatcgagttggcaaaatggggtttgggcccctcagagccctgccctgcacccttgtacagtgtctgtgccatggatttcgtttttcttggggtactcttgatgtgaagataatttgcatattctattgtattatttggagttaggtcctcacttgggggaaaaaaaaaaaagaaaagccaagcaaaccaatggtgatcctctattttgtgatgatgctgtgacaataagtttgaacctttttttttgaaacagcagtcccagtattctcagagcatgtgtcagagtgttgttccgttaacctttttgtaaatactgcttgaccgtactctcacatgtggcaaaatatggtttggtttttctttttttttttttttgaaagtgttttttcttcgtccttttggtttaaaaagtttcacgtcttggtgccttttgtgtgatgcgccttgctgatggcttgacatgtgcaattgtgagggacatgctcacctctagccttaaggggggcagggagtgatgatttgggggaggctttgggagcaaaataaggaagagggctgagctgagcttcggttctccagaatgtaagaaaacaaaatctaaaacaaaatctgaactctcaaaagtctatttttttaactgaaaatgtaaatttataaatatattcaggagttggaatgttgtagttacctactgagtaggcggcgatttttgtatgttatgaacatgcagttcattattttgtggttctattttactttgtacttgtgtttgcttaaacaaagtgactgtttggcttataaacacattgaatgcgctttattgcccatgggatatgtggtgtatatccttccaaaaaattaaaacgaaaataaagta

SEQ ID NO: 307644 - DNA, 1216 bp, Homo sapiens
cttgcatgtaccggggacgggtaagaggtagcaaccggggacgggtaggaagagagagaggagatggccataggagaggagggttcctcttaggtcagatggaggttctcagagccaagtcctccctctctactggagtggaaggtctattggccaacaatcctttctgcccacttccccttccccaattactattccctttgacttcagctgcctgaaacagccatgtccaagttcttcacctctatccaaagaacttgatttgcatggattttggataaatcatttcagtatcatctccatcatatgcctgaccccttgctcccttcaatgctagaaaatcgagttggcaaaatggggtttgggcccctcagagccctgccctgcacccttgtacagtgtctgtgccatggatttcgtttttcttggggtactcttgatgtgaagataatttgcatattctattgtattatttggagttaggtcctcacttgggggaaaaaaaaaaaagaaaagccaagcaaaccaatggtgatcctctattttgtgatgatgctgtgacaataagtttgaacctttttttttgaaacagcagtcccagtattctcagagcatgtgtcagagtgttgttccgttaacctttttgtaaatactgcttgaccgtactctcacatgtggcaaaatatggtttggtttttctttttttttttttttgaaagtgttttttcttcgtccttttggtttaaaaagtttcacgtcttggtgccttttgtgtgatgcgccttgctgatggcttgacatgtgcaattgtgagggacatgctcacctctagccttaaggggggcagggagtgatgatttgggggaggctttgggagcaaaataaggaagagggctgagctgagcttcggttctccagaatgtaagaaaacaaaatctaaaacaaaatctgaactctcaaaagtctatttttttaactgaaaatgtaaatttataaatatattcaggagttggaatgttgtagttacctactgagtaggcggcgatttttgtatgttatgaacatgcagttcattattttgtggttctattttactttgtacttgtgtttgcttaaacaaagtgactgtttggcttataaacacattgaatgcgctttattgcccatgggatatgtggtgtatatccttccaaaaaattaaaacgaaaataaagta

SEQ ID NO: 307645 - DNA, 3250 bp, Homo sapiens
ccgcagaacttggggagccgccgccgccatccgccgccgcagccagcttccgccgccgcaggaccggcccctgccccagcctccgcagccgcggcgcgtccacgcccgcccgcgcccagggcgagtcggggtcgccgcctgcacgcttctcagtgttccccgcgccccgcatgtaacccggccaggcccccgcaactgtgtcccctgcagctccagccccgggctgcacccccccgccccgacaccagctctccagcctgctcgtccaggatggccgcggccaaggccgagatgcagctgatgtccccgctgcagatctctgacccgttcggatcctttcctcactcgcccaccatggacaactaccctaagctggaggagatgatgctgctgagcaacggggctccccagttcctcggcgccgccggggccccagagggcagcggcagcaacagcagcagcagcagcagcgggggcggtggaggcggcgggggcggcagcaacagcagcagcagcagcagcaccttcaaccctcaggcggacacgggcgagcagccctacgagcacctgaccgcagagtcttttcctgacatctctctgaacaacgagaaggtgctggtggagaccagttaccccagccaaaccactcgactgccccccatcacctatactggccgcttttccctggagcctgcacccaacagtggcaacaccttgtggcccgagcccctcttcagcttggtcagtggcctagtgagcatgaccaacccaccggcctcctcgtcctcagcaccatctccagcggcctcctccgcctccgcctcccagagcccacccctgagctgcgcagtgccatccaacgacagcagtcccatttactcagcggcacccaccttccccacgccgaacactgacattttccctgagccacaaagccaggccttcccgggctcggcagggacagcgctccagtacccgcctcctgcctaccctgccgccaagggtggcttccaggttcccatgatccccgactacctgtttccacagcagcagggggatctgggcctgggcaccccagaccagaagcccttccagggcctggagagccgcacccagcagccttcgctaacccctctgtctactattaaggcctttgccactcagtcgggctcccaggacctgaaggccctcaataccagctaccagtcccagctcatcaaacccagccgcatgcgcaagtaccccaaccggcccagcaagacgcccccccacgaacgcccttacgcttgcccagtggagtcctgtgatcgccgcttctcccgctccgacgagctcacccgccacatccgcatccacacaggccagaagcccttccagtgccgcatctgcatgcgcaacttcagccgcagcgaccacctcaccacccacatccgcacccacacaggcgaaaagcccttcgcctgcgacatctgtggaagaaagtttgccaggagcgatgaacgcaagaggcataccaagatccacttgcggcagaaggacaagaaagcagacaaaagtgttgtggcctcttcggccacctcctctctctcttcctacccgtccccggttgctacctcttacccgtccccggttactacctcttatccatccccggccaccacctcatacccatcccctgtgcccacctccttctcctctcccggctcctcgacctacccatcccctgtgcacagtggcttcccctccccgtcggtggccaccacgtactcctctgttccccctgctttcccggcccaggtcagcagcttcccttcctcagctgtcaccaactccttcagcgcctccacagggctttcggacatgacagcaaccttttctcccaggacaattgaaatttgctaaagggaaaggggaaagaaagggaaaagggagaaaaagaaacacaagagacttaaaggacaggaggaggagatggccataggagaggagggttcctcttaggtcagatggaggttctcagagccaagtcctccctctctactggagtggaaggtctattggccaacaatcctttctgcccacttccccttccccaattactattccctttgacttcagctgcctgaaacagccatgtccaagttcttcacctctatccaaagaacttgatttgcatggattttggataaatcatttcagtatcatctccatcatatgcctgaccccttgctcccttcaatgctagaaaatcgagttggcaaaatggggtttgggcccctcagagccctgccctgcacccttgtacagtgtctgtgccatggatttcgtttttcttggggtactcttgatgtgaagataatttgcatattctattgtattatttggagttaggtcctcacttgggggaaaaaaaaaaaagaaaagccaagcaaaccaatggtgatcctctattttgtgatgatgctgtgacaataagtttgaacctttttttttgaaacagcagtcccagtattctcagagcatgtgtcagagtgttgttccgttaacctttttgtaaatactgcttgaccgtactctcacatgtggcaaaatatggtttggtttttctttttttttttttttgaaagtgttttttcttcgtccttttggtttaaaaagtttcacgtcttggtgccttttgtgtgatgcgccttgctgatggcttgacatgtgcaattgtgagggacatgctcacctctagccttaaggggggcagggagtgatgatttgggggaggctttgggagcaaaataaggaagagggctgagctgagcttcggttctccagaatgtaagaaaacaaaatctaaaacaaaatctgaactctcaaaagtctatttttttaactgaaaatgtaaatttataaatatattcaggagttggaatgttgtagttacctactgagtaggcggcgatttttgtatgttatgaacatgcagttcattattttgtggttctattttactttgtacttgtgtttgcttaaacaaagtgactgtttggcttataaacacattgaatgcgctttattgcccatgggatatgtggtgtacacctcaaccgactctctcgcatctcatcaatcctcgcctatcctactctcgcaggcccccttgtcccagctgtcttttgttcccgcagccttctcatccccccctctctggctcacttgtccatctcgccctatcctggctccctttccttttctctct

SEQ ID NO: 307646 - DNA, 3142 bp, Homo sapiens
ccgcagaacttggggagccgccgccgccatccgccgccgcagccagcttccgccgccgcaggaccggcccctgccccagcctccgcagccgcggcgcgtccacgcccgcccgcgcccagggcgagtcggggtcgccgcctgcacgcttctcagtgttccccgcgccccgcatgtaacccggccaggcccccgcaactgtgtcccctgcagctccagccccgggctgcacccccccgccccgacaccagctctccagcctgctcgtccaggatggccgcggccaaggccgagatgcagctgatgtccccgctgcagatctctgacccgttcggatcctttcctcactcgcccaccatggacaactaccctaagctggaggagatgatgctgctgagcaacggggctccccagttcctcggcgccgccggggccccagagggcagcggcagcaacagcagcagcagcagcagcgggggcggtggaggcggcgggggcggcagcaacagcagcagcagcagcagcaccttcaaccctcaggcggacacgggcgagcagccctacgagcacctgaccgcagagtcttttcctgacatctctctgaacaacgagaaggtgctggtggagaccagttaccccagccaaaccactcgactgccccccatcacctatactggccgcttttccctggagcctgcacccaacagtggcaacaccttgtggcccgagcccctcttcagcttggtcagtggcctagtgagcatgaccaacccaccggcctcctcgtcctcagcaccatctccagcggcctcctccgcctccgcctcccagagcccacccctgagctgcgcagtgccatccaacgacagcagtcccatttactcagcggcacccaccttccccacgccgaacactgacattttccctgagccacaaagccaggccttcccgggctcggcagggacagcgctccagtacccgcctcctgcctaccctgccgccaagggtggcttccaggttcccatgatccccgactacctgtttccacagcagcagggggatctgggcctgggcaccccagaccagaagcccttccagggcctggagagccgcacccagcagccttcgctaacccctctgtctactattaaggcctttgccactcagtcgggctcccaggacctgaaggccctcaataccagctaccagtcccagctcatcaaacccagccgcatgcgcaagtaccccaaccggcccagcaagacgcccccccacgaacgcccttacgcttgcccagtggagtcctgtgatcgccgcttctcccgctccgacgagctcacccgccacatccgcatccacacaggccagaagcccttccagtgccgcatctgcatgcgcaacttcagccgcagcgaccacctcaccacccacatccgcacccacacaggcgaaaagcccttcgcctgcgacatctgtggaagaaagtttgccaggagcgatgaacgcaagaggcataccaagatccacttgcggcagaaggacaagaaagcagacaaaagtgttgtggcctcttcggccacctcctctctctcttcctacccgtccccggttgctacctcttacccgtccccggttactacctcttatccatccccggccaccacctcatacccatcccctgtgcccacctccttctcctctcccggctcctcgacctacccatcccctgtgcacagtggcttcccctccccgtcggtggccaccacgtactcctctgttccccctgctttcccggcccaggtcagcagcttcccttcctcagctgtcaccaactccttcagcgcctccacagggctttcggacatgacagcaaccttttctcccaggacaattgaaatttgctaaagggaaaggggaaagaaagggaaaagggagaaaaagaaacacaagagacttaaaggacaggaggaggagatggccataggagaggagggttcctcttaggtcagatggaggttctcagagccaagtcctccctctctactggagtggaaggtctattggccaacaatcctttctgcccacttccccttccccaattactattccctttgacttcagctgcctgaaacagccatgtccaagttcttcacctctatccaaagaacttgatttgcatggattttggataaatcatttcagtatcatctccatcatatgcctgaccccttgctcccttcaatgctagaaaatcgagttggcaaaatggggtttgggcccctcagagccctgccctgcacccttgtacagtgtctgtgccatggatttcgtttttcttggggtactcttgatgtgaagataatttgcatattctattgtattatttggagttaggtcctcacttgggggaaaaaaaaaaaagaaaagccaagcaaaccaatggtgatcctctattttgtgatgatgctgtgacaataagtttgaacctttttttttgaaacagcagtcccagtattctcagagcatgtgtcagagtgttgttccgttaacctttttgtaaatactgcttgaccgtactctcacatgtggcaaaatatggtttggtttttctttttttttttttttgaaagtgttttttcttcgtccttttggtttaaaaagtttcacgtcttggtgccttttgtgtgatgcgccttgctgatggcttgacatgtgcaattgtgagggacatgctcacctctagccttaaggggggcagggagtgatgatttgggggaggctttgggagcaaaataaggaagagggctgagctgagcttcggttctccagaatgtaagaaaacaaaatctaaaacaaaatctgaactctcaaaagtctatttttttaactgaaaatgtaaatttataaatatattcaggagttggaatgttgtagttacctactgagtaggcggcgatttttgtatgttatgaacatgcagttcattattttgtggttctattttactttgtacttgtgtttgcttaaacaaagtgactgtttggcttataaacacattgaatgcgctttattgcccatgggatatgtggtgtaacaccacatatcccagtcgacggccgctgtatttagtagtagtagcgacagc

SEQ ID NO: 307647 - DNA, 3070 bp, Homo sapiens
ccgcagaacttggggagccgccgccgccatccgccgccgcagccagcttccgccgccgcaggaccggcccctgccccagcctccgcagccgcggcgcgtccacgcccgcccgcgcccagggcgagtcggggtcgccgcctgcacgcttctcagtgttccccgcgccccgcatgtaacccggccaggcccccgcaactgtgtcccctgcagctccagccccgggctgcacccccccgccccgacaccagctctccagcctgctcgtccaggatggccgcggccaaggccgagatgcagctgatgtccccgctgcagatctctgacccgttcggatcctttcctcactcgcccaccatggacaactaccctaagctggaggagatgatgctgctgagcaacggggctccccagttcctcggcgccgccggggccccagagggcagcggcagcaacagcagcagcagcagcagcgggggcggtggaggcggcgggggcggcagcaacagcagcagcagcagcagcaccttcaaccctcaggcggacacgggcgagcagccctacgagcacctgaccgcagagtcttttcctgacatctctctgaacaacgagaaggtgctggtggagaccagttaccccagccaaaccactcgactgccccccatcacctatactggccgcttttccctggagcctgcacccaacagtggcaacaccttgtggcccgagcccctcttcagcttggtcagtggcctagtgagcatgaccaacccaccggcctcctcgtcctcagcaccatctccagcggcctcctccgcctccgcctcccagagcccacccctgagctgcgcagtgccatccaacgacagcagtcccatttactcagcggcacccaccttccccacgccgaacactgacattttccctgagccacaaagccaggccttcccgggctcggcagggacagcgctccagtacccgcctcctgcctaccctgccgccaagggtggcttccaggttcccatgatccccgactacctgtttccacagcagcagggggatctgggcctgggcaccccagaccagaagcccttccagggcctggagagccgcacccagcagccttcgctaacccctctgtctactattaaggcctttgccactcagtcgggctcccaggacctgaaggccctcaataccagctaccagtcccagctcatcaaacccagccgcatgcgcaagtaccccaaccggcccagcaagacgcccccccacgaacgcccttacgcttgcccagtggagtcctgtgatcgccgcttctcccgctccgacgagctcacccgccacatccgcatccacacaggccagaagcccttccagtgccgcatctgcatgcgcaacttcagccgcagcgaccacctcaccacccacatccgcacccacacaggcgaaaagcccttcgcctgcgacatctgtggaagaaagtttgccaggagcgatgaacgcaagaggcataccaagatccacttgcggcagaaggacaagaaagcagacaaaagtgttgtggcctcttcggccacctcctctctctcttcctacccgtccccggttgctacctcttacccgtccccggttactacctcttatccatccccggccaccacctcatacccatcccctgtgcccacctccttctcctctcccggctcctcgacctacccatcccctgtgcacagtggcttcccctccccgtcggtggccaccacgtactcctctgttccccctgctttcccggcccaggtcagcagcttcccttcctcagctgtcaccaactccttcagcgcctccacagggctttcggacatgacagcaaccttttctcccaggacaattgaaatttgctaaagggaaaggggaaagaaagggaaaagggagaaaaagaaacacaagagacttaaaggacaggaggaggagatggccataggagaggagggttcctcttaggtcagatggaggttctcagagccaagtcctccctctctactggagtggaaggtctattggccaacaatcctttctgcccacttccccttccccaattactattccctttgacttcagctgcctgaaacagccatgtccaagttcttcacctctatccaaagaacttgatttgcatggattttggataaatcatttcagtatcatctccatcatatgcctgaccccttgctcccttcaatgctagaaaatcgagttggcaaaatggggtttgggcccctcagagccctgccctgcacccttgtacagtgtctgtgccatggatttcgtttttcttggggtactcttgatgtgaagataatttgcatattctattgtattatttggagttaggtcctcacttgggggaaaaaaaaaaaagaaaagccaagcaaaccaatggtgatcctctattttgtgatgatgctgtgacaataagtttgaacctttttttttgaaacagcagtcccagtattctcagagcatgtgtcagagtgttgttccgttaacctttttgtaaatactgcttgaccgtactctcacatgtggcaaaatatggtttggtttttctttttttttttttttgaaagtgttttttcttcgtccttttggtttaatgtgcaattgtgagggacatgctcacctctagccttaaggggggcagggagtgatgatttgggggaggctttgggagcaaaataaggaagagggctgagctgagcttcggttctccagaatgtaagaaaacaaaatctaaaacaaaatctgaactctcaaaagtctatttttttaactgaaaatgtaaatttataaatatattcaggagttggaatgttgtagttacctactgagtaggcggcgatttttgtatgttatgaacatgcagttcattattttgtggttctattttactttgtacttgtgtttgcttaaacaaagtgactgtttggcttataaacacattgaatgcgctttattgcccatgggatatgtggtgtatatccttccaaaaaattaaaacgaaaataaagta

SEQ ID NO: 307648 - DNA, 1173 bp, Homo sapiens
  misc_feature (33)..(33): n is a, c, g, or t
aaggggaagtgggcagaaaggattgttggccantagaccttccactccagtagagagggaggactggctctgagaacctccatctgacctaagaggaaccctcctctcctatggccatctcctctgcccacttccccttccccaattactattccctttgacttcagctgcctgaaacagccatgtccaagttcttcacctctatccaaagaacttgatttgcatggattttggataaatcatttcagtatcatctccatcatatgcctgaccccttgctcccttcaatgctagaaaatcgagttggcaaaatggggtttgggcccctcagagccctgccctgcacccttgtacagtgtctgtgccatggatttcgtttttcttggggtactcttgatgtgaagataatttgcatattctattgtattatttggagttaggtcctcacttgggggaaaaaaaaaaaagaaaagccaagcaaaccaatggtgatcctctattttgtgatgatgctgtgacaataagtttgaacctttttttttgaaacagcagtcccagtattctcagagcatgtgtcagagtgttgttccgttaacctttttgtaaatactgcttgaccgtactctcacatgtggcaaaatatggtttggtttttctttttttttttttttgaaagtgttttttcttcgtccttttggtttaaaaagtttcacgtcttggtgccttttgtgtgatgcgccttgctgatggcttgacatgtgcaattgtgagggacatgctcacctctagccttaaggggggcagggagtgatgatttgggggaggctttgggagcaaaataaggaagagggctgagctgagcttcggttctccagaatgtaagaaaacaaaatctaaaacaaaatctgaactctcaaaagtctatttttttaactgaaaatgtaaatttataaatatattcaggagttggaatgttgtagttacctactgagtaggcggcgatttttgtatgttatgaacatgcagttcattattttgtggttctattttactttgtacttgtgtttgcttaaacaaagtgactgtttggcttataaacacattgaatgcgctttattgcccatgggatatgtggtgtatatccttccaaaaaattaaaacgaaaataaagta

SEQ ID NO: 307649 - DNA, 700 bp, Homo sapiens
  misc_feature (21)..(21): n is a, c, g, or t
atgatcagccggtaccgacancatagaatggtgatgatgctgtgacaataagtttgaacctttttttttgaaacagcagtcccagtattctcagagcatgtgtcagagtgttgttccgttaacctttttgtaaatactgcttgaccgtactctcacatgtggcaaaatatggtttggtttttctttttttttttttttgaaagtgttttttcttcgtccttttggtttaaaaagtttcacgtcttggtgccttttgtgtgatgcgccttgctgatggcttgacatgtgcaattgtgagggacatgctcacctctagccttaaggggggcagggagtgatgatttgggggaggctttgggagcaaaataaggaagagggctgagctgagcttcggttctccagaatgtaagaaaacaaaatctaaaacaaaatctgaactctcaaaagtctatttttttaactgaaaatgtaaatttataaatatattcaggagttggaatgttgtagttacctactgagtaggcggcgatttttgtatgttatgaacatgcagttcattattttgtggttctattttactttgtacttgtgtttgcttaaacaaagtgactgtttggcttataaacacattgaatgcgctttattgcccatgggatatgtggtgtatatccttccaaaaaattaaaacgaaaataaagta

SEQ ID NO: 307650 - DNA, 3006 bp, Homo sapiens
ccgcagaacttggggagccgccgccgccatccgccgccgcagccagcttccgccgccgcaggaccggcccctgccccagcctccgcagccgcggcgcgtccacgcccgcccgcgcccagggcgagtcggggtcgccgcctgcacgcttctcagtgttccccgcgccccgcatgtaacccggccaggcccccgcaactgtgtcccctgcagctccagccccgggctgcacccccccgccccgacaccagctctccagcctgctcgtccaggatggccgcggccaaggccgagatgcagctgatgtccccgctgcagatctctgacccgttcggatcctttcctcactcgcccaccatggacaactaccctaagctggaggagatgatgctgctgagcaacggggctccccagttcctcggcgccgccggggccccagagggcagcggcagcaacagcagcagcagcagcagcgggggcggtggaggcggcgggggcggcagcaacagcagcagcagcagcagcaccttcaaccctcaggcggacacgggcgagcagccctacgagcacctgaccgcagagtcttttcctgacatctctctgaacaacgagaaggtgctggtggagaccagttaccccagccaaaccactcgactgccccccatcacctatactggccgcttttccctggagcctgcacccaacagtggcaacaccttgtggcccgagcccctcttcagcttggtcagtggcctagtgagcatgaccaacccaccggcctcctcgtcctcagcaccatctccagcggcctcctccgcctccgcctcccagagcccacccctgagctgcgcagtgccatccaacgacagcagtcccatttactcagcggcacccaccttccccacgccgaacactgacattttccctgagccacaaagccaggccttcccgggctcggcagggacagcgctccagtacccgcctcctgcctaccctgccgccaagggtggcttccaggttcccatgatccccgactacctgtttccacagcagcagggggatctgggcctgggcaccccagaccagaagcccttccagggcctggagagccgcacccagcagccttcgctaacccctctgtctactattaaggcctttgccactcagtcgggctcccaggacctgaaggccctcaataccagctaccagtcccagctcatcaaacccagccgcatgcgcaagtaccccaaccggcccagcaagacgcccccccacgaacgcccttacgcttgcccagtggagtcctgtgatcgccgcttctcccgctccgacgagctcacccgccacatccgcatccacacaggccagaagcccttccagtgccgcatctgcatgcgcaacttcagccgcagcgaccacctcaccacccacatccgcacccacacaggcgaaaagcccttcgcctgcgacatctgtggaagaaagtttgccaggagcgatgaacgcaagaggcataccaagatccacttgcggcagaaggacaagaaagcagacaaaagtgttgtggcctcttcggccacctcctctctctcttcctacccgtccccggttgctacctcttacccgtccccggttactacctcttatccatccccggccaccacctcatacccatcccctgtgcccacctccttctcctctcccggctcctcgacctacccatcccctgtgcacagtggcttcccctccccgtcggtggccaccacgtactcctctgttccccctgctttcccggcccaggtcagcagcttcccttcctcagctgtcaccaactccttcagcgcctccacagggctttcggacatgacagcaaccttttctcccaggacaattgaaatttgctaaagggaaaggggaaagaaagggaaaagggagaaaaagaaacacaagagacttaaaggacaggaggaggagatggccataggagaggagggttcctcttaggtcagatggaggttctcagagccaagtcctccctctctactggagtggaaggtctattggccaacaatcctttctgcccacttccccttccccaattactattccctttgacttcagctgcctgaaacagccatgtccaagttcttcacctctatccaaagaacttgatttgcatggattttggataaatcatttcagtatcatctccatcatatgcctgaccccttgctcccttcaatgctagaaaatcgagttggcaaaatggggtttgggcccctcagagccctgccctgcacccttgtacagtgtctgtgccatggatttcgtttttcttggggtactcttgatgtgaagataatttgcatattctattgtattatttggagttaggtcctcacttgggggaaaaaaaaaaaagaaaagccaagcaaaccaatggtgatcctctattttgtgatgatgctgtgacaataagtttgaacctttttttttgaaacagcagtcccagtattctcagagcatgtgtcagagtgttgttccgttaacctttttgtaaatactgcttgaccgtactctcacatgtggcaaaatatggtttggtttttctttttttttttttttgaaagtgttttttcttcgtccttttggtttaaaaagtttcacgtcttggtgccttttgtgtgatgcgccttgctgatggcttgacatgtgcaattgtgagggacatgctcacctctagccttaaggggggcagggagtgatgatttgggggaggctttgggagcaaaataaggaagagggctgagctgagcttcggttctccagaatgtaagaaaacaaaatctaaaacaaaatctgaactctcaaaagtctatttttttaactgaaaatgtaaatttataaatatattcaggagttggaatgttgtagttacctactgagtaggcggcgatcttctgcatgataaggtgatcttctacacgataggtgatcttctgcaagata

SEQ ID NO: 307651 - DNA, 3073 bp, Homo sapiens
ccgcagaacttggggagccgccgccgccatccgccgccgcagccagcttccgccgccgcaggaccggcccctgccccagcctccgcagccgcggcgcgtccacgcccgcccgcgcccagggcgagtcggggtcgccgcctgcacgcttctcagtgttccccgcgccccgcatgtaacccggccaggcccccgcaactgtgtcccctgcagctccagccccgggctgcacccccccgccccgacaccagctctccagcctgctcgtccaggatggccgcggccaaggccgagatgcagctgatgtccccgctgcagatctctgacccgttcggatcctttcctcactcgcccaccatggacaactaccctaagctggaggagatgatgctgctgagcaacggggctccccagttcctcggcgccgccggggccccagagggcagcggcagcaacagcagcagcagcagcagcgggggcggtggaggcggcgggggcggcagcaacagcagcagcagcagcagcaccttcaaccctcaggcggacacgggcgagcagccctacgagcacctgaccgcagagtcttttcctgacatctctctgaacaacgagaaggtgctggtggagaccagttaccccagccaaaccactcgactgccccccatcacctatactggccgcttttccctggagcctgcacccaacagtggcaacaccttgtggcccgagcccctcttcagcttggtcagtggcctagtgagcatgaccaacccaccggcctcctcgtcctcagcaccatctccagcggcctcctccgcctccgcctcccagagcccacccctgagctgcgcagtgccatccaacgacagcagtcccatttactcagcggcacccaccttccccacgccgaacactgacattttccctgagccacaaagccaggccttcccgggctcggcagggacagcgctccagtacccgcctcctgcctaccctgccgccaagggtggcttccaggttcccatgatccccgactacctgtttccacagcagcagggggatctgggcctgggcaccccagaccagaagcccttccagggcctggagagccgcacccagcagccttcgctaacccctctgtctactattaaggcctttgccactcagtcgggctcccaggacctgaaggccctcaataccagctaccagtcccagctcatcaaacccagccgcatgcgcaagtaccccaaccggcccagcaagacgcccccccacgaacgcccttacgcttgcccagtggagtcctgtgatcgccgcttctcccgctccgacgagctcacccgccacatccgcatccacacaggccagaagcccttccagtgccgcatctgcatgcgcaacttcagccgcagcgaccacctcaccacccacatccgcacccacacaggcgaaaagcccttcgcctgcgacatctgtggaagaaagtttgccaggagcgatgaacgcaagaggcataccaagatccacttgcggcagaaggacaagaaagcagacaaaagtgttgtggcctcttcggccacctcctctctctcttcctacccgtccccggttgctacctcttacccgtccccggttactacctcttatccatccccggccaccacctcatacccatcccctgtgcccacctccttctcctctcccggctcctcgacctacccatcccctgtgcacagtggcttcccctccccgtcggtggccaccacgtactcctctgttccccctgctttcccggcccaggtcagcagcttcccttcctcagctgtcaccaactccttcagcgcctccacagggctttcggacatgacagcaaccttttctcccaggacaattgaaatttgctaaagggaaaggggaaagaaagggaaaagggagaaaaagaaacacaagagacttaaaggacaggaggaggagatggccataggagaggagggttcctcttaggtcagatggaggttctcagagccaagtcctccctctctactggagtggaaggtctattggccaacaatcctttctgcccacttccccttccccaattactattccctttgacttcagctgcctgaaacagccatgtccaagttcttcacctctatccaaagaacttgatttgcatggattttggataaatcatttcagtatcatctccatcatatgcctgaccccttgctcccttcaatgctagaaaatcgagttggcaaaatggggtttgggcccctcagagccctgccctgcacccttgtacagtgtctgtgccatggatttcgtttttcttggggtactcttgatgtgaagataatttgcatattctattgtattatttggagttaggtcctcacttgggggaaaaaaaaaaaagaaaagccaagcaaaccaatggtgatcctctattttgtgatgatgctgtgacaataagtttgaacctttttttttgaaacagcagtcccagtattctcagagcatgtgtcagagtgttgttccgttaacctttttgtaaatactgcttgaccgtactctcacatgtggcaaaatatggtttggtttttctttttttttttttttgaaagtgttttttcttcgtccttttggtttaaaaagtttcacgtcttggtgccttttgtgtgatgcgccttgctgatggcttgacatgtgcaattgtgagggacatgctcacctctagccttaaggggggcagggagtgatgatttgggggaggctttgggagcaaaataaggaagagggctgagctgagcttcggttctccagaatttaactgaaaatgtaaatttataaatatattcaggagttggaatgttgtagttacctactgagtaggcggcgatttttgtatgttatgaacatgcagttcattattttgtggttctattttactttgtacttgtgtttgcttaaacaaagtgactgtttggcttataaacacattgaatgcgctttattgcccatgggatatgtggtgtatatccttccaaaaaattaaaacgaaaataaagta

SEQ ID NO: 307652 - DNA, 2770 bp, Homo sapiens
ccgcagaacttggggagccgccgccgccatccgccgccgcagccagcttccgccgccgcaggaccggcccctgccccagcctccgcagccgcggcgcgtccacgcccgcccgcgcccagggcgagtcggggtcgccgcctgcacgcttctcagtgttccccgcgccccgcatgtaacccggccaggcccccgcaactgtgtcccctgcagctccagccccgggctgcacccccccgccccgacaccagctctccagcctgctcgtccaggatggccgcggccaaggccgagatgcagctgatgtccccgctgcagatctctgacccgttcggatcctttcctcactcgcccaccatggacaactaccctaagctggaggagatgatgctgctgagcaacggggctccccagttcctcggcgccgccggggccccagagggcagcggcagcaacagcagcagcagcagcagcgggggcggtggaggcggcgggggcggcagcaacagcagcagcagcagcagcaccttcaaccctcaggcggacacgggcgagcagccctacgagcacctgaccgcagagtcttttcctgacatctctctgaacaacgagaaggtgctggtggagaccagttaccccagccaaaccactcgactgccccccatcacctatactggccgcttttccctggagcctgcacccaacagtggcaacaccttgtggcccgagcccctcttcagcttggtcagtggcctagtgagcatgaccaacccaccggcctcctcgtcctcagcaccatctccagcggcctcctccgcctccgcctcccagagcccacccctgagctgcgcagtgccatccaacgacagcagtcccatttactcagcggcacccaccttccccacgccgaacactgacattttccctgagccacaaagccaggccttcccgggctcggcagggacagcgctccagtacccgcctcctgcctaccctgccgccaagggtggcttccaggttcccatgatccccgactacctgtttccacagcagcagggggatctgggcctgggcaccccagaccagaagcccttccagggcctggagagccgcacccagcagccttcgctaacccctctgtctactattaaggcctttgccactcagtcgggctcccaggacctgaaggccctcaataccagctaccagtcccagctcatcaaacccagccgcatgcgcaagtaccccaaccggcccagcaagacgcccccccacgaacgcccttacgcttgcccagtggagtcctgtgatcgccgcttctcccgctccgacgagctcacccgccacatccgcatccacacaggccagaagcccttccagtgccgcatctgcatgcgcaacttcagccgcagcgaccacctcaccacccacatccgcacccacacaggcgaaaagcccttcgcctgcgacatctgtggaagaaagtttgccaggagcgatgaacgcaagaggcataccaagatccacttgcggcagaaggacaagaaagcagacaaaagtgttgtggcctcttcggccacctcctctctctcttcctacccgtccccggttgctacctcttacccgtccccggttactacctcttatccatccccggccaccacctcatacccatcccctgtgcccacctccttctcctctcccggctcctcgacctacccatcccctgtgcacagtggcttcccctccccgtcggtggccaccacgtactcctctgttccccctgctttcccggcccaggtcagcagcttcccttcctcagctgtcaccaactccttcagcgcctccacagggctttcggacatgacagcaaccttttctcccaggacaattgaaatttgctaaagggaaaggggaaagaaagggaaaagggagaaaaagaaacacaagagacttaaaggacaggaggaggagatggccataggagaggagggttcctcttaggtcagatggaggttctcagagccaagtcctccctctctactggagtggaaggtctattggccaacaatcctttctgcccacttccccttccccaattactattccctttgacttcagctgcctgaaacagccatgtccaagttcttcacctctatccaaagaacttgatttgcatggattttggataaatcatttcagtatcatctccatcatatgcctgaccccttgctcccttcaatgctagaaaatcgagttggcaaaatggggtttgggcccctcagagccctgccctgcacccttgtacagtgtctgtgccatggatttcgtttttcttggggtactcttgatgtgaagataatttgcatattctattgtattatttggagttaggtcctcacttgggggaaaaaaaaaaaagaaaagccaagcaaaccaatggtgatcctctattttgtgatgatgctgtgacaataagtttgaacctttttttttgaaacagcagtcccagtattctcagagcatgtgtcagagtgttgttccgttaacctttttgtaaatactgcttgaccgtactctcacatgtggcaaaatatggtttggtttttctttttttttttttttgaaagtgttttttcttcgtccttttggtttaaaaagtttcacgtcttggtgccttttgtgtgatgcgccttgctgatggcttgacatgtccccgtacatcgttagaagcttgaattcgagcgtagtagtagtagtagtaggcggccgc

SEQ ID NO: 307653 - DNA, 2266 bp, Homo sapiens
ccgcagaacttggggagccgccgccgccatccgccgccgcagccagcttccgccgccgcaggaccggcccctgccccagcctccgcagccgcggcgcgtccacgcccgcccgcgcccagggcgagtcggggtcgccgcctgcacgcttctcagtgttccccgcgccccgcatgtaacccggccaggcccccgcaactgtgtcccctgcagctccagccccgggctgcacccccccgccccgacaccagctctccagcctgctcgtccaggatggccgcggccaaggccgagatgcagctgatgtccccgctgcagatctctgacccgttcggatcctttcctcactcgcccaccatggacaactaccctaagctggaggagatgatgctgctgagcaacggggctccccagttcctcggcgccgccggggccccagagggcagcggcagcaacagcagcagcagcagcagcgggggcggtggaggcggcgggggcggcagcaacagcagcagcagcagcagcaccttcaaccctcaggcggacacgggcgagcagccctacgagcacctgaccgcagagtcttttcctgacatctctctgaacaacgagaaggtgctggtggagaccagttaccccagccaaaccactcgactgccccccatcacctatactggccgcttttccctggagcctgcacccaacagtggcaacaccttgtggcccgagcccctcttcagcttggtcagtggcctagtgagcatgaccaacccaccggcctcctcgtcctcagcaccatctccagcggcctcctccgcctccgcctcccagagcccacccctgagctgcgcagtgccatccaacgacagcagtcccatttactcagcggcacccaccttccccacgccgaacactgacattttccctgagccacaaagccaggccttcccgggctcggcagggacagcgctccagtacccgcctcctgcctaccctgccgccaagggtggcttccaggttcccatgatccccgactacctgtttccacagcagcagggggatctgggcctgggcaccccagaccagaagcccttccagggcctggagagccgcacccagcagccttcgctaacccctctgtctactattaaggcctttgccactcagtcgggctcccaggacctgaaggccctcaataccagctaccagtcccagctcatcaaacccagccgcatgcgcaagtaccccaaccggcccagcaagacgcccccccacgaacgcccttacgcttgcccagtggagtcctgtgatcgccgcttctcccgctccgacgagctcacccgccacatccgcatccacacaggccagaagcccttccagtgccgcatctgcatgcgcaacttcagccgcagcgaccacctcaccacccacatccgcacccacacaggcgaaaagcccttcgcctgcgacatctgtggaagaaagtttgccaggagcgatgaacgcaagaggcataccaagatccacttgcggcagaaggacaagaaagcagacaaaagtgttgtggcctcttcggccacctcctctctctcttcctacccgtccccggttgctacctcttacccgtccccggttactacctcttatccatccccggccaccacctcatacccatcccctgtgcccacctccttctcctctcccggctcctcgacctacccatcccctgtgcacagtggcttcccctccccgtcggtggccaccacgtactcctctgttccccctgctttcccggcccaggtcagcagcttcccttcctcagctgtcaccaactccttcagcgcctccacagggctttcggacatgacagcaaccttttctcccaggacaattgaaatttgctaaagggaaaggggaaagaaagggaaaagggagaaaaagaaacacaagagacttaaaggacaggaggaggagatggccataggagaggagggttcctcttaggtcagatggaggttctcagagccaagtcctccctctctactggagtggaaggtctattggccaacaatcctttctgcccacttccccttccccaattactattccctttgacttcagctgcctgaaacagccatgtccaagttcttcacctctatccaaagaacttgatttgcatggattttggataaatcatttcagtatcatctccatagcattgaagggagcaaggggtcaggcatatgatggagatgatactgaaagtcga

SEQ ID NO: 307654 - DNA, 2259 bp, Homo sapiens
ccgcagaacttggggagccgccgccgccatccgccgccgcagccagcttccgccgccgcaggaccggcccctgccccagcctccgcagccgcggcgcgtccacgcccgcccgcgcccagggcgagtcggggtcgccgcctgcacgcttctcagtgttccccgcgccccgcatgtaacccggccaggcccccgcaactgtgtcccctgcagctccagccccgggctgcacccccccgccccgacaccagctctccagcctgctcgtccaggatggccgcggccaaggccgagatgcagctgatgtccccgctgcagatctctgacccgttcggatcctttcctcactcgcccaccatggacaactaccctaagctggaggagatgatgctgctgagcaacggggctccccagttcctcggcgccgccggggccccagagggcagcggcagcaacagcagcagcagcagcagcgggggcggtggaggcggcgggggcggcagcaacagcagcagcagcagcagcaccttcaaccctcaggcggacacgggcgagcagccctacgagcacctgaccgcagagtcttttcctgacatctctctgaacaacgagaaggtgctggtggagaccagttaccccagccaaaccactcgactgccccccatcacctatactggccgcttttccctggagcctgcacccaacagtggcaacaccttgtggcccgagcccctcttcagcttggtcagtggcctagtgagcatgaccaacccaccggcctcctcgtcctcagcaccatctccagcggcctcctccgcctccgcctcccagagcccacccctgagctgcgcagtgccatccaacgacagcagtcccatttactcagcggcacccaccttccccacgccgaacactgacattttccctgagccacaaagccaggccttcccgggctcggcagggacagcgctccagtacccgcctcctgcctaccctgccgccaagggtggcttccaggttcccatgatccccgactacctgtttccacagcagcagggggatctgggcctgggcaccccagaccagaagcccttccagggcctggagagccgcacccagcagccttcgctaacccctctgtctactattaaggcctttgccactcagtcgggctcccaggacctgaaggccctcaataccagctaccagtcccagctcatcaaacccagccgcatgcgcaagtaccccaaccggcccagcaagacgcccccccacgaacgcccttacgcttgcccagtggagtcctgtgatcgccgcttctcccgctccgacgagctcacccgccacatccgcatccacacaggccagaagcccttccagtgccgcatctgcatgcgcaacttcagccgcagcgaccacctcaccacccacatccgcacccacacaggcgaaaagcccttcgcctgcgacatctgtggaagaaagtttgccaggagcgatgaacgcaagaggcataccaagatccacttgcggcagaaggacaagaaagcagacaaaagtgttgtggcctcttcggccacctcctctctctcttcctacccgtccccggttgctacctcttacccgtccccggttactacctcttatccatccccggccaccacctcatacccatcccctgtgcccacctccttctcctctcccggctcctcgacctacccatcccctgtgcacagtggcttcccctccccgtcggtggccaccacgtactcctctgttccccctgctttcccggcccaggtcagcagcttcccttcctcagctgtcaccaactccttcagcgcctccacagggctttcggacatgacagcaaccttttctcccaggacaattgaaatttgctaaagggaaaggggaaagaaagggaaaagggagaaaaagaaacacaagagacttaaaggacaggaggaggagatggccataggagaggagggttcctcttaggtcagatggaggttctcagagccaagtcctccctctctactggagtggaaggtctattggccaacaatcctttctgcccacttccccttccccaattactattccctttgacttcagctgcctgaaacagccatgtccaagttcttcacctctatccaaagaacttgatttgcatggattttggataaatcatttcagtatcatctccattgagcctgtgtctagacacaggctcaagatgggacaagaattaagacc

SEQ ID NO: 307655 - DNA, 2326 bp, Homo sapiens
ccgcagaacttggggagccgccgccgccatccgccgccgcagccagcttccgccgccgcaggaccggcccctgccccagcctccgcagccgcggcgcgtccacgcccgcccgcgcccagggcgagtcggggtcgccgcctgcacgcttctcagtgttccccgcgccccgcatgtaacccggccaggcccccgcaactgtgtcccctgcagctccagccccgggctgcacccccccgccccgacaccagctctccagcctgctcgtccaggatggccgcggccaaggccgagatgcagctgatgtccccgctgcagatctctgacccgttcggatcctttcctcactcgcccaccatggacaactaccctaagctggaggagatgatgctgctgagcaacggggctccccagttcctcggcgccgccggggccccagagggcagcggcagcaacagcagcagcagcagcagcgggggcggtggaggcggcgggggcggcagcaacagcagcagcagcagcagcaccttcaaccctcaggcggacacgggcgagcagccctacgagcacctgaccgcagagtcttttcctgacatctctctgaacaacgagaaggtgctggtggagaccagttaccccagccaaaccactcgactgccccccatcacctatactggccgcttttccctggagcctgcacccaacagtggcaacaccttgtggcccgagcccctcttcagcttggtcagtggcctagtgagcatgaccaacccaccggcctcctcgtcctcagcaccatctccagcggcctcctccgcctccgcctcccagagcccacccctgagctgcgcagtgccatccaacgacagcagtcccatttactcagcggcacccaccttccccacgccgaacactgacattttccctgagccacaaagccaggccttcccgggctcggcagggacagcgctccagtacccgcctcctgcctaccctgccgccaagggtggcttccaggttcccatgatccccgactacctgtttccacagcagcagggggatctgggcctgggcaccccagaccagaagcccttccagggcctggagagccgcacccagcagccttcgctaacccctctgtctactattaaggcctttgccactcagtcgggctcccaggacctgaaggccctcaataccagctaccagtcccagctcatcaaacccagccgcatgcgcaagtaccccaaccggcccagcaagacgcccccccacgaacgcccttacgcttgcccagtggagtcctgtgatcgccgcttctcccgctccgacgagctcacccgccacatccgcatccacacaggccagaagcccttccagtgccgcatctgcatgcgcaacttcagccgcagcgaccacctcaccacccacatccgcacccacacaggcgaaaagcccttcgcctgcgacatctgtggaagaaagtttgccaggagcgatgaacgcaagaggcataccaagatccacttgcggcagaaggacaagaaagcagacaaaagtgttgtggcctcttcggccacctcctctctctcttcctacccgtccccggttgctacctcttacccgtccccggttactacctcttatccatccccggccaccacctcatacccatcccctgtgcccacctccttctcctctcccggctcctcgacctacccatcccctgtgcacagtggcttcccctccccgtcggtggccaccacgtactcctctgttccccctgctttcccggcccaggtcagcagcttcccttcctcagctgtcaccaactccttcagcgcctccacagggctttcggacatgacagcaaccttttctcccaggacaattgaaatttgctaaagggaaaggggaaagaaagggaaaagggagaaaaagaaacacaagagacttaaaggacaggaggaggagatggccataggagaggagggttcctcttaggtcagatggaggttctcagagccaagtcctccctctctactggagtggaaggtctattggccaacaatcctttcacgtactcctctgttccccctgctttcccggtccaggtcagcagcttcccttcctcagctgtcaccaactccttcagcgcctccacagggctttcggacatgacagcaaccttttctcccaggacaattgaaatttgctaaagggaaaggggaaagaaagggaaaagggagaaaaagaaacacaagagacttaaaggacaggaggaggagatggccataggagaggagggttcctcttaggtcagatggag

SEQ ID NO: 307656 - DNA, 1865 bp, Homo sapiens
ccgcagaacttggggagccgccgccgccatccgccgccgcagccagcttccgccgccgcaggaccggcccctgccccagcctccgcagccgcggcgcgtccacgcccgcccgcgcccagggcgagtcggggtcgccgcctgcacgcttctcagtgttccccgcgccccgcatgtaacccggccaggcccccgcaactgtgtcccctgcagctccagccccgggctgcacccccccgccccgacaccagctctccagcctgctcgtccaggatggccgcggccaaggccgagatgcagctgatgtccccgctgcagatctctgacccgttcggatcctttcctcactcgcccaccatggacaactaccctaagctggaggagatgatgctgctgagcaacggggctccccagttcctcggcgccgccggggccccagagggcagcggcagcaacagcagcagcagcagcagcgggggcggtggaggcggcgggggcggcagcaacagcagcagcagcagcagcaccttcaaccctcaggcggacacgggcgagcagccctacgagcacctgaccgcagagtcttttcctgacatctctctgaacaacgagaaggtgctggtggagaccagttaccccagccaaaccactcgactgccccccatcacctatactggccgcttttccctggagcctgcacccaacagtggcaacaccttgtggcccgagcccctcttcagcttggtcagtggcctagtgagcatgaccaacccaccggcctcctcgtcctcagcaccatctccagcggcctcctccgcctccgcctcccagagcccacccctgagctgcgcagtgccatccaacgacagcagtcccatttactcagcggcacccaccttccccacgccgaacactgacattttccctgagccacaaagccaggccttcccgggctcggcagggacagcgctccagtacccgcctcctgcctaccctgccgccaagggtggcttccaggttcccatgatccccgactacctgtttccacagcagcagggggatctgggcctgggcaccccagaccagaagcccttccagggcctggagagccgcacccagcagccttcgctaacccctctgtctactattaaggcctttgccactcagtcgggctcccaggacctgaaggccctcaataccagctaccagtcccagctcatcaaacccagccgcatgcgcaagtaccccaaccggcccagcaagacgcccccccacgaacgcccttacgcttgcccagtggagtcctgtgatcgccgcttctcccgctccgacgagctcacccgccacatccgcatccacacaggccagaagcccttccagtgccgcatctgcatgcgcaacttcagccgcagcgaccacctcaccacccacatccgcacccacacaggcgaaaagcccttcgcctgcgacatctgtggaagaaagtttgccaggagcgatgaacgcaagaggcataccaagatccacttgcggcagaaggacaagaaagcagacaaaagtgttgtggcctcttcggccacctcctctctctcttcctacccgtccccggttgctacctcttacccgtccccggttactacctcttatccatccccggccaccacctcatacccatcccctgtgcccacctccttctcctctcccggctcctcgacctacccatcccctgtgcacagtggcttcccctccccgtcggtggccaccacgtactcctctgttccccctgctttcccggcccaggtcagcagcttcccttcctcagctgtcaccaactccttcagcgctcatggggtacgagctaattgtat

SEQ ID NO: 307657 - DNA, 1660 bp, Homo sapiens
ccgcagaacttggggagccgccgccgccatccgccgccgcagccagcttccgccgccgcaggaccggcccctgccccagcctccgcagccgcggcgcgtccacgcccgcccgcgcccagggcgagtcggggtcgccgcctgcacgcttctcagtgttccccgcgccccgcatgtaacccggccaggcccccgcaactgtgtcccctgcagctccagccccgggctgcacccccccgccccgacaccagctctccagcctgctcgtccaggatggccgcggccaaggccgagatgcagctgatgtccccgctgcagatctctgacccgttcggatcctttcctcactcgcccaccatggacaactaccctaagctggaggagatgatgctgctgagcaacggggctccccagttcctcggcgccgccggggccccagagggcagcggcagcaacagcagcagcagcagcagcgggggcggtggaggcggcgggggcggcagcaacagcagcagcagcagcagcaccttcaaccctcaggcggacacgggcgagcagccctacgagcacctgaccgcagagtcttttcctgacatctctctgaacaacgagaaggtgctggtggagaccagttaccccagccaaaccactcgactgccccccatcacctatactggccgcttttccctggagcctgcacccaacagtggcaacaccttgtggcccgagcccctcttcagcttggtcagtggcctagtgagcatgaccaacccaccggcctcctcgtcctcagcaccatctccagcggcctcctccgcctccgcctcccagagcccacccctgagctgcgcagtgccatccaacgacagcagtcccatttactcagcggcacccaccttccccacgccgaacactgacattttccctgagccacaaagccaggccttcccgggctcggcagggacagcgctccagtacccgcctcctgcctaccctgccgccaagggtggcttccaggttcccatgatccccgactacctgtttccacagcagcagggggatctgggcctgggcaccccagaccagaagcccttccagggcctggagagccgcacccagcagccttcgctaacccctctgtctactattaaggcctttgccactcagtcgggctcccaggacctgaaggccctcaataccagctaccagtcccagctcatcaaacccagccgcatgcgcaagtaccccaaccggcccagcaagacgcccccccacgaacgcccttacgcttgcccagtggagtcctgtgatcgccgcttctcccgctccgacgagctcacccgccacatccgcatccacacaggccagaagcccttccagtgccgcatctgcatgcgcaacttcagccgcagcgaccacctcaccacccacatccgcacccacacaggcgaaaagcccttcgcctgcgacatctgtggaagaaagtttgccaggagcgatgaacgcaagaggcataccaagatccacttgcggcagaaggacaagaaagcagacaaaagtgttgtggcctcttcggccacctcctctctctcttcctacccgtccccggttgctacctcttacccgtcctggcctgagatgggatcctctagacacctcagca

SEQ ID NO: 307658 - DNA, 1697 bp, Homo sapiens
ccgcagaacttggggagccgccgccgccatccgccgccgcagccagcttccgccgccgcaggaccggcccctgccccagcctccgcagccgcggcgcgtccacgcccgcccgcgcccagggcgagtcggggtcgccgcctgcacgcttctcagtgttccccgcgccccgcatgtaacccggccaggcccccgcaactgtgtcccctgcagctccagccccgggctgcacccccccgccccgacaccagctctccagcctgctcgtccaggatggccgcggccaaggccgagatgcagctgatgtccccgctgcagatctctgacccgttcggatcctttcctcactcgcccaccatggacaactaccctaagctggaggagatgatgctgctgagcaacggggctccccagttcctcggcgccgccggggccccagagggcagcggcagcaacagcagcagcagcagcagcgggggcggtggaggcggcgggggcggcagcaacagcagcagcagcagcagcaccttcaaccctcaggcggacacgggcgagcagccctacgagcacctgaccgcagagtcttttcctgacatctctctgaacaacgagaaggtgctggtggagaccagttaccccagccaaaccactcgactgccccccatcacctatactggccgcttttccctggagcctgcacccaacagtggcaacaccttgtggcccgagcccctcttcagcttggtcagtggcctagtgagcatgaccaacccaccggcctcctcgtcctcagcaccatctccagcggcctcctccgcctccgcctcccagagcccacccctgagctgcgcagtgccatccaacgacagcagtcccatttactcagcggcacccaccttccccacgccgaacactgacattttccctgagccacaaagccaggccttcccgggctcggcagggacagcgctccagtacccgcctcctgcctaccctgccgccaagggtggcttccaggttcccatgatccccgactacctgtttccacagcagcagggggatctgggcctgggcaccccagaccagaagcccttccagggcctggagagccgcacccagcagccttcgctaacccctctgtctactattaaggcctttgccactcagtcgggctcccaggacctgaaggccctcaataccagctaccagtcccagctcatcaaacccagccgcatgcgcaagtaccccaaccggcccagcaagacgcccccccacgaacgcccttacgcttgcccagtggagtcctgtgatcgccgcttctcccgctccgacgagctcacccgccacatccgcatccacacaggccagaagcccttccagtgccgcatctgcatgcgcaacttcagccgcagcgaccacctcaccacccacatccgcacccacacaggcgaaaagcccttcgcctgcgacatctgtggaagaaagtttgccaggagcgatgaacgcaagaggcataccaagatccacttgcggcagaaggacaagaaagcagacaaaagtgttgtggcctcttcggccacctcctctctctcttcctacccgtccccggttgctacctcttacccgtccccggttactacctcttatccatccccggcctgcttggcacccccatctgaaagagcagcacttctcagcta

SEQ ID NO: 307659 - DNA, 1645 bp, Homo sapiens
ccgcagaacttggggagccgccgccgccatccgccgccgcagccagcttccgccgccgcaggaccggcccctgccccagcctccgcagccgcggcgcgtccacgcccgcccgcgcccagggcgagtcggggtcgccgcctgcacgcttctcagtgttccccgcgccccgcatgtaacccggccaggcccccgcaactgtgtcccctgcagctccagccccgggctgcacccccccgccccgacaccagctctccagcctgctcgtccaggatggccgcggccaaggccgagatgcagctgatgtccccgctgcagatctctgacccgttcggatcctttcctcactcgcccaccatggacaactaccctaagctggaggagatgatgctgctgagcaacggggctccccagttcctcggcgccgccggggccccagagggcagcggcagcaacagcagcagcagcagcagcgggggcggtggaggcggcgggggcggcagcaacagcagcagcagcagcagcaccttcaaccctcaggcggacacgggcgagcagccctacgagcacctgaccgcagagtcttttcctgacatctctctgaacaacgagaaggtgctggtggagaccagttaccccagccaaaccactcgactgccccccatcacctatactggccgcttttccctggagcctgcacccaacagtggcaacaccttgtggcccgagcccctcttcagcttggtcagtggcctagtgagcatgaccaacccaccggcctcctcgtcctcagcaccatctccagcggcctcctccgcctccgcctcccagagcccacccctgagctgcgcagtgccatccaacgacagcagtcccatttactcagcggcacccaccttccccacgccgaacactgacattttccctgagccacaaagccaggccttcccgggctcggcagggacagcgctccagtacccgcctcctgcctaccctgccgccaagggtggcttccaggttcccatgatccccgactacctgtttccacagcagcagggggatctgggcctgggcaccccagaccagaagcccttccagggcctggagagccgcacccagcagccttcgctaacccctctgtctactattaaggcctttgccactcagtcgggctcccaggacctgaaggccctcaataccagctaccagtcccagctcatcaaacccagccgcatgcgcaagtaccccaaccggcccagcaagacgcccccccacgaacgcccttacgcttgcccagtggagtcctgtgatcgccgcttctcccgctccgacgagctcacccgccacatccgcatccacacaggccagaagcccttccagtgccgcatctgcatgcgcaacttcagccgcagcgaccacctcaccacccacatccgcacccacacaggcgaaaagcccttcgcctgcgacatctgtggaagaaagtttgccaggagcgatgaacgcaagaggcataccaagatccacttgcggcagaaggacaagaaagcagacaaaagtgttgtggcctcttcggccacctcctctctctcttcctacccgtcctgcctgagattcgtcctggcctgcgatcgtcctggcctgagat

SEQ ID NO: 307660 - DNA, 810 bp, Homo sapiens
ccgcagaacttggggagccgccgccgccatccgccgccgcagccagcttccgccgccgcaggaccggcccctgccccagcctccgcagccgcggcgcgtccacgcccgcccgcgcccagggcgagtcggggtcgccgcctgcacgcttctcagtgttccccgcgccccgcatgtaacccggccaggcccccgcaactgtgtcccctgcagctccagccccgggctgcacccccccgccccgacaccagctctccagcctgctcgtccaggatggccgcggccaaggccgagatgcagctgatgtccccgctgcagatctctgacccgttcggatcctttcctcactcgcccaccatggacaactaccctaagctggaggagatgatgctgctgagcaacggggctccccagttcctcggcgccgccggggccccagagggcagcggcagcaacagcagcagcagcagcagcgggggcggtggaggcggcgggggcggcagcaacagcagcagcagcagcagcaccttcaaccctcaggcggacacgggcgagcagccctacgagcacctgaccgcagagtcttttcctgacatctctctgaacaacgagaaggtgctggtggagaccagttaccccagccaaaccactcgactgccccccatcacctatactggccgcttttccctggagcctgcacccaacagtggcaacaccttgtggcccgagcccctcttgcctttggcagatgcctgatgtatttcgatacatgcctagcaccccacaacccccacttgtagcacccattgacac

SEQ ID NO: 307661 - DNA, 676 bp, Homo sapiens
gtggggtcaggaaatgtggctaggatttgatggagatctccctgggtaataagagggattttggtgagaagaaagactgtgagctggagcccaatatctttagtgaatataatacacgacctggaaattagtagagcatagtaacttggtgcagccatgtaagtgccagacagactttagttcaaatcacagctccaccgtggaccactgctagtttttgggcatgttgcttaccatgtcgaatcacagtacactcaactataaactgtgagaaataaatacgtctatcccacagagctgttatgtgtagcagatgctagtataataattacctacccaacaaccatttgcatcttcttttttactaacaaaacaaaatcctttatgaagctaaatgctcaagctaagttggtcccagccttagacccactgggtagatcttgattcgtcttagccagtcatggtgatcccttcttcctttccaatgattgacttatgaaagactcaatactggacagtgtgatgtaggataagctaagatgacttctgggaaatatttcctatctttttactttggtgtgtgaagatgtgatgccaagagcttctgcagctatcctgaggaaaactagcagataagctaagcttaatgaaagaaacccttagttaccgtctcaaa

SEQ ID NO: 307662 - DNA, 679 bp, Homo sapiens
tattcaatgccttcttcaagattctgtgctttgaattgggtgtcatgaataatagttttgttgacctttgtccacaaaatactgtttctttcttttctctccaggtggtaacctatgacggggcttccaccattgttgactggttcatgccactgtatgaccatggagtctttggaaatggctgtggcaaatggtgtacctggagggcctggttctttgtagggatattgagctacaattggatcagactctaaggcaaagctttgtccatatctgttttcggcaaatattctaaattggtattctgtaccagttttcagtttggtcactttgagtgtagttctagcaacagtagcagaaacaacatcccatactgtggtggttgtatctcttttctgaacaatgtagttggtgatttggcagccccctgtatataatggagggttccaagataatgtaatactttcagcactgacgtcatcaaatttaacaggtccttttggaggatcaggtttatctagagttacaatttcgatggatgctgtcttctgaccaacaacattggcaactgtgattccatattgtccaccatcatccttatgagtttctttaatactgagtgtggtgagatccagtgaatcggtaacattgattcttgtggtctgcttcagtgggagac

SEQ ID NO: 307663 - DNA, 8510 bp, Homo sapiens
  misc_feature (5076)..(5076): n is a, c, g, or t
cgtcatggccgtcagcaccgcgttcccgtcctcttccgcttggccccagaaagtttcggttctgcccggcggtggacccacgagcgcgtgccaccatggagtctgaccactgctgagcagacagccaccgagggccgaaattctgagccttcctctggacccaggcaggagacatacagacaagaaaggcaaactcaccatggcctccaccaatgcagagagccagctccagagaatcatccgagacttgcaagatgctgtgacagaactaagcaaagaatttcaggaagcaggggaacccatcacggatgacagcaccagcttgcataaattttcttataaacttgagtatctcctgcaatttgatcagaaagagaaggccaccctcctgggcaacaagaaggactactgggattacttctgtgcctgcctggccaaggtgaaaggagccaatgatgggatccgatttgtcaagtctatctcagagctccgaacatccttggggaaaggaagagcatttattcgctactccttggtgcaccagaggttggcagacaccttacagcagtgcttcatgaacaccaaagtgaccagtgactggtactatgcaagaagcccctttctgcagccaaagctgagctcggacattgtgggccaactctatgagctgactgaggttcagtttgacctggcgtcgaggggctttgacttggatgctgcctggccaacatttgccaggaggacgctgaccactggctcttctgcttacctgtggaaaccccctagccgcagctccagcatgagcagcttggtgagcagctacctgcagactcaagagatggtgtccaactttgacctgaacagccccctaaacaacgaggcattggagggctttgatgagatgcgactagagctggaccagttggaggtgcgggagaagcagctacaggagcgcatgcagcagctggacagagagaaccaggagctgagggcagctgtcagccagcaaggggagcaactgcagacagagagggagagggggcgcactgcagcggaggacaacgttcgcctcacttgcttggtagctgagctccagaagcagtgggaggtcacccaggccacccagaacactgtgaaggagctgcagacatgcctgcaggccctggagctaggagcagcagagaaggaggaggactaccacacagccctgcggcggctggagtccatgctgcagcccttggcacaggagcttgaggccacacgggactcactggacaagaaaaaccagcatttagccagcttcccaggctggctagccatggctcagcagaaggcagatacggcatcagacacaaagggccggcaagaacctattcccagtgatgcggcccaggagatgcaggagctaggggagaagcttcaagccctagaaagggagagaaccaaggtcgaggaggtcaacagacagcagagtgcccaactggaacagctggtcaaggagcttcagctgaaagaggatgcccgggccagcctggagcgcctggtgaaggagatggccccactccaggaggagttgtctgggaagggacaggaggcagaccagctctggcgacggctgcaggagttgctggcccacacgagctcctgggaggaggagctagcagagttgaggcgggagaaaaaacagcaacaggaggagaaggagctgctggagcaggaggtcaggtctctgacccggcagctgcagttcctggagacccagctggcacaggtgagccaacatgtgagtgacctggaggagcagaagaagcagctcattcaggacaaagaccacctcagccagcaggtgggtatgctcgagcggcttgctgggccgcctggcccagaactgccagtggcaggtgagaagaatgaggccctggtccctgtgaactccagtctgcaagaggcctgggggaagccagaggaggagcagaggggcctgcaggaggcacagttagacgataccaaggtgcaagagggcagccaggaggaagagctccggcaggccaacagggagctggagaaggagctacagaatgtggtcgggcgtaaccagctcctggagggcaagctgcaagccctgcaggccgattaccaggctttgcagcagcgggaatcagccatccagggctccttggcctccctggaggccgagcaggccagcatccggcacttgggtgaccagatggaggcgagcttgctggctgtaaggaaggccaaggaggccatgaaagcccagatggcagagaaggaggccattctacagagcaaggagggcgagtgtcagcagctgcgggaggaggtggagcagtgccagcaactggcagaagcccggcacagagagcttagggctctcgagagccagtgccagcagcagacccagctgattgaggtcctcacagcagagaaaggccaacagggagttggcccacccactgacaatgaagcccgtgagctggctgcccagctagccctgtctcaggcgcagctggaagtccatcagggggaggtccaacggctgcaggctcaggtggtggacctccaggccaagatgcgggcagccctggatgaccaggacaaggtgcagagccagctaagcatggctgaggccgtcctgagggagcacaaaacccttgtgcagcagctgaaggagcagaatgaagcccttaacagagcccatgtccaggagctgctgcaatgctcggagcgtgaaggggcactgcaggaggagagggccgatgaggcccagcagagggaggaggagctgcgggccctgcaggaggagctgtcccaggccaaatgcagctccgaggaagcacagctggagcacgctgagctgcaagagcagctgcaccgggccaacacagacacagctgagctgggcatccaggtttgcgcactgaccgtggaaaaggagcgagtggaggaggcactggcctgtgctgtccaggagctccaggacgccaaagaggcagcctcaagggagcgagagggcctggagcgccaagtagctgggctgcagcaagagaaggagagcttgcaggagaagctgaaggcggccaaggcagcagccggctcactgcctggcctgcaggcccagctcgcccaggcagagcagcgggcccagagcctccaagaggctgcacaccaggagctcaacaccctcaagttccagctgagtgctgaaatcatggactaccagagcagacttaagaatgctggtgaagagtgcaagagcctcaggggccagcttgaggagcaaggccggcagctgcaggctgctgaggaagctgtggagaagctgaaggccacccaagcagacatgggagagaagctgagctgcactagcaaccatcttgcagagtgccaggcggccatgctgaggaaggacaaggagggggctgccctgcgtgaagacctagaaaggacccagaaggaactcgaaaaagccacaacaaaaatccaagagtattacaacaaactctgccaggaggtgacaaatcgtgagaggaatgaccagaagatgcttgctgacctggatgacctcaacagaaccaagaagtatctcgaggagcggctgatagagctgctcagggacaaggatgctctctggcagaagtcagatgccctggaattccagcagaagctcagtgctgaggagagatggctcggagacacagaggcaaaccactgcctcgactgtaagcgggagttcagctggatggtgcggcggcaccactgcaggatatgtggccgcatcttctgttactactgctgcaacaactacgtcctgagcaagcacggtggcaaaaaggagcgctgctgccgagcctgtttccagaagctcagtgaaggccctggctcccctgatagcagtggctcaggcactagccagggagagcccagccctgcactgtcaccagcctcacctgggccccaggccacaggaggccaaggagcaaatacagactacaggccaccggacgacgctgtgtttgatatcatcacagatgaggaattgtgccagatacaggagtccggctcctctttgcctgaaacacccactgaaactgattctcttgacccaaatgcggctgaacaggatactacatcaacctcgctaacgcctgaggacactgaagacatgcccgtggggcaggattcggaaatctgcctgctgaagtctggagaactgatgatcaaagtacccctcacagtggatgagatcgccagcttcggggagggtagcagggagctgtttgtgaggtccagcacctacagcctgatccccatcactgtggccgaggcaggcctcaccatcagctgggtcttctcctctgaccccaagagcatctccttcagtgtggtcttccaggaggccgaggacacaccgctggatcagtgtaaggtcctcattcccacgacccgatgcaactcccacaaggagaacatccagggccagctcaaggttcgcacacccggcatctacatgctcatcttcgacaataccttctcaaggtttgtctctaaaaaggtattttatcacttgacggttgatcggcctgtgatctacgatggaagtgatttcctgtagcttcagcacctcagtaacttcacttcatccacaggaaacactgctcttcctcacctgtcacataaagcatttttttaaaaagtcagctgctccaaaatcatcaactcagcccctgggctgcccctcagaggcggtgtctggggaggactttgtgctcagcactctgcaccggccactcttagcccccgaggcgttgaagggctcaggcaatgtttccattaagtagagactcagctgttgtcacacccaaagggatgctctgccaaaggtttaaacacccaggagaccatcagcctctcctgggagcacagttgactacaggcctcttgtggagagtttcacgggcaggggtgattccaacttctgcctgtggagagattttctgccctgccccaccagggccctgcatgttggagactgagctgggtgcactggccatnccctgtgaatcctcgggctgtgacgccctcaggtactcctgggaaaaggaggtacacagccatcatgcgagtcggtgccaggggaccccccggagatcctgaccagctcctccagtcatgctcttgtccctcactgccccagtaagctggaggctgctccagaactcagcagtgttggaggggcctctaagctgcactctctttctggcccttttgtctggctgattctgtcctcaaataaagcccttcactcagccagacctctccacagctcaaagcattgccctaagaatcagaagtaaagataatccaagagcaaaacccactgtacttggggcctgcaatggctgtgtgtacactacatctaatgcccaaatgccagccagtgtggatgttgtgaccacagagcaggattgtgcattggctttagagctactcctcagctgatggcccacttttgtttatataaataagagcttctgccccacctgcagacatgtttactaatgatcatagccaggattagaaccactttcaaacattggggccttcttaacaaaagtctttgataacttaagaaccaaagtaacagagtaaacagaggcatgatggatccctgggccccactcccctcctgacaggttccccaacagcccatttgcccacttcccactgctcagcccacaccagacctccaggagacatccccccttgaggcagagagatcctgttccctattcccagacaagaattatttaatcttccctgttctctgtggtccttttcttccccaacaacagatagctcaccttggacagctcttcgtcccttgttcatggaaccagctgcctgcagtcaggccccaggttcttccatgggtgaacagagcatctgacaaaaggtcccagtttggccaggggtgagggagagagcaccagacaggctatccgagaatctgagagctgggcccggcaattcctccagctacccttgtgacctaagtccagtcacacatttcccaaagtttctctttgtcataaccctggtctggctggttttgagggcttgagaatgggtcagggactccaggccaagtccaacagagaccccaaacccaccacacaccagcagccacaacctcaccaccaacaaagaggacttttgtggggccacaagtaagaggtcatttctggaatggactcagacctttaaacaggagagttgagcacttccagtcagtttttaagcaaggcatggggaacagggaatagaacctttcaaagaggttgcccagagaaaagctgggcctcttgcattcggcttccttggagcagcctcttctggcagaaagccatcaggtgctcaatcatcttctcctggccaaggctctgaccatgcttagtactggaatagaggtggccaggcccccagcgactcttcttggcctgatgtttgtcctcacaggcatgccacgtggcctgagatgattcagaacaaatcatgctaactttgaatccatccagccacttgcaaatgataatcagaagtcagcttgttcactgttagaaagaaactaacaaaagagaacccagagcaatctagaatctttgagtgcttggctttccaaggatactgcggagactctggccaagctgatgaccttctgaagtgtcactggcaccatatgcaacaagaaccaccattcactgagtagctaatgggtttggggcctgggacattccatctgaggtccttcctgaacatgtcactccacagcagaggaccggttgcagcttacccagaaccactcctccaggagagctggatgttttgcgtgcaacaccttgagcactgactgctattgttcaaaaaaagcctttgctgcattcggaggactgccccgtgccctgaggtgacttcctaactatgtggtttcattagcgaatttatttttgtgctgggtggacatttgtattttgttaggttgctgtttaagctcaagtttgctgtgctctctgcagctacaaaacatcttggcatatttaagagtggcttttataaatagctttattctgatattaatcagattcccaactttactgagaattaaggactggggtactttaaagaaatgcaaatagcaattgaagaaccactgctgcaggtggtagccctggctagactgaattacactagaaatcagccagaaggaagcgtccttgggatcccagatcactcttttttttttttttttttaaaaggggcagccccttgatggctcatctctctgaataacagttacgtcttcatatcgataccagatgccttcttcatcatgccactgaagccactcaccaccttcaagaacatgccaacctctgtcagattcacttacccacaaacaaggaggcacgtttggcacaaagtgttgtcctccaggtccaagtggactctacagagtgcttgacctcaacacactggattccaggtggactggaccaagagcaggcaaagacacgggaactgaaaaactccacagggtttggagaatagaaatgaaaagccacgtcatataactcaagaataaatggtgttttggaaattttaaaattatcatcgaaggtggtgaaactatttcaggcccaaatgaaaggaaatcgccagttggggatgaaatcacagagcctgtgttttatgatatggttggatgtccactgatgaaattttaaaggagtttcatttttaaaagtgcgcatgattctacatatgagaattctttaggccaagaaactgtccttggctcagaggtgttgggaattaaagcagagagaagccattcgtgatgcttagaaccaaggatggtcatgtacacaaagaccatcgagacggccattcttgtttacaaaacacttaccaagaaagcactttgtaggggaactttagtaagttcttctcatttcattatgtttcttccaaggaaacaggagagactgaattaataattctctctttcctcttaagcacttttaaaataataaagtacatcttgaaatttggggaggcatctctgatttaaaaaaagaaaaaggctgcttgatgtatgttatgcagagacactctgcctctggtggctgcagagcaatacccaagcctcatttggaaggctcaacatttggaattgcactttaattgattaatcctcaattcatgtggccttacgggatggtgggtctgggaccccaattcattcttatctgccaaagaattatctagaagcacatcaaataccagcaccccacctgcacaatgggggtggaaaacttttgtatccctaagcatattattttatagtgtctgccatgccatgtggaaatactttatttttaacctcaggatttaaataaagtaaacactatgacatttaaaaaaaaaac

SEQ ID NO: 307664 - DNA, 8456 bp, Homo sapiens
  misc_feature (5076)..(5076): n is a, c, g, or t
cgtcatggccgtcagcaccgcgttcccgtcctcttccgcttggccccagaaagtttcggttctgcccggcggtggacccacgagcgcgtgccaccatggagtctgaccactgctgagcagacagccaccgagggccgaaattctgagccttcctctggacccaggcaggagacatacagacaagaaaggcaaactcaccatggcctccaccaatgcagagagccagctccagagaatcatccgagacttgcaagatgctgtgacagaactaagcaaagaatttcaggaagcaggggaacccatcacggatgacagcaccagcttgcataaattttcttataaacttgagtatctcctgcaatttgatcagaaagagaaggccaccctcctgggcaacaagaaggactactgggattacttctgtgcctgcctggccaaggtgaaaggagccaatgatgggatccgatttgtcaagtctatctcagagctccgaacatccttggggaaaggaagagcatttattcgctactccttggtgcaccagaggttggcagacaccttacagcagtgcttcatgaacaccaaagtgaccagtgactggtactatgcaagaagcccctttctgcagccaaagctgagctcggacattgtgggccaactctatgagctgactgaggttcagtttgacctggcgtcgaggggctttgacttggatgctgcctggccaacatttgccaggaggacgctgaccactggctcttctgcttacctgtggaaaccccctagccgcagctccagcatgagcagcttggtgagcagctacctgcagactcaagagatggtgtccaactttgacctgaacagccccctaaacaacgaggcattggagggctttgatgagatgcgactagagctggaccagttggaggtgcgggagaagcagctacaggagcgcatgcagcagctggacagagagaaccaggagctgagggcagctgtcagccagcaaggggagcaactgcagacagagagggagagggggcgcactgcagcggaggacaacgttcgcctcacttgcttggtagctgagctccagaagcagtgggaggtcacccaggccacccagaacactgtgaaggagctgcagacatgcctgcaggccctggagctaggagcagcagagaaggaggaggactaccacacagccctgcggcggctggagtccatgctgcagcccttggcacaggagcttgaggccacacgggactcactggacaagaaaaaccagcatttagccagcttcccaggctggctagccatggctcagcagaaggcagatacggcatcagacacaaagggccggcaagaacctattcccagtgatgcggcccaggagatgcaggagctaggggagaagcttcaagccctagaaagggagagaaccaaggtcgaggaggtcaacagacagcagagtgcccaactggaacagctggtcaaggagcttcagctgaaagaggatgcccgggccagcctggagcgcctggtgaaggagatggccccactccaggaggagttgtctgggaagggacaggaggcagaccagctctggcgacggctgcaggagttgctggcccacacgagctcctgggaggaggagctagcagagttgaggcgggagaaaaaacagcaacaggaggagaaggagctgctggagcaggaggtcaggtctctgacccggcagctgcagttcctggagacccagctggcacaggtgagccaacatgtgagtgacctggaggagcagaagaagcagctcattcaggacaaagaccacctcagccagcaggtgggtatgctcgagcggcttgctgggccgcctggcccagaactgccagtggcaggtgagaagaatgaggccctggtccctgtgaactccagtctgcaagaggcctgggggaagccagaggaggagcagaggggcctgcaggaggcacagttagacgataccaaggtgcaagagggcagccaggaggaagagctccggcaggccaacagggagctggagaaggagctacagaatgtggtcgggcgtaaccagctcctggagggcaagctgcaagccctgcaggccgattaccaggctttgcagcagcgggaatcagccatccagggctccttggcctccctggaggccgagcaggccagcatccggcacttgggtgaccagatggaggcgagcttgctggctgtaaggaaggccaaggaggccatgaaagcccagatggcagagaaggaggccattctacagagcaaggagggcgagtgtcagcagctgcgggaggaggtggagcagtgccagcaactggcagaagcccggcacagagagcttagggctctcgagagccagtgccagcagcagacccagctgattgaggtcctcacagcagagaaaggccaacagggagttggcccacccactgacaatgaagcccgtgagctggctgcccagctagccctgtctcaggcgcagctggaagtccatcagggggaggtccaacggctgcaggctcaggtggtggacctccaggccaagatgcgggcagccctggatgaccaggacaaggtgcagagccagctaagcatggctgaggccgtcctgagggagcacaaaacccttgtgcagcagctgaaggagcagaatgaagcccttaacagagcccatgtccaggagctgctgcaatgctcggagcgtgaaggggcactgcaggaggagagggccgatgaggcccagcagagggaggaggagctgcgggccctgcaggaggagctgtcccaggccaaatgcagctccgaggaagcacagctggagcacgctgagctgcaagagcagctgcaccgggccaacacagacacagctgagctgggcatccaggtttgcgcactgaccgtggaaaaggagcgagtggaggaggcactggcctgtgctgtccaggagctccaggacgccaaagaggcagcctcaagggagcgagagggcctggagcgccaagtagctgggctgcagcaagagaaggagagcttgcaggagaagctgaaggcggccaaggcagcagccggctcactgcctggcctgcaggcccagctcgcccaggcagagcagcgggcccagagcctccaagaggctgcacaccaggagctcaacaccctcaagttccagctgagtgctgaaatcatggactaccagagcagacttaagaatgctggtgaagagtgcaagagcctcaggggccagcttgaggagcaaggccggcagctgcaggctgctgaggaagctgtggagaagctgaaggccacccaagcagacatgggagagaagctgagctgcactagcaaccatcttgcagagtgccaggcggccatgctgaggaaggacaaggagggggctgccctgcgtgaagacctagaaaggacccagaaggaactcgaaaaagccacaacaaaaatccaagagtattacaacaaactctgccaggaggtgacaaatcgtgagaggaatgaccagaagatgcttgctgacctggatgacctcaacagaaccaagaagtatctcgaggagcggctgatagagctgctcagggacaaggatgctctctggcagaagtcagatgccctggaattccagcagaagctcagtgctgaggagagatggctcggagacacagaggcaaaccactgcctcgactgtaagcgggagttcagctggatggtgcggcggcaccactgcaggatatgtggccgcatcttctgttactactgctgcaacaactacgtcctgagcaagcacggtggcaaaaaggagcgctgctgccgagcctgtttccagaagctcagtgaaggccctggctcccctgatagcagtggctcaggcactagccagggagagcccagccctgcactgtcaccagcctcacctgggccccaggccacaggaggccaaggagcaaatacagactacaggccaccggacgacgctgtgtttgatatcatcacagatgaggaattgtgccagatacaggagtccggctcctctttgcctgaaacacccactgaaactgattctcttgacccaaatgcggctgaacaggatactacatcaacctcgctaacgcctgaggacactgaagacatgcccgtggggcaggattcggaaatctgcctgctgaagtctggagaactgatgatcaaagtacccctcacagtggatgagatcgccagcttcggggagggtagcagggagctgtttgtgaggtccagcacctacagcctgatccccatcactgtggccgaggcaggcctcaccatcagctgggtcttctcctctgaccccaagagcatctccttcagtgtggtcttccaggaggccgaggacacaccgctggatcagtgtaaggtcctcattcccacgacccgatgcaactcccacaaggagaacatccagggccagctcaaggttcgcacacccggcatctacatgctcatcttcgacaataccttctcaaggtttgtctctaaaaaggtattttatcacttgacggttgatcggcctgtgatctacgatggaagtgatttcctgtagcttcagcacctcagtaacttcacttcatccacaggaaacactgctcttcctcacctgtcacataaagcatttttttaaaaagtcagctgctccaaaatcatcaactcagcccctgggctgcccctcagaggcggtgtctggggaggactttgtgctcagcactctgcaccggccactcttagcccccgaggcgttgaagggctcaggcaatgtttccattaagtagagactcagctgttgtcacacccaaagggatgctctgccaaaggtttaaacacccaggagaccatcagcctctcctgggagcacagttgactacaggcctcttgtggagagtttcacgggcaggggtgattccaacttctgcctgtggagagattttctgccctgccccaccagggccctgcatgttggagactgagctgggtgcactggccatnccctgtgaatcctcgggctgtgacgccctcaggtactcctgggaaaaggaggtacacagccatcatgcgagtcggtgccaggggaccccccggagatcctgaccagctcctccagtcatgctcttgtccctcactgccccagtaagctggaggctgctccagaactcagcagtgttggaggggcctctaagctgcactctctttctggcccttttgtctggctgattctgtcctcaaataaagcccttcactcagccagacctctccacagctcaaagcattgccctaagaatcagaagtaaagataatccaagagcaaaacccactgtacttggggcctgcaatggctgtgtgtacactacatctaatgcccaaatgccagccagtgtggatgttgtgaccacagagcaggattgtgcattggctttagagctactcctcagctgatggcccacttttgtttatataaataagagcttctgccccacctgcagacatgtttactaatgatcatagccaggattagaaccactttcaaacattggggccttcttaacaaaagtctttgataacttaagaaccaaagtaacagagtaaacagaggcatgatggatccctgggccccactcccctcctgacaggttccccaacagcccatttgcccacttcccactgctcagcccacaccagacctccaggagacatccccccttgaggcagagagatcctgttccctattcccagacaagaattatttaatcttccctgttctctgtggtccttttcttccccaacaacagatagctcaccttggacagctcttcgtcccttgttcatggaaccagctgcctgcagtcaggccccaggttcttccatgggtgaacagagcatctgacaaaaggtcccagtttggccaggggtgagggagagagcaccagacaggctatccgagaatctgagagctgggcccggcaattcctccagctacccttgtgacctaagtccagtcacacatttcccaaagtttctctttgtcataaccctggtctggctggttttgagggcttgagaatgggtcagggactccaggccaagtccaacagagaccccaaacccaccacacaccagcagccacaacctcaccaccaacaaagaggacttttgtggggccacaagtaagaggtcatttctggaatggactcagacctttaaacaggagagttgagcacttccagtcagtttttaagcaaggcatggggaacagggaatagaacctttcaaagaggttgcccagagaccatcaggtgctcaatcatcttctcctggccaaggctctgaccatgcttagtactggaatagaggtggccaggcccccagcgactcttcttggcctgatgtttgtcctcacaggcatgccacgtggcctgagatgattcagaacaaatcatgctaactttgaatccatccagccacttgcaaatgataatcagaagtcagcttgttcactgttagaaagaaactaacaaaagagaacccagagcaatctagaatctttgagtgcttggctttccaaggatactgcggagactctggccaagctgatgaccttctgaagtgtcactggcaccatatgcaacaagaaccaccattcactgagtagctaatgggtttggggcctgggacattccatctgaggtccttcctgaacatgtcactccacagcagaggaccggttgcagcttacccagaaccactcctccaggagagctggatgttttgcgtgcaacaccttgagcactgactgctattgttcaaaaaaagcctttgctgcattcggaggactgccccgtgccctgaggtgacttcctaactatgtggtttcattagcgaatttatttttgtgctgggtggacatttgtattttgttaggttgctgtttaagctcaagtttgctgtgctctctgcagctacaaaacatcttggcatatttaagagtggcttttataaatagctttattctgatattaatcagattcccaactttactgagaattaaggactggggtactttaaagaaatgcaaatagcaattgaagaaccactgctgcaggtggtagccctggctagactgaattacactagaaatcagccagaaggaagcgtccttgggatcccagatcactcttttttttttttttttttaaaaggggcagccccttgatggctcatctctctgaataacagttacgtcttcatatcgataccagatgccttcttcatcatgccactgaagccactcaccaccttcaagaacatgccaacctctgtcagattcacttacccacaaacaaggaggcacgtttggcacaaagtgttgtcctccaggtccaagtggactctacagagtgcttgacctcaacacactggattccaggtggactggaccaagagcaggcaaagacacgggaactgaaaaactccacagggtttggagaatagaaatgaaaagccacgtcatataactcaagaataaatggtgttttggaaattttaaaattatcatcgaaggtggtgaaactatttcaggcccaaatgaaaggaaatcgccagttggggatgaaatcacagagcctgtgttttatgatatggttggatgtccactgatgaaattttaaaggagtttcatttttaaaagtgcgcatgattctacatatgagaattctttaggccaagaaactgtccttggctcagaggtgttgggaattaaagcagagagaagccattcgtgatgcttagaaccaaggatggtcatgtacacaaagaccatcgagacggccattcttgtttacaaaacacttaccaagaaagcactttgtaggggaactttagtaagttcttctcatttcattatgtttcttccaaggaaacaggagagactgaattaataattctctctttcctcttaagcacttttaaaataataaagtacatcttgaaatttggggaggcatctctgatttaaaaaaagaaaaaggctgcttgatgtatgttatgcagagacactctgcctctggtggctgcagagcaatacccaagcctcatttggaaggctcaacatttggaattgcactttaattgattaatcctcaattcatgtggccttacgggatggtgggtctgggaccccaattcattcttatctgccaaagaattatctagaagcacatcaaataccagcaccccacctgcacaatgggggtggaaaacttttgtatccctaagcatattattttatagtgtctgccatgccatgtggaaatactttatttttaacctcaggatttaaataaagtaaacactatgacatttaaaaaaaaaac

SEQ ID NO: 307665 - DNA, 6624 bp, Homo sapiens
  misc_feature (3190)..(3190): n is a, c, g, or t
cgtcatggccgtcagcaccgcgttcccgtcctcttccgcttggccccagaaagtttcggttctgcccggcggtggacccacgagcgcgtgccaccatggagtctgaccactgctgagcagacagccaccgagggccgaaattctgagccttcctctggacccaggcaggagacatacagacaagaaaggcaaactcaccatggcctccaccaatgcagagagccagctccagagaatcatccgagacttgcaagatgctgtgacagaactaagcaaagaatttcaggaagcaggggaacccatcacggatgacagcaccagcttgcataaattttcttataaacttgagtatctcctgcaatttgatcagaaagagaaggccaccctcctgggcaacaagaaggactactgggattacttctgtgcctgcctggccaaggtgaaaggagccaatgatgggatccgatttgtcaagtctatctcagagctccgaacatccttggggaaaggaagagcatttattcgctactccttggtgcaccagaggttggcagacaccttacagcagtgcttcatgaacaccaaagtgaccagtgactggtactatgcaagaagcccctttctgcagccaaagctgagctcggacattgtgggccaactctatgagctgactgaggttcagtttgacctggcgtcgaggggctttgacttggatgctgcctggccaacatttgccaggaggacgctgaccactggctcttctgcttacctgtggaaaccccctagccgcagctccagcatgagcagcttggtgagcagctacctgcagactcaagagatggtgtccaactttgacctgaacagccccctaaacaacgaggcattggagggctttgatgagatgcgactagagctggaccagttggaggtgcgggagaagcagctacaggagcgcatgcagcagctggacagagagaaccaggagctgagggcagctgtcagccagcaaggggagcaactgcagacagagagggagagggggcgcactgcagcggaggacaacgttcgcctcacttgcttggtagctgagctccagaagcagtgggaggtcacccaggccacccagaacactgtgaaggagctgcagacatgcctgcaggccctggagctaggagcagcagagaaggaggaggactaccacacagccctgcggcggctggagtccatgctgcagcccttggcacaggagcttgaggccacacgggactcactggacaagaaaaaccagcatttagccagcttcccaggctggctagccatggctcagcagaaggcagatacggcatcagacacaaagggccggcaagaacctattcccagtgatgcggcccaggagatgcaggagctaggggagaagcttcaagccctagaaagggagagaaccaaggtcgaggaggtcaacagacagcagagtgcccaactggaacagctggtcaaggagcttcagctgaaagaggatgcccgggccagcctggagcgcctggtgaaggagatggccccactccaggaggagttgtctggggacccagaaggaactcgaaaaagccacaacaaaaatccaagagtattacaacaaactctgccaggaggtgacaaatcgtgagaggaatgaccagaagatgcttgctgacctggatgacctcaacagaaccaagaagtatctcgaggagcggctgatagagctgctcagggacaaggatgctctctggcagaagtcagatgccctggaattccagcagaagctcagtgctgaggagagatggctcggagacacagaggcaaaccactgcctcgactgtaagcgggagttcagctggatggtgcggcggcaccactgcaggatatgtggccgcatcttctgttactactgctgcaacaactacgtcctgagcaagcacggtggcaaaaaggagcgctgctgccgagcctgtttccagaagctcagtgaaggccctggctcccctgatagcagtggctcaggcactagccagggagagcccagccctgcactgtcaccagcctcacctgggccccaggccacaggaggccaaggagcaaatacagactacaggccaccggacgacgctgtgtttgatatcatcacagatgaggaattgtgccagatacaggagtccggctcctctttgcctgaaacacccactgaaactgattctcttgacccaaatgcggctgaacaggatactacatcaacctcgctaacgcctgaggacactgaagacatgcccgtggggcaggattcggaaatctgcctgctgaagtctggagaactgatgatcaaagtacccctcacagtggatgagatcgccagcttcggggagggtagcagggagctgtttgtgaggtccagcacctacagcctgatccccatcactgtggccgaggcaggcctcaccatcagctgggtcttctcctctgaccccaagagcatctccttcagtgtggtcttccaggaggccgaggacacaccgctggatcagtgtaaggtcctcattcccacgacccgatgcaactcccacaaggagaacatccagggccagctcaaggttcgcacacccggcatctacatgctcatcttcgacaataccttctcaaggtttgtctctaaaaaggtattttatcacttgacggttgatcggcctgtgatctacgatggaagtgatttcctgtagcttcagcacctcagtaacttcacttcatccacaggaaacactgctcttcctcacctgtcacataaagcatttttttaaaaagtcagctgctccaaaatcatcaactcagcccctgggctgcccctcagaggcggtgtctggggaggactttgtgctcagcactctgcaccggccactcttagcccccgaggcgttgaagggctcaggcaatgtttccattaagtagagactcagctgttgtcacacccaaagggatgctctgccaaaggtttaaacacccaggagaccatcagcctctcctgggagcacagttgactacaggcctcttgtggagagtttcacgggcaggggtgattccaacttctgcctgtggagagattttctgccctgccccaccagggccctgcatgttggagactgagctgggtgcactggccatnccctgtgaatcctcgggctgtgacgccctcaggtactcctgggaaaaggaggtacacagccatcatgcgagtcggtgccaggggaccccccggagatcctgaccagctcctccagtcatgctcttgtccctcactgccccagtaagctggaggctgctccagaactcagcagtgttggaggggcctctaagctgcactctctttctggcccttttgtctggctgattctgtcctcaaataaagcccttcactcagccagacctctccacagctcaaagcattgccctaagaatcagaagtaaagataatccaagagcaaaacccactgtacttggggcctgcaatggctgtgtgtacactacatctaatgcccaaatgccagccagtgtggatgttgtgaccacagagcaggattgtgcattggctttagagctactcctcagctgatggcccacttttgtttatataaataagagcttctgccccacctgcagacatgtttactaatgatcatagccaggattagaaccactttcaaacattggggccttcttaacaaaagtctttgataacttaagaaccaaagtaacagagtaaacagaggcatgatggatccctgggccccactcccctcctgacaggttccccaacagcccatttgcccacttcccactgctcagcccacaccagacctccaggagacatccccccttgaggcagagagatcctgttccctattcccagacaagaattatttaatcttccctgttctctgtggtccttttcttccccaacaacagatagctcaccttggacagctcttcgtcccttgttcatggaaccagctgcctgcagtcaggccccaggttcttccatgggtgaacagagcatctgacaaaaggtcccagtttggccaggggtgagggagagagcaccagacaggctatccgagaatctgagagctgggcccggcaattcctccagctacccttgtgacctaagtccagtcacacatttcccaaagtttctctttgtcataaccctggtctggctggttttgagggcttgagaatgggtcagggactccaggccaagtccaacagagaccccaaacccaccacacaccagcagccacaacctcaccaccaacaaagaggacttttgtggggccacaagtaagaggtcatttctggaatggactcagacctttaaacaggagagttgagcacttccagtcagtttttaagcaaggcatggggaacagggaatagaacctttcaaagaggttgcccagagaaaagctgggcctcttgcattcggcttccttggagcagcctcttctggcagaaagccatcaggtgctcaatcatcttctcctggccaaggctctgaccatgcttagtactggaatagaggtggccaggcccccagcgactcttcttggcctgatgtttgtcctcacaggcatgccacgtggcctgagatgattcagaacaaatcatgctaactttgaatccatccagccacttgcaaatgataatcagaagtcagcttgttcactgttagaaagaaactaacaaaagagaacccagagcaatctagaatctttgagtgcttggctttccaaggatactgcggagactctggccaagctgatgaccttctgaagtgtcactggcaccatatgcaacaagaaccaccattcactgagtagctaatgggtttggggcctgggacattccatctgaggtccttcctgaacatgtcactccacagcagaggaccggttgcagcttacccagaaccactcctccaggagagctggatgttttgcgtgcaacaccttgagcactgactgctattgttcaaaaaaagcctttgctgcattcggaggactgccccgtgccctgaggtgacttcctaactatgtggtttcattagcgaatttatttttgtgctgggtggacatttgtattttgttaggttgctgtttaagctcaagtttgctgtgctctctgcagctacaaaacatcttggcatatttaagagtggcttttataaatagctttattctgatattaatcagattcccaactttactgagaattaaggactggggtactttaaagaaatgcaaatagcaattgaagaaccactgctgcaggtggtagccctggctagactgaattacactagaaatcagccagaaggaagcgtccttgggatcccagatcactcttttttttttttttttttaaaaggggcagccccttgatggctcatctctctgaataacagttacgtcttcatatcgataccagatgccttcttcatcatgccactgaagccactcaccaccttcaagaacatgccaacctctgtcagattcacttacccacaaacaaggaggcacgtttggcacaaagtgttgtcctccaggtccaagtggactctacagagtgcttgacctcaacacactggattccaggtggactggaccaagagcaggcaaagacacgggaactgaaaaactccacagggtttggagaatagaaatgaaaagccacgtcatataactcaagaataaatggtgttttggaaattttaaaattatcatcgaaggtggtgaaactatttcaggcccaaatgaaaggaaatcgccagttggggatgaaatcacagagcctgtgttttatgatatggttggatgtccactgatgaaattttaaaggagtttcatttttaaaagtgcgcatgattctacatatgagaattctttaggccaagaaactgtccttggctcagaggtgttgggaattaaagcagagagaagccattcgtgatgcttagaaccaaggatggtcatgtacacaaagaccatcgagacggccattcttgtttacaaaacacttaccaagaaagcactttgtaggggaactttagtaagttcttctcatttcattatgtttcttccaaggaaacaggagagactgaattaataattctctctttcctcttaagcacttttaaaataataaagtacatcttgaaatttggggaggcatctctgatttaaaaaaagaaaaaggctgcttgatgtatgttatgcagagacactctgcctctggtggctgcagagcaatacccaagcctcatttggaaggctcaacatttggaattgcactttaattgattaatcctcaattcatgtggccttacgggatggtgggtctgggaccccaattcattcttatctgccaaagaattatctagaagcacatcaaataccagcaccccacctgcacaatgggggtggaaaacttttgtatccctaagcatattattttatagtgtctgccatgccatgtggaaatactttatttttaacctcaggatttaaataaagtaaacactatgacatttaaaaaaaaaac

SEQ ID NO: 307666 - DNA, 7094 bp, Homo sapiens
  misc_feature (3660)..(3660): n is a, c, g, or t
tacagagggatcataaccaaagggctcagtgatcggcgaaaagacccgttgaggagatgcccaactggaacagctggtcaaggagcttcagctgaaagaggatgcccgggccagcctggagcgcctggtgaaggagatggccccactccaggaggagttgtctgggaagggacaggaggcagaccagctctggcgacggctgcaggagttgctggcccacacgagctcctgggaggaggagctagcagagttgaggcgggagaaaaaacagcaacaggaggagaaggagctgctggagcaggaggtcaggtctctgacccggcagctgcagttcctggagacccagctggcacaggtgagccaacatgtgagtgacctggaggagcagaagaagcagctcattcaggacaaagaccacctcagccagcaggtgggtatgctcgagcggcttgctgggccgcctggcccagaactgccagtggcaggtgagaagaatgaggccctggtccctgtgaactccagtctgcaagaggcctgggggaagccagaggaggagcagaggggcctgcaggaggcacagttagacgataccaaggtgcaagagggcagccaggaggaagagctccggcaggccaacagggagctggagaaggagctacagaatgtggtcgggcgtaaccagctcctggagggcaagctgcaagccctgcaggccgattaccaggctttgcagcagcgggaatcagccatccagggctccttggcctccctggaggccgagcaggccagcatccggcacttgggtgaccagatggaggcgagcttgctggctgtaaggaaggccaaggaggccatgaaagcccagatggcagagaaggaggccattctacagagcaaggagggcgagtgtcagcagctgcgggaggaggtggagcagtgccagcaactggcagaagcccggcacagagagcttagggctctcgagagccagtgccagcagcagacccagctgattgaggtcctcacagcagagaaaggccaacagggagttggcccacccactgacaatgaagcccgtgagctggctgcccagctagccctgtctcaggcgcagctggaagtccatcagggggaggtccaacggctgcaggctcaggtggtggacctccaggccaagatgcgggcagccctggatgaccaggacaaggtgcagagccagctaagcatggctgaggccgtcctgagggagcacaaaacccttgtgcagcagctgaaggagcagaatgaagcccttaacagagcccatgtccaggagctgctgcaatgctcggagcgtgaaggggcactgcaggaggagagggccgatgaggcccagcagagggaggaggagctgcgggccctgcaggaggagctgtcccaggccaaatgcagctccgaggaagcacagctggagcacgctgagctgcaagagcagctgcaccgggccaacacagacacagctgagctgggcatccaggtttgcgcactgaccgtggaaaaggagcgagtggaggaggcactggcctgtgctgtccaggagctccaggacgccaaagaggcagcctcaagggagcgagagggcctggagcgccaagtagctgggctgcagcaagagaaggagagcttgcaggagaagctgaaggcggccaaggcagcagccggctcactgcctggcctgcaggcccagctcgcccaggcagagcagcgggcccagagcctccaagaggctgcacaccaggagctcaacaccctcaagttccagctgagtgctgaaatcatggactaccagagcagacttaagaatgctggtgaagagtgcaagagcctcaggggccagcttgaggagcaaggccggcagctgcaggctgctgaggaagctgtggagaagctgaaggccacccaagcagacatgggagagaagctgagctgcactagcaaccatcttgcagagtgccaggcggccatgctgaggaaggacaaggagggggctgccctgcgtgaagacctagaaaggacccagaaggaactcgaaaaagccacaacaaaaatccaagagtattacaacaaactctgccaggaggtgacaaatcgtgagaggaatgaccagaagatgcttgctgacctggatgacctcaacagaaccaagaagtatctcgaggagcggctgatagagctgctcagggacaaggatgctctctggcagaagtcagatgccctggaattccagcagaagctcagtgctgaggagagatggctcggagacacagaggcaaaccactgcctcgactgtaagcgggagttcagctggatggtgcggcggcaccactgcaggatatgtggccgcatcttctgttactactgctgcaacaactacgtcctgagcaagcacggtggcaaaaaggagcgctgctgccgagcctgtttccagaagctcagtgaaggccctggctcccctgatagcagtggctcaggcactagccagggagagcccagccctgcactgtcaccagcctcacctgggccccaggccacaggaggccaaggagcaaatacagactacaggccaccggacgacgctgtgtttgatatcatcacagatgaggaattgtgccagatacaggagtccggctcctctttgcctgaaacacccactgaaactgattctcttgacccaaatgcggctgaacaggatactacatcaacctcgctaacgcctgaggacactgaagacatgcccgtggggcaggattcggaaatctgcctgctgaagtctggagaactgatgatcaaagtacccctcacagtggatgagatcgccagcttcggggagggtagcagggagctgtttgtgaggtccagcacctacagcctgatccccatcactgtggccgaggcaggcctcaccatcagctgggtcttctcctctgaccccaagagcatctccttcagtgtggtcttccaggaggccgaggacacaccgctggatcagtgtaaggtcctcattcccacgacccgatgcaactcccacaaggagaacatccagggccagctcaaggttcgcacacccggcatctacatgctcatcttcgacaataccttctcaaggtttgtctctaaaaaggtattttatcacttgacggttgatcggcctgtgatctacgatggaagtgatttcctgtagcttcagcacctcagtaacttcacttcatccacaggaaacactgctcttcctcacctgtcacataaagcatttttttaaaaagtcagctgctccaaaatcatcaactcagcccctgggctgcccctcagaggcggtgtctggggaggactttgtgctcagcactctgcaccggccactcttagcccccgaggcgttgaagggctcaggcaatgtttccattaagtagagactcagctgttgtcacacccaaagggatgctctgccaaaggtttaaacacccaggagaccatcagcctctcctgggagcacagttgactacaggcctcttgtggagagtttcacgggcaggggtgattccaacttctgcctgtggagagattttctgccctgccccaccagggccctgcatgttggagactgagctgggtgcactggccatnccctgtgaatcctcgggctgtgacgccctcaggtactcctgggaaaaggaggtacacagccatcatgcgagtcggtgccaggggaccccccggagatcctgaccagctcctccagtcatgctcttgtccctcactgccccagtaagctggaggctgctccagaactcagcagtgttggaggggcctctaagctgcactctctttctggcccttttgtctggctgattctgtcctcaaataaagcccttcactcagccagacctctccacagctcaaagcattgccctaagaatcagaagtaaagataatccaagagcaaaacccactgtacttggggcctgcaatggctgtgtgtacactacatctaatgcccaaatgccagccagtgtggatgttgtgaccacagagcaggattgtgcattggctttagagctactcctcagctgatggcccacttttgtttatataaataagagcttctgccccacctgcagacatgtttactaatgatcatagccaggattagaaccactttcaaacattggggccttcttaacaaaagtctttgataacttaagaaccaaagtaacagagtaaacagaggcatgatggatccctgggccccactcccctcctgacaggttccccaacagcccatttgcccacttcccactgctcagcccacaccagacctccaggagacatccccccttgaggcagagagatcctgttccctattcccagacaagaattatttaatcttccctgttctctgtggtccttttcttccccaacaacagatagctcaccttggacagctcttcgtcccttgttcatggaaccagctgcctgcagtcaggccccaggttcttccatgggtgaacagagcatctgacaaaaggtcccagtttggccaggggtgagggagagagcaccagacaggctatccgagaatctgagagctgggcccggcaattcctccagctacccttgtgacctaagtccagtcacacatttcccaaagtttctctttgtcataaccctggtctggctggttttgagggcttgagaatgggtcagggactccaggccaagtccaacagagaccccaaacccaccacacaccagcagccacaacctcaccaccaacaaagaggacttttgtggggccacaagtaagaggtcatttctggaatggactcagacctttaaacaggagagttgagcacttccagtcagtttttaagcaaggcatggggaacagggaatagaacctttcaaagaggttgcccagagaaaagctgggcctcttgcattcggcttccttggagcagcctcttctggcagaaagccatcaggtgctcaatcatcttctcctggccaaggctctgaccatgcttagtactggaatagaggtggccaggcccccagcgactcttcttggcctgatgtttgtcctcacaggcatgccacgtggcctgagatgattcagaacaaatcatgctaactttgaatccatccagccacttgcaaatgataatcagaagtcagcttgttcactgttagaaagaaactaacaaaagagaacccagagcaatctagaatctttgagtgcttggctttccaaggatactgcggagactctggccaagctgatgaccttctgaagtgtcactggcaccatatgcaacaagaaccaccattcactgagtagctaatgggtttggggcctgggacattccatctgaggtccttcctgaacatgtcactccacagcagaggaccggttgcagcttacccagaaccactcctccaggagagctggatgttttgcgtgcaacaccttgagcactgactgctattgttcaaaaaaagcctttgctgcattcggaggactgccccgtgccctgaggtgacttcctaactatgtggtttcattagcgaatttatttttgtgctgggtggacatttgtattttgttaggttgctgtttaagctcaagtttgctgtgctctctgcagctacaaaacatcttggcatatttaagagtggcttttataaatagctttattctgatattaatcagattcccaactttactgagaattaaggactggggtactttaaagaaatgcaaatagcaattgaagaaccactgctgcaggtggtagccctggctagactgaattacactagaaatcagccagaaggaagcgtccttgggatcccagatcactcttttttttttttttttttaaaaggggcagccccttgatggctcatctctctgaataacagttacgtcttcatatcgataccagatgccttcttcatcatgccactgaagccactcaccaccttcaagaacatgccaacctctgtcagattcacttacccacaaacaaggaggcacgtttggcacaaagtgttgtcctccaggtccaagtggactctacagagtgcttgacctcaacacactggattccaggtggactggaccaagagcaggcaaagacacgggaactgaaaaactccacagggtttggagaatagaaatgaaaagccacgtcatataactcaagaataaatggtgttttggaaattttaaaattatcatcgaaggtggtgaaactatttcaggcccaaatgaaaggaaatcgccagttggggatgaaatcacagagcctgtgttttatgatatggttggatgtccactgatgaaattttaaaggagtttcatttttaaaagtgcgcatgattctacatatgagaattctttaggccaagaaactgtccttggctcagaggtgttgggaattaaagcagagagaagccattcgtgatgcttagaaccaaggatggtcatgtacacaaagaccatcgagacggccattcttgtttacaaaacacttaccaagaaagcactttgtaggggaactttagtaagttcttctcatttcattatgtttcttccaaggaaacaggagagactgaattaataattctctctttcctcttaagcacttttaaaataataaagtacatcttgaaatttggggaggcatctctgatttaaaaaaagaaaaaggctgcttgatgtatgttatgcagagacactctgcctctggtggctgcagagcaatacccaagcctcatttggaaggctcaacatttggaattgcactttaattgattaatcctcaattcatgtggccttacgggatggtgggtctgggaccccaattcattcttatctgccaaagaattatctagaagcacatcaaataccagcaccccacctgcacaatgggggtggaaaacttttgtatccctaagcatattattttatagtgtctgccatgccatgtggaaatactttatttttaacctcaggatttaaataaagtaaacactatgacatttaaaaaaaaaac

SEQ ID NO: 307667 - DNA, 6608 bp, Homo sapiens
  misc_feature (3174)..(3174): n is a, c, g, or t
ccggttcagagtgctccagctgtgcttcctcggagctgcatttggcctgggacagctccttctccagctccctgtgggcctgcaggaggcacagttagacgataccaaggtgcaagagggcagccaggaggaagagctccggcaggccaacagggagctggagaaggagctacagaatgtggtcgggcgtaaccagctcctggagggcaagctgcaagccctgcaggccgattaccaggctttgcagcagcgggaatcagccatccagggctccttggcctccctggaggccgagcaggccagcatccggcacttgggtgaccagatggaggcgagcttgctggctgtaaggaaggccaaggaggccatgaaagcccagatggcagagaaggaggccattctacagagcaaggagggcgagtgtcagcagctgcgggaggaggtggagcagtgccagcaactggcagaagcccggcacagagagcttagggctctcgagagccagtgccagcagcagacccagctgattgaggtcctcacagcagagaaaggccaacagggagttggcccacccactgacaatgaagcccgtgagctggctgcccagctagccctgtctcaggcgcagctggaagtccatcagggggaggtccaacggctgcaggctcaggtggtggacctccaggccaagatgcgggcagccctggatgaccaggacaaggtgcagagccagctaagcatggctgaggccgtcctgagggagcacaaaacccttgtgcagcagctgaaggagcagaatgaagcccttaacagagcccatgtccaggagctgctgcaatgctcggagcgtgaaggggcactgcaggaggagagggccgatgaggcccagcagagggaggaggagctgcgggccctgcaggaggagctgtcccaggccaaatgcagctccgaggaagcacagctggagcacgctgagctgcaagagcagctgcaccgggccaacacagacacagctgagctgggcatccaggtttgcgcactgaccgtggaaaaggagcgagtggaggaggcactggcctgtgctgtccaggagctccaggacgccaaagaggcagcctcaagggagcgagagggcctggagcgccaagtagctgggctgcagcaagagaaggagagcttgcaggagaagctgaaggcggccaaggcagcagccggctcactgcctggcctgcaggcccagctcgcccaggcagagcagcgggcccagagcctccaagaggctgcacaccaggagctcaacaccctcaagttccagctgagtgctgaaatcatggactaccagagcagacttaagaatgctggtgaagagtgcaagagcctcaggggccagcttgaggagcaaggccggcagctgcaggctgctgaggaagctgtggagaagctgaaggccacccaagcagacatgggagagaagctgagctgcactagcaaccatcttgcagagtgccaggcggccatgctgaggaaggacaaggagggggctgccctgcgtgaagacctagaaaggacccagaaggaactcgaaaaagccacaacaaaaatccaagagtattacaacaaactctgccaggaggtgacaaatcgtgagaggaatgaccagaagatgcttgctgacctggatgacctcaacagaaccaagaagtatctcgaggagcggctgatagagctgctcagggacaaggatgctctctggcagaagtcagatgccctggaattccagcagaagctcagtgctgaggagagatggctcggagacacagaggcaaaccactgcctcgactgtaagcgggagttcagctggatggtgcggcggcaccactgcaggatatgtggccgcatcttctgttactactgctgcaacaactacgtcctgagcaagcacggtggcaaaaaggagcgctgctgccgagcctgtttccagaagctcagtgaaggccctggctcccctgatagcagtggctcaggcactagccagggagagcccagccctgcactgtcaccagcctcacctgggccccaggccacaggaggccaaggagcaaatacagactacaggccaccggacgacgctgtgtttgatatcatcacagatgaggaattgtgccagatacaggagtccggctcctctttgcctgaaacacccactgaaactgattctcttgacccaaatgcggctgaacaggatactacatcaacctcgctaacgcctgaggacactgaagacatgcccgtggggcaggattcggaaatctgcctgctgaagtctggagaactgatgatcaaagtacccctcacagtggatgagatcgccagcttcggggagggtagcagggagctgtttgtgaggtccagcacctacagcctgatccccatcactgtggccgaggcaggcctcaccatcagctgggtcttctcctctgaccccaagagcatctccttcagtgtggtcttccaggaggccgaggacacaccgctggatcagtgtaaggtcctcattcccacgacccgatgcaactcccacaaggagaacatccagggccagctcaaggttcgcacacccggcatctacatgctcatcttcgacaataccttctcaaggtttgtctctaaaaaggtattttatcacttgacggttgatcggcctgtgatctacgatggaagtgatttcctgtagcttcagcacctcagtaacttcacttcatccacaggaaacactgctcttcctcacctgtcacataaagcatttttttaaaaagtcagctgctccaaaatcatcaactcagcccctgggctgcccctcagaggcggtgtctggggaggactttgtgctcagcactctgcaccggccactcttagcccccgaggcgttgaagggctcaggcaatgtttccattaagtagagactcagctgttgtcacacccaaagggatgctctgccaaaggtttaaacacccaggagaccatcagcctctcctgggagcacagttgactacaggcctcttgtggagagtttcacgggcaggggtgattccaacttctgcctgtggagagattttctgccctgccccaccagggccctgcatgttggagactgagctgggtgcactggccatnccctgtgaatcctcgggctgtgacgccctcaggtactcctgggaaaaggaggtacacagccatcatgcgagtcggtgccaggggaccccccggagatcctgaccagctcctccagtcatgctcttgtccctcactgccccagtaagctggaggctgctccagaactcagcagtgttggaggggcctctaagctgcactctctttctggcccttttgtctggctgattctgtcctcaaataaagcccttcactcagccagacctctccacagctcaaagcattgccctaagaatcagaagtaaagataatccaagagcaaaacccactgtacttggggcctgcaatggctgtgtgtacactacatctaatgcccaaatgccagccagtgtggatgttgtgaccacagagcaggattgtgcattggctttagagctactcctcagctgatggcccacttttgtttatataaataagagcttctgccccacctgcagacatgtttactaatgatcatagccaggattagaaccactttcaaacattggggccttcttaacaaaagtctttgataacttaagaaccaaagtaacagagtaaacagaggcatgatggatccctgggccccactcccctcctgacaggttccccaacagcccatttgcccacttcccactgctcagcccacaccagacctccaggagacatccccccttgaggcagagagatcctgttccctattcccagacaagaattatttaatcttccctgttctctgtggtccttttcttccccaacaacagatagctcaccttggacagctcttcgtcccttgttcatggaaccagctgcctgcagtcaggccccaggttcttccatgggtgaacagagcatctgacaaaaggtcccagtttggccaggggtgagggagagagcaccagacaggctatccgagaatctgagagctgggcccggcaattcctccagctacccttgtgacctaagtccagtcacacatttcccaaagtttctctttgtcataaccctggtctggctggttttgagggcttgagaatgggtcagggactccaggccaagtccaacagagaccccaaacccaccacacaccagcagccacaacctcaccaccaacaaagaggacttttgtggggccacaagtaagaggtcatttctggaatggactcagacctttaaacaggagagttgagcacttccagtcagtttttaagcaaggcatggggaacagggaatagaacctttcaaagaggttgcccagagaaaagctgggcctcttgcattcggcttccttggagcagcctcttctggcagaaagccatcaggtgctcaatcatcttctcctggccaaggctctgaccatgcttagtactggaatagaggtggccaggcccccagcgactcttcttggcctgatgtttgtcctcacaggcatgccacgtggcctgagatgattcagaacaaatcatgctaactttgaatccatccagccacttgcaaatgataatcagaagtcagcttgttcactgttagaaagaaactaacaaaagagaacccagagcaatctagaatctttgagtgcttggctttccaaggatactgcggagactctggccaagctgatgaccttctgaagtgtcactggcaccatatgcaacaagaaccaccattcactgagtagctaatgggtttggggcctgggacattccatctgaggtccttcctgaacatgtcactccacagcagaggaccggttgcagcttacccagaaccactcctccaggagagctggatgttttgcgtgcaacaccttgagcactgactgctattgttcaaaaaaagcctttgctgcattcggaggactgccccgtgccctgaggtgacttcctaactatgtggtttcattagcgaatttatttttgtgctgggtggacatttgtattttgttaggttgctgtttaagctcaagtttgctgtgctctctgcagctacaaaacatcttggcatatttaagagtggcttttataaatagctttattctgatattaatcagattcccaactttactgagaattaaggactggggtactttaaagaaatgcaaatagcaattgaagaaccactgctgcaggtggtagccctggctagactgaattacactagaaatcagccagaaggaagcgtccttgggatcccagatcactcttttttttttttttttttaaaaggggcagccccttgatggctcatctctctgaataacagttacgtcttcatatcgataccagatgccttcttcatcatgccactgaagccactcaccaccttcaagaacatgccaacctctgtcagattcacttacccacaaacaaggaggcacgtttggcacaaagtgttgtcctccaggtccaagtggactctacagagtgcttgacctcaacacactggattccaggtggactggaccaagagcaggcaaagacacgggaactgaaaaactccacagggtttggagaatagaaatgaaaagccacgtcatataactcaagaataaatggtgttttggaaattttaaaattatcatcgaaggtggtgaaactatttcaggcccaaatgaaaggaaatcgccagttggggatgaaatcacagagcctgtgttttatgatatggttggatgtccactgatgaaattttaaaggagtttcatttttaaaagtgcgcatgattctacatatgagaattctttaggccaagaaactgtccttggctcagaggtgttgggaattaaagcagagagaagccattcgtgatgcttagaaccaaggatggtcatgtacacaaagaccatcgagacggccattcttgtttacaaaacacttaccaagaaagcactttgtaggggaactttagtaagttcttctcatttcattatgtttcttccaaggaaacaggagagactgaattaataattctctctttcctcttaagcacttttaaaataataaagtacatcttgaaatttggggaggcatctctgatttaaaaaaagaaaaaggctgcttgatgtatgttatgcagagacactctgcctctggtggctgcagagcaatacccaagcctcatttggaaggctcaacatttggaattgcactttaattgattaatcctcaattcatgtggccttacgggatggtgggtctgggaccccaattcattcttatctgccaaagaattatctagaagcacatcaaataccagcaccccacctgcacaatgggggtggaaaacttttgtatccctaagcatattattttatagtgtctgccatgccatgtggaaatactttatttttaacctcaggatttaaataaagtaaacactatgacatttaaaaaaaaaac

SEQ ID NO: 307668 - DNA, 2477 bp, Homo sapiens
cgtcatggccgtcagcaccgcgttcccgtcctcttccgcttggccccagaaagtttcggttctgcccggcggtggacccacgagcgcgtgccaccatggagtctgaccactgctgagcagacagccaccgagggccgaaattctgagccttcctctggacccaggcaggagacatacagacaagaaaggcaaactcaccatggcctccaccaatgcagagagccagctccagagaatcatccgagacttgcaagatgctgtgacagaactaagcaaagaatttcaggaagcaggggaacccatcacggatgacagcaccagcttgcataaattttcttataaacttgagtatctcctgcaatttgatcagaaagagaaggccaccctcctgggcaacaagaaggactactgggattacttctgtgcctgcctggccaaggtgaaaggagccaatgatgggatccgatttgtcaagtctatctcagagctccgaacatccttggggaaaggaagagcatttattcgctactccttggtgcaccagaggttggcagacaccttacagcagtgcttcatgaacaccaaagtgaccagtgactggtactatgcaagaagcccctttctgcagccaaagctgagctcggacattgtgggccaactctatgagctgactgaggttcagtttgacctggcgtcgaggggctttgacttggatgctgcctggccaacatttgccaggaggacgctgaccactggctcttctgcttacctgtggaaaccccctagccgcagctccagcatgagcagcttggtgagcagctacctgcagactcaagagatggtgtccaactttgacctgaacagccccctaaacaacgaggcattggagggctttgatgagatgcgactagagctggaccagttggaggtgcgggagaagcagctacaggagcgcatgcagcagctggacagagagaaccaggagctgagggcagctgtcagccagcaaggggagcaactgcagacagagagggagagggggcgcactgcagcggaggacaacgttcgcctcacttgcttggtagctgagctccagaagcagtgggaggtcacccaggccacccagaacactgtgaaggagctgcagacatgcctgcaggccctggagctaggagcagcagagaaggaggaggactaccacacagccctgcggcggctggagtccatgctgcagcccttggcacaggagcttgaggccacacgggactcactggacaagaaaaaccagcatttagccagcttcccaggctggctagccatgctcatctctctgaataacagttacgtcttcatatcgataccagatgccttcttcatcatgccactgaagccactcaccaccttcaagaacatgccaacctctgtcagattcacttacccacaaacaaggaggcacgtttggcacaaagtgttgtcctccaggtccaagtggactctacagagtgcttgacctcaacacactggattccaggtggactggaccaagagcaggcaaagacacgggaactgaaaaactccacagggtttggagaatagaaatgaaaagccacgtcatataactcaagaataaatggtgttttggaaattttaaaattatcatcgaaggtggtgaaactatttcaggcccaaatgaaaggaaatcgccagttggggatgaaatcacagagcctgtgttttatgatatggttggatgtccactgatgaaattttaaaggagtttcatttttaaaagtgcgcatgattctacatatgagaattctttaggccaagaaactgtccttggctcagaggtgttgggaattaaagcagagagaagccattcgtgatgcttagaaccaaggatggtcatgtacacaaagaccatcgagacggccattcttgtttacaaaacacttaccaagaaagcactttgtaggggaactttagtaagttcttctcatttcattatgtttcttccaaggaaacaggagagactgaattaataattctctctttcctcttaagcacttttaaaataataaagtacatcttgaaatttggggaggcatctctgatttaaaaaaagaaaaaggctgcttgatgtatgttatgcagagacactctgcctctggtggctgcagagcaatacccaagcctcatttggaaggctcaacatttggaattgcactttaattgattaatcctcaattcatgtggccttacgggatggtgggtctgggaccccaattcattcttatctgccaaagaattatctagaagcacatcaaataccagcaccccacctgcacaatgggggtggaaaacttttgtatccctaagcatattattttatagtgtctgccatgccatgtggaaatactttatttttaacctcaggatttaaataaagtaaacactatgacatttaaaaaaaaaac

SEQ ID NO: 307669 - DNA, 6540 bp, Homo sapiens
  misc_feature (5076)..(5076): n is a, c, g, or t
cgtcatggccgtcagcaccgcgttcccgtcctcttccgcttggccccagaaagtttcggttctgcccggcggtggacccacgagcgcgtgccaccatggagtctgaccactgctgagcagacagccaccgagggccgaaattctgagccttcctctggacccaggcaggagacatacagacaagaaaggcaaactcaccatggcctccaccaatgcagagagccagctccagagaatcatccgagacttgcaagatgctgtgacagaactaagcaaagaatttcaggaagcaggggaacccatcacggatgacagcaccagcttgcataaattttcttataaacttgagtatctcctgcaatttgatcagaaagagaaggccaccctcctgggcaacaagaaggactactgggattacttctgtgcctgcctggccaaggtgaaaggagccaatgatgggatccgatttgtcaagtctatctcagagctccgaacatccttggggaaaggaagagcatttattcgctactccttggtgcaccagaggttggcagacaccttacagcagtgcttcatgaacaccaaagtgaccagtgactggtactatgcaagaagcccctttctgcagccaaagctgagctcggacattgtgggccaactctatgagctgactgaggttcagtttgacctggcgtcgaggggctttgacttggatgctgcctggccaacatttgccaggaggacgctgaccactggctcttctgcttacctgtggaaaccccctagccgcagctccagcatgagcagcttggtgagcagctacctgcagactcaagagatggtgtccaactttgacctgaacagccccctaaacaacgaggcattggagggctttgatgagatgcgactagagctggaccagttggaggtgcgggagaagcagctacaggagcgcatgcagcagctggacagagagaaccaggagctgagggcagctgtcagccagcaaggggagcaactgcagacagagagggagagggggcgcactgcagcggaggacaacgttcgcctcacttgcttggtagctgagctccagaagcagtgggaggtcacccaggccacccagaacactgtgaaggagctgcagacatgcctgcaggccctggagctaggagcagcagagaaggaggaggactaccacacagccctgcggcggctggagtccatgctgcagcccttggcacaggagcttgaggccacacgggactcactggacaagaaaaaccagcatttagccagcttcccaggctggctagccatggctcagcagaaggcagatacggcatcagacacaaagggccggcaagaacctattcccagtgatgcggcccaggagatgcaggagctaggggagaagcttcaagccctagaaagggagagaaccaaggtcgaggaggtcaacagacagcagagtgcccaactggaacagctggtcaaggagcttcagctgaaagaggatgcccgggccagcctggagcgcctggtgaaggagatggccccactccaggaggagttgtctgggaagggacaggaggcagaccagctctggcgacggctgcaggagttgctggcccacacgagctcctgggaggaggagctagcagagttgaggcgggagaaaaaacagcaacaggaggagaaggagctgctggagcaggaggtcaggtctctgacccggcagctgcagttcctggagacccagctggcacaggtgagccaacatgtgagtgacctggaggagcagaagaagcagctcattcaggacaaagaccacctcagccagcaggtgggtatgctcgagcggcttgctgggccgcctggcccagaactgccagtggcaggtgagaagaatgaggccctggtccctgtgaactccagtctgcaagaggcctgggggaagccagaggaggagcagaggggcctgcaggaggcacagttagacgataccaaggtgcaagagggcagccaggaggaagagctccggcaggccaacagggagctggagaaggagctacagaatgtggtcgggcgtaaccagctcctggagggcaagctgcaagccctgcaggccgattaccaggctttgcagcagcgggaatcagccatccagggctccttggcctccctggaggccgagcaggccagcatccggcacttgggtgaccagatggaggcgagcttgctggctgtaaggaaggccaaggaggccatgaaagcccagatggcagagaaggaggccattctacagagcaaggagggcgagtgtcagcagctgcgggaggaggtggagcagtgccagcaactggcagaagcccggcacagagagcttagggctctcgagagccagtgccagcagcagacccagctgattgaggtcctcacagcagagaaaggccaacagggagttggcccacccactgacaatgaagcccgtgagctggctgcccagctagccctgtctcaggcgcagctggaagtccatcagggggaggtccaacggctgcaggctcaggtggtggacctccaggccaagatgcgggcagccctggatgaccaggacaaggtgcagagccagctaagcatggctgaggccgtcctgagggagcacaaaacccttgtgcagcagctgaaggagcagaatgaagcccttaacagagcccatgtccaggagctgctgcaatgctcggagcgtgaaggggcactgcaggaggagagggccgatgaggcccagcagagggaggaggagctgcgggccctgcaggaggagctgtcccaggccaaatgcagctccgaggaagcacagctggagcacgctgagctgcaagagcagctgcaccgggccaacacagacacagctgagctgggcatccaggtttgcgcactgaccgtggaaaaggagcgagtggaggaggcactggcctgtgctgtccaggagctccaggacgccaaagaggcagcctcaagggagcgagagggcctggagcgccaagtagctgggctgcagcaagagaaggagagcttgcaggagaagctgaaggcggccaaggcagcagccggctcactgcctggcctgcaggcccagctcgcccaggcagagcagcgggcccagagcctccaagaggctgcacaccaggagctcaacaccctcaagttccagctgagtgctgaaatcatggactaccagagcagacttaagaatgctggtgaagagtgcaagagcctcaggggccagcttgaggagcaaggccggcagctgcaggctgctgaggaagctgtggagaagctgaaggccacccaagcagacatgggagagaagctgagctgcactagcaaccatcttgcagagtgccaggcggccatgctgaggaaggacaaggagggggctgccctgcgtgaagacctagaaaggacccagaaggaactcgaaaaagccacaacaaaaatccaagagtattacaacaaactctgccaggaggtgacaaatcgtgagaggaatgaccagaagatgcttgctgacctggatgacctcaacagaaccaagaagtatctcgaggagcggctgatagagctgctcagggacaaggatgctctctggcagaagtcagatgccctggaattccagcagaagctcagtgctgaggagagatggctcggagacacagaggcaaaccactgcctcgactgtaagcgggagttcagctggatggtgcggcggcaccactgcaggatatgtggccgcatcttctgttactactgctgcaacaactacgtcctgagcaagcacggtggcaaaaaggagcgctgctgccgagcctgtttccagaagctcagtgaaggccctggctcccctgatagcagtggctcaggcactagccagggagagcccagccctgcactgtcaccagcctcacctgggccccaggccacaggaggccaaggagcaaatacagactacaggccaccggacgacgctgtgtttgatatcatcacagatgaggaattgtgccagatacaggagtccggctcctctttgcctgaaacacccactgaaactgattctcttgacccaaatgcggctgaacaggatactacatcaacctcgctaacgcctgaggacactgaagacatgcccgtggggcaggattcggaaatctgcctgctgaagtctggagaactgatgatcaaagtacccctcacagtggatgagatcgccagcttcggggagggtagcagggagctgtttgtgaggtccagcacctacagcctgatccccatcactgtggccgaggcaggcctcaccatcagctgggtcttctcctctgaccccaagagcatctccttcagtgtggtcttccaggaggccgaggacacaccgctggatcagtgtaaggtcctcattcccacgacccgatgcaactcccacaaggagaacatccagggccagctcaaggttcgcacacccggcatctacatgctcatcttcgacaataccttctcaaggtttgtctctaaaaaggtattttatcacttgacggttgatcggcctgtgatctacgatggaagtgatttcctgtagcttcagcacctcagtaacttcacttcatccacaggaaacactgctcttcctcacctgtcacataaagcatttttttaaaaagtcagctgctccaaaatcatcaactcagcccctgggctgcccctcagaggcggtgtctggggaggactttgtgctcagcactctgcaccggccactcttagcccccgaggcgttgaagggctcaggcaatgtttccattaagtagagactcagctgttgtcacacccaaagggatgctctgccaaaggtttaaacacccaggagaccatcagcctctcctgggagcacagttgactacaggcctcttgtggagagtttcacgggcaggggtgattccaacttctgcctgtggagagattttctgccctgccccaccagggccctgcatgttggagactgagctgggtgcactggccatnccctgtgaatcctcgggctgtgacgccctcaggtactcctgggaaaaggaggtacacagccatcatgcgagtcggtgccaggggaccccccggagatcctgaccagctcctccagtcatgctcttgtccctcactgccccagtaagctggaggctgctccagaactcagcagtgttggaggggcctctaagctgcactctctttctggcccttttgtctggctgattctgtcctcaaataaagcccttcactcagccagacctctccacagctcaaagcattgccctaagaatcagaagtaaagataatccaagagcaaaacccactgtacttggggcctgcaatggctgtgtgtacactacatctaatgcccaaatgccagccagtgtggatgttgtgaccacagagcaggattgtgcattggctttagagctactcctcagctgatggcccacttttgtttatataaataagagcttctgccccacctgcagacatgtttactaatgatcatagccaggattagaaccactttcaaacattggggccttcttaacaaaagtctttgataacttaagaaccaaagtaacagagtaaacagaggcatgatggatccctgggccccactcccctcctgacaggttccccaacagcccatttgcccacttcccactgctcagcccacaccagacctccaggagacatccccccttgaggcagagagatcctgttccctattcccagacaagaattatttaatcttccctgttctctgtggtccttttcttccccaacaacagatagctcaccttggacagctcttcgtcccttgttcatggaaccagctgcctgcagtcaggccccaggttcttccatgggtgaacagagcatctgacaaaaggtcccagtttggccaggggtgagggagagagcaccagacaggctatccgagaatctgagagctgggcccggcaattcctccagctacccttgtgacctaagtccagtcacacatttcccaaagtttctctttgtcataaccctggtctggctggttttgagggcttgagaatgggtcagggactccaggccaagtccaacagagaccccaaacccaccacacaccagcagccacaacctcaccaccaacaaagaggacttttgtggggccacaagtaagaggtcatttctggaatgaacatttggaattgcactttaattgattaatcctcaattcatgtggccttacgggatggtgggtctgggaccccaattcattcttatctgccaaagaattatctagaagcacatcaaataccagcaccccacctgcacaatgggggtggaaaacttttgtatccctaagcatattattttatagtgtctgccatgccatgtggaaatactttatttttaacctcaggatttaaataaagtaaacactatgacatttaaaaaaaaaac

SEQ ID NO: 307670 - DNA, 1679 bp, Homo sapiens
  misc_feature (1362)..(1362): n is a, c, g, or t
cgtcatggccgtcagcaccgcgttcccgtcctcttccgcttggccccagaaagtttcggttctgcccggcggtggacccacgagcgcgtgccaccatggagtctgaccactgctgagcagacagccaccgagggccgaaattctgagccttcctctggacccaggcaggagacatacagacaagaaaggcaaactcaccatggcctccaccaatgcagagagccagctccagagaatcatccgagacttgcaagatgctgtgacagaactaagcaaagaatttcaggaagcaggggaacccatcacggatgacagcaccagcttgcataaattttcttataaacttgagtatctcctgcaatttgatcagaaagagaaggccaccctcctgggcaacaagaaggactactgggattacttctgtgcctgcctggccaaggtgaaaggagccaatgatgggatccgatttgtcaagtctatctcagagctccgaacatccttggggaaaggaagagcatttattcgctactccttggtgcaccagaggttggcagacaccttacagcagtgcttcatgaacaccaaagtgaccagtgactggtactatgcaagaagcccctttctgcagccaaagctgagctcggacattgtgggccaactctatgagctgactgaggttcagtttgacctggcgtcgaggggctttgacttggatgctgcctggccaacatttgccaggaggacgctgaccactggctcttctgcttacctgtggaaaccccctagccgcagctccagcatgagcagcttggtgagcagctacctgcagactcaagagatggtgtccaactttgacctgaacagccccctaaacaacgaggcattggagggctttgatgagatgcgactagagctggaccagttggaggtgcgggagaagcagctacaggagcgcatgcagcagctggacagagagaaccaggagctgagggcagctgtcagccagcaaggggagcaactgcagacagagagggagagggggcgcactgcagcggaggacaacgttcgcctcacttgcttggtagctgagctccagaagcagtgggaggtcacccaggccacccagaacactgtgaaggagctgcagacatgcctgcaggccctggagctaggagcagcagagaaggaggaggactaccacacagccctgcggcggctggagtccatgctgcagcccttggcacaggagcttgaggccacacgggactcactggacaagaaaaaccagcatttagccagcttcccaggctggctagccatgggccctgcatgttggagactgagctgggtgcactggccatnccctgtgaatcctcgggctgtgacgccctcaggtactcctgggaaaaggaggtacacagccatcatgcgagtcggtgccaggggaccccccggagatcctgaccagctcctccagtcatgctcttgtccctcactgccccagtaagctggaggctgctccagaactcagcagtgttggaggggcctctaagctgcactctctttctggcccttttgtctggctgattctgtcctcaaataaagcccttcactcagccagacctctccacagctcaaagcattgccctaagaatcagaagtaaagataatccaagagc

SEQ ID NO: 307671 - DNA, 382 bp, Homo sapiens
ttcaaaaaagaagttttctttctcctacaattcccctttcttggcaaataattgatgtttaaggtttcccatatcctttttgagaagtagatatgatatatataataaatgaataagcatccagatcattgcagtaatttctttgaagaagagcaagcttatttgagagttatgttcttctaccatgaaaatgaaattggtttgtgtgcctgtgtcttttaatttagtaacctgagttggaattcgatgaggcagagccacagtgggaggactgagtaaattcatactttatctttattactcttataattgacatgtttttctgcagtgactggtactatgcaagaagcccctttctgcagccaaagctgagctcggacat

SEQ ID NO: 307672 - DNA, 4418 bp, Homo sapiens
agcaaactcgtcttgtctacccaccctccctcccccatcctccccaaaatagccttgtgatttcggaagtatggactaaaatcacactcctccttaccttaccgcttggactctggtggctcccaactcgccgtcagaccccacctgccccggtggtgggaagcgcctggacagaccatgaccacagccaaggagccaagcgcttcggggaaatccgtgcagcagcaggaacaggagctggtggggagtaaccctccgcagaggaattggaaaggaatagcaattgcactgcttgtcattctggtcatctgctccttgatcgtcacctcggtcatacttctgacaccagcggaagataatagtctgtctcaaaagaagaaggtcactgtagaagatctcttcagtgaagacttcaaaattcatgaccccgaggctaagtggataagtgatacagaattcatctacagagaacagaaaggaacagtgagactgtggaatgttgaaacaaatacttctactgtcttaatagaaggcaaaaaaattgaatcattaagagccatcagatatgaaatatctccagatagagagtatgcacttttttcatacaatgtggaacccatatatcaacactcgtatactggatattatgtcctgagcaaaattcctcatggggatcctcaaagtctggacccaccagaagtcagcaatgcaaagcttcagtatgcaggatggggccctaaaggccaacagctgatatttatttttgaaaacaatatctactactgtgcacatgtcgggaaacaggccatccgtgtggtctccactggcaaggaaggtgtgatttacaatggcctcagtgactggctgtatgaagaggagattttgaagacacacatcgcacactggtggtctccggatggcacgagactcgcctacgccgccatcaatgattcccgtgtccccatcatggagctcccaacttacaccggctccatctaccccaccgtgaagccctaccactatcccaaggctggaagtgagaaccccagcatttccctacacgttattggcttaaatggacccacccatgatctggagatgatgccgcctgatgatccacggatgagggagtactacatcaccatggtgaagtgggccaccagcaccaaggtcgccgtgacctggctgaaccgggcgcagaacgtgtccatcctcaccctctgcgacgccaccacgggggtctgcacgaagaaacacgaggatgaaagtgaggcctggctccacagacagaatgaagaacctgtgttctccaaggatggccgaaagtttttcttcatcagagccatcccccagggaggacgagggaaattctatcacatcacggtgtcctcgtcccagcccaacagcagcaacgacaacatccagtccatcacctccggggactgggacgtgaccaagatcctagcctacgatgagaaggggaataagatctacttcctgagcacggaggacctgcctcggagacgacaactctacagtgccaacacggtgggcaacttcaacaggcagtgcctctcctgtgacctggttgagaactgcacctacttcagcgcttccttcagccatagcatggacttcttcctgctcaagtgcgaaggtcctggtgttcctatggtgacggtgcacaacacaacagataagaaaaaaatgtttgacctagaaacaaatgaacatgtcaagaaggccataaatgaccgacagatgcctaaagtggaatacagggacattgagattgatgattacaacctgcccatgcagatactgaagccagcaaccttcaccgacaccacccactaccctctgctcctggtggtggatggcaccccgggcagccagagtgtagctgagaagttcgaggtgagctgggagacggtgatggtgagcagccacggcgcggtggtggtaaagtgtgacggccgtggcagcggcttccaagggaccaagctcctgcacgaagtgaggcggcggctgggcttgctggaggagaaggaccagatggaggccgtgcggacgatgctgaaggagcagtacattgacaggacgcgcgtggccgtgttcgggaaggattacggtggctacctgagcacctacatcctcccagcaaagggagaaaatcaaggccagacattcacctgcggctctgctctctctccaataacagacttcaaactctatgcctctgcgttttccgagaggtacttgggcctccatggacttgacaacagagcatacgagatgaccaaggtagcccatcgagtctccgcgctggaagaacagcagttcctgatcattcatcccactgccgatgaaaaaattcatttccagcacacagcagaactcattacacaactaattaggggaaaggctaattacagcttacagatttacccggacgaaagccattactttaccagctccagcctcaaacagcatctgtaccggtccatcatcaacttcttcgtggaatgcttcaggatccaggacaaactgccgacagtcacagcgaaagaggacgaggaggaggactaagctcaggtcgctctaagcacaaacgtggctctttctacaaccagatgcaaccgagggatttccctgccctccctcttccctcggaggggcggggcggggcggggccgggtgtaccatagcatgtgtgtctcggatgcggaaggcagttttgcttgggaaacaagctccttccccggggtcatcactcacggcctccatggcaccagggacaacgctgtccccgcagcagcgcctcctcccggcgcccgagagaccggcacgccacggcccctcccccaaggaacagagcaaaggatggtggccgcaggccccacgcgagcccacaggacaccggcccctagattccagccaccaagcggaagcatgagacccgcccacactagcctctgtgttcccgttagggacatcacaccctgtctcacgtcgcagtgccatggacgcagcagttacagcaccattgttttagcagtgcgtgttcatatatgggcttgctacttcctgtaatgaggacgttcaacatggtgaggggctacaagaaaacgcttttctgtacagagtcttactgtagctacgctaatggttaacctgatagaattaactcgtatttttctatggttttaacctgatgctccactgtctccgtcatggggttgttttgctgtttggggttgggccttgtttccctttcctttctccagtccacgtgtagactttgcgcttgtttggatgaagaagcagatcggaagtaactgctccctcctcaaggttgtcttcagacgtcttggagacgttcctaaacactgagggggaagacagccaatagcacccattaaaagaaatacctaaataaaacctctctcccactcagctatgctagggcttggctgtaggtgtgcactgtctatttacatccgtccttacaaccatccttgtcctccttggtaccgtatcaagctctttcccatgacatttggttaaaaaaaaaaaaaaaaaaaaaaaaaaaaacagaaaaaagacaaagcgtcaactccacccacaggcccgctgtgtgtgctcgggccacgggagtcctgagggttctgtgggcctgcgcgcatccctctcccatcgtgggggtggctccgtgaccttcctgccacgagcaggaggttgatgatgtgctacgttagccttgtaagatacacccccaccaaatgtgcagccggtgttcccagtgtatatttcattctcttgtatataaaggaagcaatgtgtgtcaggcctctgtgcagtcaacccagcctcctcccgccagtgctaaccccgtgttgagcctgcatgctgacactgtggccgatctggactctagaagtgctagtttgaaatatatccattactgtcatttccttttgagcttgtggacaagctgaatgtcaggactgacttctccagctcccagccctgcgggggtgtccttggcatcccatcagcagaggagatgcgtccctgttgcattttggcgtttggggctttgggtttatccacatgagctctgaacgtccgttatagttagggtgattggaaggtctccatcactgggtgttttaaaggtgattcaccaccatttgtgaaaggaccaacgtgctgataaacaggaccgatccgagtgctacatgactgtgcgtttgctatttcaatgggcctgaacgactacaaagccagctaggtctggaaggggaagccagctctggccacgacatctggtcggagggaagtggggatgtggcatggtagcgtctgttcatccatggaataaaacattattttaccaaaaacggattgttcctttc

SEQ ID NO: 307673 - DNA, 4432 bp, Homo sapiens
agcaaactcgtcttgtctacccaccctccctcccccatcctccccaaaatagccttgtgatttcggaagtatggactaaaatcacactcctccttaccttaccgcttggactctggtggctcccaactcgccgtcagaccccacctgccccggtggtgggaagcgcctggacagaccatgaccacagccaaggagccaagcgcttcggggaaatccgtgcagcagcaggaacaggagctggtggggagtaaccctccgcagaggaattggaaaggaatagcaattgcactgcttgtcattctggtcatctgctccttgatcgtcacctcggtcatacttctgacaccagcggaagataatagtctgtctcaaaagaagaaggtcactgtagaagatctcttcagtgaagacttcaaaattcatgaccccgaggctaagtggataagtgatacagaattcatctacagagaacagaaaggaacagtgagactgtggaatgttgaaacaaatacttctactgtcttaatagaaggcaaaaaaattgaatcattaagagccatcagatatgaaatatctccagatagagagtatgcacttttttcatacaatgtggaacccatatatcaacactcgtatactggatattatgtcctgagcaaaattcctcatggggatcctcaaagtctggacccaccagaagtcagcaatgcaaagcttcagtatgcaggatggggccctaaaggccaacagctgatatttatttttgaaaacaatatctactactgtgcacatgtcgggaaacaggccatccgtgtggtctccactggcaaggaaggtgtgatttacaatggcctcagtgactggctgtatgaagaggagattttgaagacacacatcgcacactggtggtctccggatggcacgagactcgcctacgccgccatcaatgattcccgtgtccccatcatggagctcccaacttacaccggctccatctaccccaccgtgaagccctaccactatcccaaggctggaagtgagaaccccagcatttccctacacgttattggcttaaatggacccacccatgatctggagatgatgccgcctgatgatccacggatgagggagtactacatcaccatggtgaagtgggccaccagcaccaaggtcgccgtgacctggctgaaccgggcgcagaacgtgtccatcctcaccctctgcgacgccaccacgggggtctgcacgaagaaacacgaggatgaaagtgaggcctggctccacagacagaatgaagaacctgtgttctccaaggatggccgaaagtttttcttcatcagagccatcccccagggaggacgagggaaattctatcacatcacggtgtcctcgtcccagcccaacagcagcaacgacaacatccagtccatcacctccggggactgggacgtgaccaagatcctagcctacgatgagaaggggaataagatctacttcctgagcacggaggacctgcctcggagacgacaactctacagtgccaacacggtgggcaacttcaacaggcagtgcctctcctgtgacctggttgagaactgcacctacttcagcgcttccttcagccatagcatggacttcttcctgctcaagtgcgaaggtcctggtgttcctatggtgacggtgcacaacacaacagataagaaaaaaatgtttgacctagaaacaaatgaacatgtcaagaaggccataaatgaccgacagatgcctaaagtggaatacagggacattgagattgatgattacaacctgcccatgcagatactgaagccagcaaccttcaccgacaccacccactaccctctgctcctggtggtggatggcaccccgggcagccagagtgtagctgagaagttcgaggtgagctgggagacggtgatggtgagcagccacggcgcggtggtggtaaagtgtgacggccgtggcagcggcttccaagggaccaagctcctgcacgaagtgaggcggcggctgggcttgctggaggagaaggaccagatggaggccgtgcggacgatgctgaaggagcagtacattgacaggacgcgcgtggccgtgttcgggaaggattacggtggctacctgagcacctacatcctcccagcaaagggagaaaatcaaggccagacattcacctgcggctctgctctctctccaataacagacttcaaactctatgcctctgcgttttccgagaggtacttgggcctccatggacttgacaacagagcatacgagatgaccaaggtagcccatcgagtctccgcgctggaagaacagcagttcctgatcattcatcccactgccgatgaaaaaattcatttccagcacacagcagaactcattacacaactaattaggggaaaggctaattacagcttacagatttacccggacgaaagccattactttaccagctccagcctcaaacagcatctgtaccggtccatcatcaacttcttcgtggaatgcttcaggatccaggacaaactgccgacagtcacagcgaaagaggacgaggaggaggactaagctcaggtcgctctaagcacaaacgtggctctttctacaaccagatgcaaccgagggatttccctgccctccctcttccctcggaggggcggggcggggcggggccgggtgtaccatagcatgtgtgtctcggatgcggaaggcagttttgcttgggaaacaagctccttccccggggtcatcactcacggcctccatggcaccagggacaacgctgtccccgcagcagcgcctcctcccggcgcccgagagaccggcacgccacggcccctcccccaaggaacagagcaaaggatggtggccgcaggccccacgcgagcccacaggacaccggcccctagattccagccaccaagcggaagcatgagacccgcccacactagcctctgtgttcccgttagggacatcacaccctgtctcacgtcgcagtgccatggacgcagcagttacagcaccattgttttagcagtgcgtgttcatatatgggcttgctacttcctgtaatgaggacgttcaacatggtgaggggctacaagaaaacgcttttctgtacagagtcttactgtagctacgctaatggttaacctgatagaattaactcgtatttttctatggttttaacctgatgctccactgtctccgtcatggggttgttttgctgtttggggttgggccttgtttccctttcctttctccagtccacgtgtagactttgcgcttgtttggatgaagaagcagatcggaagtaactgctccctcctcaaggttgtcttcagacgtcttggagacgttcctaaacactgagggggaagacagccaatagcacccattaaaagaaatacctaaataaaacctctctcccactcagctatgctagggcttggctgtaggtgtgcactgtctatttacatccgtccttacaaccatccttgtcctccttggtaccgtatcaagctctttcccatgacatttggttaaaaaaaaaaaaaaaaaaaaaaaaaaaaacagaaaaaagacaaagcgtcaactccacccacaggcccgctgtgtgtgctcgggccacgggagtcctgagggttctgtgggcctgcgcgcatccctctcccatcgtgggggtggctccgtgaccttcctgccacgagcaggaggttgatgatgtgctacgttagccttgtaagatacacccccaccaaatgtgcagccggtgttcccagtgtatatttcattctcttgtatataaaggaagcaatgtgtgtcaggcctctgtgcagtcaacccagcctcctcccgccagtgctaaccccgtgttgagcctgcatgctgacactgtggccgatctggactctagaagtgctagtttgaaatatatccattactgtcatttccttttgagcttgtggacaagctgaatgtcaggactgacttctccagctcccagccctgcgggggtgtccttggcatcccatcagcagaggagatgcgtccctgttgcattttggcgtttggggctttgggtttatccacatgagctctgaacgtccgttatagttagggtgattggaaggtctccatcactgggtgttttaaaggtgattcaccaccatttgtgaaaggaccaacgtgctgataaacaggaccgatccgagtgctacatgactgtgcgtttgctatttcaatgggcctgaacgactacaaagccagctaggtctgatgggagcaagatgcgccatcttctcccatcagtctgcctgctctgcaagcctcattatccccattttgttaagtagctgggcctggagtccccacacaggttaagaaccacccaggggggaatgttatgttg

SEQ ID NO: 307674 - DNA, 4570 bp, Homo sapiens
gacgctgggcttgcttgctgctgctgctgctgcctccccaccgcctttttttttttaatctggagcggggtggggagtgggaaccggagagaaagcaaaatattaaaaagccccaaagacagccagcaggagcgcggtgcccgatggcttcgctgtaccagaggttcactggcaagatcaacacctcgaggtccttccccgcgcccccggaggcgagtcacctcctgggcggccaggggcccgaggaggacggcggcgcaggagccaagcccctcggcccgcgggcgcaggcggcggcgccccgggagcgcggcggcggcggcggcggcgcgggtggccggccccggttccagtaccaggcgcggagcgatggtgacgaggaggacgagctggtggggagtaaccctccgcagaggaattggaaaggaatagcaattgcactgcttgtcattctggtcatctgctccttgatcgtcacctcggtcatacttctgacaccagcggaagataatagtctgtctcaaaagaagaaggtcactgtagaagatctcttcagtgaagacttcaaaattcatgaccccgaggctaagtggataagtgatacagaattcatctacagagaacagaaaggaacagtgagactgtggaatgttgaaacaaatacttctactgtcttaatagaaggcaaaaaaattgaatcattaagagccatcagatatgaaatatctccagatagagagtatgcacttttttcatacaatgtggaacccatatatcaacactcgtatactggatattatgtcctgagcaaaattcctcatggggatcctcaaagtctggacccaccagaagtcagcaatgcaaagcttcagtatgcaggatggggccctaaaggccaacagctgatatttatttttgaaaacaatatctactactgtgcacatgtcgggaaacaggccatccgtgtggtctccactggcaaggaaggtgtgatttacaatggcctcagtgactggctgtatgaagaggagattttgaagacacacatcgcacactggtggtctccggatggcacgagactcgcctacgccgccatcaatgattcccgtgtccccatcatggagctcccaacttacaccggctccatctaccccaccgtgaagccctaccactatcccaaggctggaagtgagaaccccagcatttccctacacgttattggcttaaatggacccacccatgatctggagatgatgccgcctgatgatccacggatgagggagtactacatcaccatggtgaagtgggccaccagcaccaaggtcgccgtgacctggctgaaccgggcgcagaacgtgtccatcctcaccctctgcgacgccaccacgggggtctgcacgaagaaacacgaggatgaaagtgaggcctggctccacagacagaatgaagaacctgtgttctccaaggatggccgaaagtttttcttcatcagagccatcccccagggaggacgagggaaattctatcacatcacggtgtcctcgtcccagcccaacagcagcaacgacaacatccagtccatcacctccggggactgggacgtgaccaagatcctagcctacgatgagaaggggaataagatctacttcctgagcacggaggacctgcctcggagacgacaactctacagtgccaacacggtgggcaacttcaacaggcagtgcctctcctgtgacctggttgagaactgcacctacttcagcgcttccttcagccatagcatggacttcttcctgctcaagtgcgaaggtcctggtgttcctatggtgacggtgcacaacacaacagataagaaaaaaatgtttgacctagaaacaaatgaacatgtcaagaaggccataaatgaccgacagatgcctaaagtggaatacagggacattgagattgatgattacaacctgcccatgcagatactgaagccagcaaccttcaccgacaccacccactaccctctgctcctggtggtggatggcaccccgggcagccagagtgtagctgagaagttcgaggtgagctgggagacggtgatggtgagcagccacggcgcggtggtggtaaagtgtgacggccgtggcagcggcttccaagggaccaagctcctgcacgaagtgaggcggcggctgggcttgctggaggagaaggaccagatggaggccgtgcggacgatgctgaaggagcagtacattgacaggacgcgcgtggccgtgttcgggaaggattacggtggctacctgagcacctacatcctcccagcaaagggagaaaatcaaggccagacattcacctgcggctctgctctctctccaataacagacttcaaactctatgcctctgcgttttccgagaggtacttgggcctccatggacttgacaacagagcatacgagatgaccaaggtagcccatcgagtctccgcgctggaagaacagcagttcctgatcattcatcccactgccgatgaaaaaattcatttccagcacacagcagaactcattacacaactaattaggggaaaggctaattacagcttacagatttacccggacgaaagccattactttaccagctccagcctcaaacagcatctgtaccggtccatcatcaacttcttcgtggaatgcttcaggatccaggacaaactgccgacagtcacagcgaaagaggacgaggaggaggactaagctcaggtcgctctaagcacaaacgtggctctttctacaaccagatgcaaccgagggatttccctgccctccctcttccctcggaggggcggggcggggcggggccgggtgtaccatagcatgtgtgtctcggatgcggaaggcagttttgcttgggaaacaagctccttccccggggtcatcactcacggcctccatggcaccagggacaacgctgtccccgcagcagcgcctcctcccggcgcccgagagaccggcacgccacggcccctcccccaaggaacagagcaaaggatggtggccgcaggccccacgcgagcccacaggacaccggcccctagattccagccaccaagcggaagcatgagacccgcccacactagcctctgtgttcccgttagggacatcacaccctgtctcacgtcgcagtgccatggacgcagcagttacagcaccattgttttagcagtgcgtgttcatatatgggcttgctacttcctgtaatgaggacgttcaacatggtgaggggctacaagaaaacgcttttctgtacagagtcttactgtagctacgctaatggttaacctgatagaattaactcgtatttttctatggttttaacctgatgctccactgtctccgtcatggggttgttttgctgtttggggttgggccttgtttccctttcctttctccagtccacgtgtagactttgcgcttgtttggatgaagaagcagatcggaagtaactgctccctcctcaaggttgtcttcagacgtcttggagacgttcctaaacactgagggggaagacagccaatagcacccattaaaagaaatacctaaataaaacctctctcccactcagctatgctagggcttggctgtaggtgtgcactgtctatttacatccgtccttacaaccatccttgtcctccttggtaccgtatcaagctctttcccatgacatttggttaaaaaaaaaaaaaaaaaaaaaaaaaaaaacagaaaaaagacaaagcgtcaactccacccacaggcccgctgtgtgtgctcgggccacgggagtcctgagggttctgtgggcctgcgcgcatccctctcccatcgtgggggtggctccgtgaccttcctgccacgagcaggaggttgatgatgtgctacgttagccttgtaagatacacccccaccaaatgtgcagccggtgttcccagtgtatatttcattctcttgtatataaaggaagcaatgtgtgtcaggcctctgtgcagtcaacccagcctcctcccgccagtgctaaccccgtgttgagcctgcatgctgacactgtggccgatctggactctagaagtgctagtttgaaatatatccattactgtcatttccttttgagcttgtggacaagctgaatgtcaggactgacttctccagctcccagccctgcgggggtgtccttggcatcccatcagcagaggagatgcgtccctgttgcattttggcgtttggggctttgggtttatccacatgagctctgaacgtccgttatagttagggtgattggaaggtctccatcactgggtgttttaaaggtgattcaccaccatttgtgaaaggaccaacgtgctgataaacaggaccgatccgagtgctacatgactgtgcgtttgctatttcaatgggcctgaacgactacaaagccagctaggtctggaaggggaagccagctctggccacgacatctggtcggagggaagtggggatgtggcatggtagcgtctgttcatccatggaataaaacattattttaccaaaaacggattgttcctttc

SEQ ID NO: 307675 - DNA, 4625 bp, Homo sapiens
agcgggcagtgtgctggcgccgagctcggtggacacgcgcgcagtcagagctgcctctcgccctcgctagctgggctcgcagcctcttcctccctccctggctcctggctttttgtttaaagcaacacccaccctccatccaggctttttttctttctttctttattggtagcggccaaaaagagttgattgctattgggatccgctgagtaaagacacgggcaggggtgcgcggaggtgagaaaactgaagacctggaagatttttttttccttcaaaaacccgtttccatccagtcttcagccagtccagtctactttaatcctcaccaggacaatggattaagtttctcttccctggaccagaagtcgggttcggacttggggcaaaatgaaggaaaaggccatgatcaagaccgctaagatgcaggggaacgtgatggagctggtggggagtaaccctccgcagaggaattggaaaggaatagcaattgcactgcttgtcattctggtcatctgctccttgatcgtcacctcggtcatacttctgacaccagcggaagataatagtctgtctcaaaagaagaaggtcactgtagaagatctcttcagtgaagacttcaaaattcatgaccccgaggctaagtggataagtgatacagaattcatctacagagaacagaaaggaacagtgagactgtggaatgttgaaacaaatacttctactgtcttaatagaaggcaaaaaaattgaatcattaagagccatcagatatgaaatatctccagatagagagtatgcacttttttcatacaatgtggaacccatatatcaacactcgtatactggatattatgtcctgagcaaaattcctcatggggatcctcaaagtctggacccaccagaagtcagcaatgcaaagcttcagtatgcaggatggggccctaaaggccaacagctgatatttatttttgaaaacaatatctactactgtgcacatgtcgggaaacaggccatccgtgtggtctccactggcaaggaaggtgtgatttacaatggcctcagtgactggctgtatgaagaggagattttgaagacacacatcgcacactggtggtctccggatggcacgagactcgcctacgccgccatcaatgattcccgtgtccccatcatggagctcccaacttacaccggctccatctaccccaccgtgaagccctaccactatcccaaggctggaagtgagaaccccagcatttccctacacgttattggcttaaatggacccacccatgatctggagatgatgccgcctgatgatccacggatgagggagtactacatcaccatggtgaagtgggccaccagcaccaaggtcgccgtgacctggctgaaccgggcgcagaacgtgtccatcctcaccctctgcgacgccaccacgggggtctgcacgaagaaacacgaggatgaaagtgaggcctggctccacagacagaatgaagaacctgtgttctccaaggatggccgaaagtttttcttcatcagagccatcccccagggaggacgagggaaattctatcacatcacggtgtcctcgtcccagcccaacagcagcaacgacaacatccagtccatcacctccggggactgggacgtgaccaagatcctagcctacgatgagaaggggaataagatctacttcctgagcacggaggacctgcctcggagacgacaactctacagtgccaacacggtgggcaacttcaacaggcagtgcctctcctgtgacctggttgagaactgcacctacttcagcgcttccttcagccatagcatggacttcttcctgctcaagtgcgaaggtcctggtgttcctatggtgacggtgcacaacacaacagataagaaaaaaatgtttgacctagaaacaaatgaacatgtcaagaaggccataaatgaccgacagatgcctaaagtggaatacagggacattgagattgatgattacaacctgcccatgcagatactgaagccagcaaccttcaccgacaccacccactaccctctgctcctggtggtggatggcaccccgggcagccagagtgtagctgagaagttcgaggtgagctgggagacggtgatggtgagcagccacggcgcggtggtggtaaagtgtgacggccgtggcagcggcttccaagggaccaagctcctgcacgaagtgaggcggcggctgggcttgctggaggagaaggaccagatggaggccgtgcggacgatgctgaaggagcagtacattgacaggacgcgcgtggccgtgttcgggaaggattacggtggctacctgagcacctacatcctcccagcaaagggagaaaatcaaggccagacattcacctgcggctctgctctctctccaataacagacttcaaactctatgcctctgcgttttccgagaggtacttgggcctccatggacttgacaacagagcatacgagatgaccaaggtagcccatcgagtctccgcgctggaagaacagcagttcctgatcattcatcccactgccgatgaaaaaattcatttccagcacacagcagaactcattacacaactaattaggggaaaggctaattacagcttacagatttacccggacgaaagccattactttaccagctccagcctcaaacagcatctgtaccggtccatcatcaacttcttcgtggaatgcttcaggatccaggacaaactgccgacagtcacagcgaaagaggacgaggaggaggactaagctcaggtcgctctaagcacaaacgtggctctttctacaaccagatgcaaccgagggatttccctgccctccctcttccctcggaggggcggggcggggcggggccgggtgtaccatagcatgtgtgtctcggatgcggaaggcagttttgcttgggaaacaagctccttccccggggtcatcactcacggcctccatggcaccagggacaacgctgtccccgcagcagcgcctcctcccggcgcccgagagaccggcacgccacggcccctcccccaaggaacagagcaaaggatggtggccgcaggccccacgcgagcccacaggacaccggcccctagattccagccaccaagcggaagcatgagacccgcccacactagcctctgtgttcccgttagggacatcacaccctgtctcacgtcgcagtgccatggacgcagcagttacagcaccattgttttagcagtgcgtgttcatatatgggcttgctacttcctgtaatgaggacgttcaacatggtgaggggctacaagaaaacgcttttctgtacagagtcttactgtagctacgctaatggttaacctgatagaattaactcgtatttttctatggttttaacctgatgctccactgtctccgtcatggggttgttttgctgtttggggttgggccttgtttccctttcctttctccagtccacgtgtagactttgcgcttgtttggatgaagaagcagatcggaagtaactgctccctcctcaaggttgtcttcagacgtcttggagacgttcctaaacactgagggggaagacagccaatagcacccattaaaagaaatacctaaataaaacctctctcccactcagctatgctagggcttggctgtaggtgtgcactgtctatttacatccgtccttacaaccatccttgtcctccttggtaccgtatcaagctctttcccatgacatttggttaaaaaaaaaaaaaaaaaaaaaaaaaaaaacagaaaaaagacaaagcgtcaactccacccacaggcccgctgtgtgtgctcgggccacgggagtcctgagggttctgtgggcctgcgcgcatccctctcccatcgtgggggtggctccgtgaccttcctgccacgagcaggaggttgatgatgtgctacgttagccttgtaagatacacccccaccaaatgtgcagccggtgttcccagtgtatatttcattctcttgtatataaaggaagcaatgtgtgtcaggcctctgtgcagtcaacccagcctcctcccgccagtgctaaccccgtgttgagcctgcatgctgacactgtggccgatctggactctagaagtgctagtttgaaatatatccattactgtcatttccttttgagcttgtggacaagctgaatgtcaggactgacttctccagctcccagccctgcgggggtgtccttggcatcccatcagcagaggagatgcgtccctgttgcattttggcgtttggggctttgggtttatccacatgagctctgaacgtccgttatagttagggtgattggaaggtctccatcactgggtgttttaaaggtgattcaccaccatttgtgaaaggaccaacgtgctgataaacaggaccgatccgagtgctacatgactgtgcgtttgctatttcaatgggcctgaacgactacaaagccagctaggtctggaaggggaagccagctctggccacgacatctggtcggagggaagtggggatgtggcatggtagcgtctgttcatccatggaataaaacattattttaccaaaaacggattgttcctttc

SEQ ID NO: 307676 - DNA, 1429 bp, Homo sapiens
cgcactgctaaaacaatggtgcgtgttcatatatgggcttgctacttcttgtagcccctcaccatgttgaacgtcctcattacaggaagtagcaagcccatatatgaagacgttcaacatggtgaggggctacaagaaaacgcttttctgtacagagtcttactgtagctacgctaatggttaacctgatagaattaactcgtatttttctatggttttaacctgatgctccactgtctccgtcatggggttgttttgctgtttggggttgggccttgtttccctttcctttctccagtccacgtgtagactttgcgcttgtttggatgaagaagcagatcggaagtaactgctccctcctcaaggttgtcttcagacgtcttggagacgttcctaaacactgagggggaagacagccaatagcacccattaaaagaaatacctaaataaaacctctctcccactcagctatgctagggcttggctgtaggtgtgcactgtctatttacatccgtccttacaaccatccttgtcctccttggtaccgtatcaagctctttcccatgacatttggttaaaaaaaaaaaaaaaaaaaaaaaaaaaaacagaaaaaagacaaagcgtcaactccacccacaggcccgctgtgtgtgctcgggccacgggagtcctgagggttctgtgggcctgcgcgcatccctctcccatcgtgggggtggctccgtgaccttcctgccacgagcaggaggttgatgatgtgctacgttagccttgtaagatacacccccaccaaatgtgcagccggtgttcccagtgtatatttcattctcttgtatataaaggaagcaatgtgtgtcaggcctctgtgcagtcaacccagcctcctcccgccagtgctaaccccgtgttgagcctgcatgctgacactgtggccgatctggactctagaagtgctagtttgaaatatatccattactgtcatttccttttgagcttgtggacaagctgaatgtcaggactgacttctccagctcccagccctgcgggggtgtccttggcatcccatcagcagaggagatgcgtccctgttgcattttggcgtttggggctttgggtttatccacatgagctctgaacgtccgttatagttagggtgattggaaggtctccatcactgggtgttttaaaggtgattcaccaccatttgtgaaaggaccaacgtgctgataaacaggaccgatccgagtgctacatgactgtgcgtttgctatttcaatgggcctgaacgactacaaagccagctaggtctggaaggggaagccagctctggccacgacatctggtcggagggaagtggggatgtggcatggtagcgtctgttcatccatggaataaaacattattttaccaaaaacggattgttcctttc

SEQ ID NO: 307677 - DNA, 324 bp, Homo sapiens
tcccaccactgacattcgggggtcggggaggctgcgggcctggggttggttgggaagcctcaaggaggatgttgcctcccaggagaggagcaggcagaaggggcagagagcccttcccacagagagaatggcagcccctgtcacctggtgtccaaaacagttggaggatgaagagccatgctggggccgggacaccggtgtctgctcctgatgccatgtctgtgtgtttcagcccaacagcagcaacgacaacatccagtccatcacctccggggactgggacgtgaccaagatcctagcctacgatgagaaggggaataagat

SEQ ID NO: 307678 - DNA, 402 bp, Homo sapiens
atgaaagcagcagttacgcacatgaaaagccatggcccgcagaggtcctccatgagtgaccactgcatctcagtgtgtccctgtttcctctctttcagaaatgtttgacctagaaacaaatgaacatgtcaagaaggccataaatgaccgacagatgcctaaagtggaatacagggacattgagattgatgattacagtaagtactacgtttttcccctctaaaagaaaaagaaaaagaaaacgtgggctgtgacacagtgcagtcatcagcagcaggtgccctgcaaggaagactccccaagcacgggggtgtatctttgcccctcagctcctctggcatggagtgtcttgtgttcagaaccaagatgctcactctggtgacaaaaccaaaaaaagcaggg

SEQ ID NO: 307679 - DNA, 306 bp, Homo sapiens
ctcccagtgtctttgggtttatttagcaagaggtaatgactgggcggcccctcagagtcccgcgccagtgcagattctttataagccagatttcagaagctcgcaggctggctgtgtcaccactggctccggcccccggctcccgtgtcgtgtccagggctggggtcggcggtcccctggcttctgtcgtgcgggggtcctgccaagctgctcatgctgtgtttggcgtttccagggagtactacatcaccatggtgaagtgggccaccagcaccaaggtcgccgtgacctggctgaaccgggcgc

SEQ ID NO: 307680 - DNA, 477 bp, Homo sapiens
cccactgagcatttgctgtgcctggagagggccaggcaccgggggcgtggtggtgtttgaaggctggttggcttcacgaatgggtggtgcatgtccacgctaggggaggcgcccctctgactgggacagccaggcagatctcccaggaggaagaggcacttccatcaggagtggcatggttagcaaacccacttcatcaactacaatccagccccggacggggcccaggtttcactaaactccacaccttctgtgcgttcccgtcccctggggagcgtatacctgggagagtaatttctccgtgccttccttgcagatttacccggacgaaagccattactttaccagctccagcctcaaacagcatctgtaccggtccatcatcaacttcttcgtggaatgcttcaggatccaggacaaactgccgacagtcacagcgaaagaggacgaggaggaggactaagctcaggtcgctct

SEQ ID NO: 307681 - DNA, 284 bp, Homo sapiens
cagaactagtgattttactttacataagcattcgtcaaaagttgaggagagttccttgatgtttcatgtggtttttttctacttcctctcttacagatacagaattcatctacagagaacagaaaggaacagtgagactgtggaatgttgaaacaaatacttctactgtcttaatagaaggcaaaaaaattgtaagtactctctttaatgaccgggataatttcagtttttcttcctgcaagtcaataaaacagaaaatgacttttggtttcaacttttagcat

SEQ ID NO: 307682 - DNA, 1052 bp, Homo sapiens
gtgggcggtcccaggcaggcccagaagctgggcagcctctgccgggttccgggaaaaggagctcctgctgccactgctcttccggagcctgcagcatggggcccctgccgcgcaccgtggagctcttctatgacgtgctgtccccctactcctggctgggcttcgagatcctgtgccggtatcagaatatctggaacatcaacctgcagttgcggcccagcctcataacagggatcatgaaagacagtggaaacaagcctccaggtctgcttccccgcaaaggactatacatggcaaatgacttaaagctcctgagacaccatctccagattcccatccacttccccaaggatttcttgtctgtgatgcttgaaaaaggaagtttgtctgccatgcgtttcctcaccgccgtgaacttggagcatccagagatgctggagaaagcgtcccgggagctgtggatgcgcgtctggtcaaggaatgaagacatcaccgagccgcagagcatcctggcggctgcagagaaggctggtatgtctgcagaacaagcccagggacttctggaaaagatcgcaacgccaaaggtgaagaaccagctcaaggagaccactgaggcagcctgcagatacggagcctttgggctgcccatcaccgtggcccatgtggatggccaaacccacatgttatttggctctgaccggatggagctgctggcgcacctgctgggagagaagtggatgggccctatacctccagccgtgaatgccagactttaagattgcccggaggaagcaaactcttcgtataaaaaaagcaggccatctgcttaacccttggctccaccataaggcactgggactcggatttctctatctgatagaggtattttctgtggccctgggagctgtctgtctttcccctacccccaaggatgccaggaagacgtccaccattagccatgtggcaacctttacttctatgcctcacaagtgcctttcagagagccccaattctgctttcccacaaaataaacctaatgccatcaggcaaaa

SEQ ID NO: 307683 - DNA, 790 bp, Homo sapiens
gtgggcggtcccaggcaggcccagaagctgggcagcctctgccgggttccgggaaaaggagctcctgctgccactgctcttccggagcctgcagcatggggcccctgccgcgcaccgtggagctcttctatgacgtgctgtccccctactcctggctgggcttcgagatcctgtgccggtatcagaatatctggaacatcaacctgcagttgcggcccagcctcataacagggatcatgaaagacagtggaaacaagcctccaggtctgcttccccgcaaaggactatacatggcaaatgacttaaagctcctgagacaccatctccagattcccatccacttccccaaggatttcttgtctgtgatgcttgaaaaaggaagtttgtctgccatgcgtttcctcaccgccgtgaacttggagcatccagagatgctggagaaagcgtcccgggagctgtggatgcgcgtctggtcaagggtgagtgtggggctctgggaatcctctgggaggaccttggatgactttctgaccttccccaggcacgttttcagggtcatgatcctgcccccgcccgggggatctactgtcctcccagtcacacccctctccccgcaccgccttcctgctgtcttctcttcttcccagaatgaagacatcaccgagccgcagagcatcctggcgtgagagaaaggtggttttctgcaaacaagcccagggcttttgaacgagcctttgggtgccctaacccggccacgggttggcaaccccaaatatttgttctgccggta

SEQ ID NO: 307684 - DNA, 501 bp, Homo sapiens
gttcaaggttgagtgggcaggggctgtcttcaaccccataaaagaaaaggaagccttctataccttgaagccaagcaaaagtctttctagaaaacccctgggaccttgtgggaccaactcctgctgccagaacacctgagaacagtgtgcagagtctgttgttttcttcatccaggagagaagtggatgggccctatacctccagccgtgaatgccagactttaagattgcccggaggaagcaaactcttcgtataaaaaaagcaggccatctgcttaacccttggctccaccataaggcactgggactcggatttctctatctgatagaggtattttctgtggccctgggagctgtctgtctttcccctacccccaaggatgccaggaagacgtccaccattagccatgtggcaacctttacttctatgcctcacaagtgcctttcagagagccccaattctgctttcccacaaaataaacctaatgccatcaggcaaaa

SEQ ID NO: 307685 - DNA, 153 bp, Homo sapiens
gcggccgcctactactactactactgctcgaattcaagcttctaacgatgtacggggccatgtggcaacctttacttctatgcctcacaagtgcctttcagagagccccaattctgctttcccacaaaataaacctaatgccatcaggcaaaa

SEQ ID NO: 307686 - DNA, 1069 bp, Homo sapiens
tgagtaggacacggcgaccgtgtattatacaggcaggttactgaactagtgggcgtggcgacaatctgagaaaaggagctcctgctgccactgctcttccggagcctgcagcatggggcccctgccgcgcaccgtggagctcttctatgacgtgctgtccccctactcctggctgggcttcgagatcctgtgccggtatcagaatatctggaacatcaacctgcagttgcggcccagcctcataacagggatcatgaaagacagtggaaacaagcctccaggtctgcttccccgcaaaggactatacatggcaaatgacttaaagctcctgagacaccatctccagattcccatccacttccccaaggatttcttgtctgtgatgcttgaaaaaggaagtttgtctgccatgcgtttcctcaccgccgtgaacttggagcatccagagatgctggagaaagcgtcccgggagctgtggatgcgcgtctggtcaaggaatgaagacatcaccgagccgcagagcatcctggcggctgcagagaaggctggtatgtctgcagaacaagcccagggacttctggaaaagatcgcaacgccaaaggtgaagaaccagctcaaggagaccactgaggcagcctgcagatacggagcctttgggctgcccatcaccgtggcccatgtggatggccaaacccacatgttatttggctctgaccggatggagctgctggcgcacctgctgggagagaagtggatgggccctatacctccagccgtgaatgccagactttaagattgcccggaggaagcaaactcttcgtataaaaaaagcaggccatctgcttaacccttggctccaccataaggcactgggactcggatttctctatctgatagaggtattttctgtggccctgggagctgtctgtctttcccctacccccaaggatgccaggaagacgtccaccattagccatgtggcaacctttacttctatgcctcacaagtgcctttcagagagccccaattctgctttcccacaaaataaacctaatgccatcaggcaaaa

SEQ ID NO: 307687 - DNA, 1456 bp, Homo sapiens
tgagtaggacacggcgaccgtgtattatacaggcaggttactgaactagtgggcgtggcgacaatctgagaaaaggagctcctgctgccactgctcttccggagcctgcagcatggggcccctgccgcgcaccgtggagctcttctatgacgtgctgtccccctactcctggctgggcttcgaggtgacgctgggaggggtcgcctcggcagtgtctggggagtgagggcggagggaagagtgagcgcagggctccgggacagaggtctcgtgtaactcctggcgccgcccaaggggttaaggcaagcagggagagctccggggctgaaggtcactttgtgcttttaaacggaatagagtcgctggctccaacccgagcctttatatcccgactgcagtttcccacggtggtggaaagaggggcggctccaaacattcagggagaaatgcagaacacggccacctcttagcccaacgatggcagttttggggaaaactggccacaggagcgaagatcctggaatagatttctagtagtgaggagagttttgccaatttcaaaccaaacaatatcctgtgccggtatcagaatatctggaacatcaacctgcagttgcggcccagcctcataacagggatcatgaaagacagtggaaacaagcctccaggtctgcttccccgcaaaggactatacatggcaaatgacttaaagctcctgagacaccatctccagattcccatccacttccccaaggatttcttgtctgtgatgcttgaaaaaggaagtttgtctgccatgcgtttcctcaccgccgtgaacttggagcatccagagatgctggagaaagcgtcccgggagctgtggatgcgcgtctggtcaaggaatgaagacatcaccgagccgcagagcatcctggcggctgcagagaaggctggtatgtctgcagaacaagcccagggacttctggaaaagatcgcaacgccaaaggtgaagaaccagctcaaggagaccactgaggcagcctgcagatacggagcctttgggctgcccatcaccgtggcccatgtggatggccaaacccacatgttatttggctctgaccggatggagctgctggcgcacctgctgggagagaagtggatgggccctatacctccagccgtgaatgccagactttaagattgcccggaggaagcaaactcttcgtataaaaaaagcaggccatctgcttaacccttggctccaccataaggcactgggactcggatttctctatctgatagaggtattttctgtggccctgggagctgtctgtctttcccctacccccaaggatgccaggaagacgtccaccattagccatgtggcaacctttacttctatgcctcacaagtgcctttcagagagccccaattctgctttcccacaaaataaacctaatgccatcaggcaaaa

SEQ ID NO: 307688 - DNA, 1020 bp, Homo sapiens
tgagtaggacacggcgaccgtgtattatacaggcaggttactgaactagtgggcgtggcgacaatctgagaaaaggagctcctgctgccactgctcttccggagcctgcagcatggggcccctgccgcgcaccgtatcctgtgccggtatcagaatatctggaacatcaacctgcagttgcggcccagcctcataacagggatcatgaaagacagtggaaacaagcctccaggtctgcttccccgcaaaggactatacatggcaaatgacttaaagctcctgagacaccatctccagattcccatccacttccccaaggatttcttgtctgtgatgcttgaaaaaggaagtttgtctgccatgcgtttcctcaccgccgtgaacttggagcatccagagatgctggagaaagcgtcccgggagctgtggatgcgcgtctggtcaaggaatgaagacatcaccgagccgcagagcatcctggcggctgcagagaaggctggtatgtctgcagaacaagcccagggacttctggaaaagatcgcaacgccaaaggtgaagaaccagctcaaggagaccactgaggcagcctgcagatacggagcctttgggctgcccatcaccgtggcccatgtggatggccaaacccacatgttatttggctctgaccggatggagctgctggcgcacctgctgggagagaagtggatgggccctatacctccagccgtgaatgccagactttaagattgcccggaggaagcaaactcttcgtataaaaaaagcaggccatctgcttaacccttggctccaccataaggcactgggactcggatttctctatctgatagaggtattttctgtggccctgggagctgtctgtctttcccctacccccaaggatgccaggaagacgtccaccattagccatgtggcaacctttacttctatgcctcacaagtgcctttcagagagccccaattctgctttcccacaaaataaacctaatgccatcaggcaaaa

SEQ ID NO: 307689 - DNA, 1187 bp, Homo sapiens
tgagtaggacacggcgaccgtgtattatacaggcaggttactgaactagtgggcgtggcgacaatctgagaaaaggagctcctgctgccactgctcttccggagcctgcagcatggggcccctgccgcgcaccgtggagctcttctatgacgtgctgtccccctactcctggctgggcttcgaggtgacgctgggaggggtcgcctcggcagtgtctggggagtgagggcggagggaagagtgagcgcagggctccgggacagaggtctcgtgtaactcctggcgccgcccaaggggttaagatcctgtgccggtatcagaatatctggaacatcaacctgcagttgcggcccagcctcataacagggatcatgaaagacagtggaaacaagcctccaggtctgcttccccgcaaaggactatacatggcaaatgacttaaagctcctgagacaccatctccagattcccatccacttccccaaggatttcttgtctgtgatgcttgaaaaaggaagtttgtctgccatgcgtttcctcaccgccgtgaacttggagcatccagagatgctggagaaagcgtcccgggagctgtggatgcgcgtctggtcaaggaatgaagacatcaccgagccgcagagcatcctggcggctgcagagaaggctggtatgtctgcagaacaagcccagggacttctggaaaagatcgcaacgccaaaggtgaagaaccagctcaaggagaccactgaggcagcctgcagatacggagcctttgggctgcccatcaccgtggcccatgtggatggccaaacccacatgttatttggctctgaccggatggagctgctggcgcacctgctgggagagaagtggatgggccctatacctccagccgtgaatgccagactttaagattgcccggaggaagcaaactcttcgtataaaaaaagcaggccatctgcttaacccttggctccaccataaggcactgggactcggatttctctatctgatagaggtattttctgtggccctgggagctgtctgtctttcccctacccccaaggatgccaggaagacgtccaccattagccatgtggcaacctttacttctatgcctcacaagtgcctttcagagagccccaattctgctttcccacaaaataaacctaatgccatcaggcaaaa

SEQ ID NO: 307690 - DNA, 953 bp, Homo sapiens
cgcaccattgcactccagcctgggcaacaagagcgaaacaacaagagaaaaaaaaggaagctgccctctgcccaaaacccacgtcgaggtccccaaacctgggacccttaggtcttttctcacttagcgtgcccaaccttctcctggcaggaaacaagcctccaggtctgcttccccgcaaaggactatacatggcaaatgacttaaagctcctgagacaccatctccagattcccatccacttccccaaggatttcttgtctgtgatgcttgaaaaaggaagtttgtctgccatgcgtttcctcaccgccgtgaacttggagcatccagagatgctggagaaagcgtcccgggagctgtggatgcgcgtctggtcaaggaatgaagacatcaccgagccgcagagcatcctggcggctgcagagaaggctggtatgtctgcagaacaagcccagggacttctggaaaagatcgcaacgccaaaggtgaagaaccagctcaaggagaccactgaggcagcctgcagatacggagcctttgggctgcccatcaccgtggcccatgtggatggccaaacccacatgttatttggctctgaccggatggagctgctggcgcacctgctgggagagaagtggatgggccctatacctccagccgtgaatgccagactttaagattgcccggaggaagcaaactcttcgtataaaaaaagcaggccatctgcttaacccttggctccaccataaggcactgggactcggatttctctatctgatagaggtattttctgtggccctgggagctgtctgtctttcccctacccccaaggatgccaggaagacgtccaccattagccatgtggcaacctttacttctatgcctcacaagtgcctttcagagagccccaattctgctttcccacaaaataaacctaatgccatcaggcaaaa

SEQ ID NO: 307691 - DNA, 825 bp, Homo sapiens
agggcgatgaggactaggatgatggcgggcaggatagtccaaaggcaggacaagggactatacatggcaaatgacttaaagctcctgagacaccatctccagattcccatccacttccccaaggatttcttgtctgtgatgcttgaaaaaggaagtttgtctgccatgcgtttcctcaccgccgtgaacttggagcatccagagatgctggagaaagcgtcccgggagctgtggatgcgcgtctggtcaaggaatgaagacatcaccgagccgcagagcatcctggcggctgcagagaaggctggtatgtctgcagaacaagcccagggacttctggaaaagatcgcaacgccaaaggtgaagaaccagctcaaggagaccactgaggcagcctgcagatacggagcctttgggctgcccatcaccgtggcccatgtggatggccaaacccacatgttatttggctctgaccggatggagctgctggcgcacctgctgggagagaagtggatgggccctatacctccagccgtgaatgccagactttaagattgcccggaggaagcaaactcttcgtataaaaaaagcaggccatctgcttaacccttggctccaccataaggcactgggactcggatttctctatctgatagaggtattttctgtggccctgggagctgtctgtctttcccctacccccaaggatgccaggaagacgtccaccattagccatgtggcaacctttacttctatgcctcacaagtgcctttcagagagccccaattctgctttcccacaaaataaacctaatgccatcaggcaaaa

SEQ ID NO: 307692 - DNA, 1220 bp, Homo sapiens
gtgggcggtcccaggcaggcccagaagctgggcagcctctgccgggttccgggaaaaggagctcctgctgccactgctcttccggagcctgcagcatggggcccctgccgcgcaccgtggagctcttctatgacgtgctgtccccctactcctggctgggcttcgagatcctgtgccggtatcagaatatctggaacatcaacctgcagttgcggcccagcctcataacagggatcatgaaagacagtggaaacaagcctccaggtctgcttccccgcaaaggactatacatggcaaatgacttaaagctcctgagacaccatctccagattcccatccacttccccaaggatttcttgtctgtgatgcttgaaaaaggaagtttgtctgccatgcgtttcctcaccgccgtgaacttggagcatccagagatgctggagaaagcgtcccgggagctgtggatgcgcgtctggtcaagggtgagtgtggggctctgggaatcctctgggaggaccttggatgactttctgaccttccccaggcacgttttcagggtcatgatcctgcccccgcccgggggatctactgtcctcccagtcacacccctctccccgcaccgccttcctgctgtcttctcttcttcccagaatgaagacatcaccgagccgcagagcatcctggcggctgcagagaaggctggtatgtctgcagaacaagcccagggacttctggaaaagatcgcaacgccaaaggtgaagaaccagctcaaggagaccactgaggcagcctgcagatacggagcctttgggctgcccatcaccgtggcccatgtggatggccaaacccacatgttatttggctctgaccggatggagctgctggcgcacctgctgggagagaagtggatgggccctatacctccagccgtgaatgccagactttaagattgcccggaggaagcaaactcttcgtataaaaaaagcaggccatctgcttaacccttggctccaccataaggcactgggactcggatttctctatctgatagaggtattttctgtggccctgggagctgtctgtctttcccctacccccaaggatgccaggaagacgtccaccattagccatgtggcaacctttacttctatgcctcacaagtgcctttcagagagccccaattctgctttcccacaaaataaacctaatgccatcaggcaaaa

SEQ ID NO: 307693 - DNA, 1127 bp, Homo sapiens
gtgggcggtcccaggcaggcccagaagctgggcagcctctgccgggttccgggaaaaggagctcctgctgccactgctcttccggagcctgcagcatggggcccctgccgcgcaccgtggagctcttctatgacgtgctgtccccctactcctggctgggcttcgagatcctgtgccggtatcagaatatctggaacatcaacctgcagttgcggcccagcctcataacagggatcatgaaagacagtggaaacaagcctccaggtctgcttccccgcaaaggactatacatggcaaatgacttaaagctcctgagacaccatctccagattcccatccacttccccaaggatttcttgtctgtgatgcttgaaaaaggaagtttgtctgccatgcgtttcctcaccgccgtgaacttggagcatccagagatgctggagaaagcgtcccgggagctgtggatgcgcgtctggtcaaggaatgaagacatcaccgagccgcagagcatcctggcggctgcagagaaggctggtatgtctgcagaacaagcccagggacttctggaaaagatcgcaacgccaaaggtgaagaaccagctcaaggagaccactgaggcagcctgcagatacggagcctttgggctgcccatcaccgtggcccatgtggatggccaaacccacatgttatttggctctgaccggatggagctgctggcgcacctgctgggagagaagtggatgggccctatacctccagccgtgaatgccagactttaagattgcccggaggaagcaaactcttcgtataaaaaaagcaggccatctgcttaacccttggctccaccataaggcactgggactcggatttctctatctgatagaggtattttctgtggccctgggagctgtctgtctttcccctacccccaaggatgccaggaagacgtccaccattagccatgtggcaacctttacttctatgcctcacaagtgcctttcagagagccccaattctgctttcccacaaaataaacctaatgccatcaggcaaaaaccagaaagaactctgaccaaacccgccagacattacggacaaacaagggggggggccggcttcaagaaaacccg

SEQ ID NO: 307694 - DNA, 1367 bp, Homo sapiens
gtgggcggtcccaggcaggcccagaagctgggcagcctctgccgggttccgggaaaaggagctcctgctgccactgctcttccggagcctgcagcatggggcccctgccgcgcaccgtggagctcttctatgacgtgctgtccccctactcctggctgggcttcgagatcctgtgccggtatcagaatatctggaacatcaacctgcagttgcggcccagcctcataacagggatcatgaaagacagtggaaacaagcctccaggtctgcttccccgcaaaggactatacatggcaaatgacttaaagctcctgagacaccatctccagattcccatccacttccccaaggatttcttgtctgtgatgcttgaaaaagggtgaagagagtgggatgtagacagggtatccagtgaaaaacacagaagtcggagattgagggattgataggatggaggggctgcgggagactaaagcaagtgaagcctgccttgggaaacctcaggatcagccttgagcgagctgaaggttgccgggcatgaaagggaagaagagcaggcaaataggtcatgggaaccttgggtgagaggctgagggcggaggagctctgggggatgtcagaagcaaggaagagctagtcctccaccaggaaagcagcaagaggagccctgcctctgggtgcctctgccccacagaagtttgtctgccatgcgtttcctcaccgccgtgaacttggagcatccagagatgctggagaaagcgtcccgggagctgtggatgcgcgtctggtcaaggaatgaagacatcaccgagccgcagagcatcctggcggctgcagagaaggctggtatgtctgcagaacaagcccagggacttctggaaaagatcgcaacgccaaaggtgaagaaccagctcaaggagaccactgaggcagcctgcagatacggagcctttgggctgcccatcaccgtggcccatgtggatggccaaacccacatgttatttggctctgaccggatggagctgctggcgcacctgctgggagagaagtggatgggccctatacctccagccgtgaatgccagactttaagattgcccggaggaagcaaactcttcgtataaaaaaagcaggccatctgcttaacccttggctccaccataaggcactgggactcggatttctctatctgatagaggtattttctgtggccctgggagctgtctgtctttcccctacccccaaggatgccaggaagacgtccaccattagccatgtggcaacctttacttctatgcctcacaagtgcctttcagagagccccaattctgctttcccacaaaataaacctaatgccatcaggcaaaa

SEQ ID NO: 307695 - DNA, 1452 bp, Homo sapiens
gtgggcggtcccaggcaggcccagaagctgggcagcctctgccgggttccgggaaaaggagctcctgctgccactgctcttccggagcctgcagcatggggcccctgccgcgcaccgtggagctcttctatgacgtgctgtccccctactcctggctgggcttcgagatcctgtgccggtatcagaatatctggaacatcaacctgcagttgcggcccagcctcataacagggatcatgaaagacagtggaaacaagcctccaggtctgcttccccgcaaaggactatacatggcaaatgacttaaagctcctgagacaccatctccagattcccatccacttccccaaggatttcttgtctgtgatgcttgaaaaaggaagtttgtctgccatgcgtttcctcaccgccgtgaacttggagcatccagagatgctggagaaagcgtcccgggagctgtggatgcgcgtctggtcaaggaatgaagacatcaccgagccgcagagcatcctggcggctgcagagaaggctggtatgtctgcagaacaagcccagggacttctggaaaagatcgcaacgccaaaggtgaagaaccagctcaaggagaccactgaggcagcctgcagatacggagcctttgggctgcccatcaccgtggcccatgtggatggccaaacccacatgttatttggctctgaccggatggagctgctggcgcacctgctgggagagaagtggatgggccctatacctccagccgtgaatgccagactttaagattgcccggaggaagcaaactcttcgtataaaaaaagcaggccatctgcttaacccttggctccaccataaggcactgggactcggatttctctatctgatagaggtattttctgtggccctgggagctgtctgtctttcccctacccccaaggatgccaggaagacgtccaccattagccatgtggcaacctttacttctatgcctcacaagtgcctttcagagagccccaattctgctttcccacaaaataaacctaatgccatcaggcaaaaaaaaaaaaaaaaaaataaaaaaaacaaaggggggggggggaaaaaaggtatccctagaggggcaccagatatatacgcgtgataccaacattattttgtacacaaggtgggcgccatatagaggagcgcgatataataagagcagtcgcaatggcccaggagttttaaaaacgtgcgacacggtgacacagctgctacggggggagcttgtggaggagagaccctaaatcgtgttgtagggggcacaaggtggagaacaataaactaaaagaaattttaaaaggctagaggggaagtatagaaaattgaaggggtaaaagtgggttaaacataggtgatatttgtggggcggatgagaagtatggggtagtggggtataagatttgacacgttttatcgg

SEQ ID NO: 307696 - DNA, 1535 bp, Homo sapiens
gtgggcggtcccaggcaggcccagaagctgggcagcctctgccgggttccgggaaaaggagctcctgctgccactgctcttccggagcctgcagcatggggcccctgccgcgcaccgtggagctcttctatgacgtgctgtccccctactcctggctgggcttcgagatcctgtgccggtatcagaatatctggaacatcaacctgcagttgcggcccagcctcataacagggatcatgaaagacagtggaaacaagcctccaggtctgcttccccgcaaaggactatacatggcaaatgacttaaagctcctgagacaccatctccagattcccatccacttccccaaggatttcttgtctgtgatgcttgaaaaagggtgaagagagtgggatgtagacagggtatccagtgaaaaacacagaagtcggagattgagggattgataggatggaggggctgcgggagactaaagcaagtgaagcctgccttgggaaacctcaggatcagccttgagcgagctgaaggttgccgggcatgaaagggaagaagagcaggcaaataggtcatgggaaccttgggtgagaggctgagggcggaggagctctgggggatgtcagaagcaaggaagagctagtcctccaccaggaaagcagcaagaggagccctgcctctgggtgcctctgccccacagaagtttgtctgccatgcgtttcctcaccgccgtgaacttggagcatccagagatgctggagaaagcgtcccgggagctgtggatgcgcgtctggtcaagggtgagtgtggggctctgggaatcctctgggaggaccttggatgactttctgaccttccccaggcacgttttcagggtcatgatcctgcccccgcccgggggatctactgtcctcccagtcacacccctctccccgcaccgccttcctgctgtcttctcttcttcccagaatgaagacatcaccgagccgcagagcatcctggcggctgcagagaaggctggtatgtctgcagaacaagcccagggacttctggaaaagatcgcaacgccaaaggtgaagaaccagctcaaggagaccactgaggcagcctgcagatacggagcctttgggctgcccatcaccgtggcccatgtggatggccaaacccacatgttatttggctctgaccggatggagctgctggcgcacctgctgggagagaagtggatgggccctatacctccagccgtgaatgccagactttaagattgcccggaggaagcaaactcttcgtataaaaaaagcaggccatctgcttaacccttggctccaccataaggcactgggactcggatttctctatctgatagaggtattttctgtggccctgggagctgtctgtctttcccctacccccaaggatgccaggaagacgtccaccattagccatgtggcaacctttacttctatgcctcacaagtgcctttcagagagccccaattctgctttcccacaaaataaacctaatgccatcaggcaaaa

SEQ ID NO: 307697 - DNA, 1167 bp, Homo sapiens
gtgggcggtcccaggcaggcccagaagctgggcagcctctgccgggttccgggaaaaggagctcctgctgccactgctcttccggagcctgcagcatggggcccctgccgcgcaccgtggagctcttctatgacgtgctgtccccctactcctggctgggcttcgagatcctgtgccggtatcagaatatctggaacatcaacctgcagttgcggcccagcctcataacagggatcatgaaagacagtggaaacaagcctccaggtctgcttccccgcaaaggactatacatggcaaatgacttaaagctcctgagacaccatctccagattcccatccacttccccaaggatttcttgtctgtgatgcttgaaaaagatgctggagaaagcgtcccgggagctgtggatgcgcgtctggtcaagggtgagtgtggggctctgggaatcctctgggaggaccttggatgactttctgaccttccccaggcacgttttcagggtcatgatcctgcccccgcccgggggatctactgtcctcccagtcacacccctctccccgcaccgccttcctgctgtcttctcttcttcccagaatgaagacatcaccgagccgcagagcatcctggcggctgcagagaaggctggtatgtctgcagaacaagcccagggacttctggaaaagatcgcaacgccaaaggtgaagaaccagctcaaggagaccactgaggcagcctgcagatacggagcctttgggctgcccatcaccgtggcccatgtggatggccaaacccacatgttatttggctctgaccggatggagctgctggcgcacctgctgggagagaagtggatgggccctatacctccagccgtgaatgccagactttaagattgcccggaggaagcaaactcttcgtataaaaaaagcaggccatctgcttaacccttggctccaccataaggcactgggactcggatttctctatctgatagaggtattttctgtggccctgggagctgtctgtctttcccctacccccaaggatgccaggaagacgtccaccattagccatgtggcaacctttacttctatgcctcacaagtgcctttcagagagccccaattctgctttcccacaaaataaacctaatgccatcaggcaaaa

SEQ ID NO: 307698 - DNA, 1884 bp, Homo sapiens
tgagtaggacacggcgaccgtgtattatacaggcaggttactgaactagtgggcgtggcgacaatctgagaaaaggagctcctgctgccactgctcttccggagcctgcagcatggggcccctgccgcgcaccgtggagctcttctatgacgtgctgtccccctactcctggctgggcttcgaggtgacgctgggaggggtcgcctcggcagtgtctggggagtgagggcggagggaagagtgagcgcagggctccgggacagaggtctcgtgtaactcctggcgccgcccaaggggttaaggcaagcagggagagctccggggctgaaggtcactttgtgcttttaaacggaatagagtcgctggctccaacccgagcctttatatcccgactgcagtttcccacggtggtggaaagaggggcggctccaaacattcagggagaaatgcagaacacggccacctcttagcccaacgatggcagttttggggaaaactggccacaggagcgaagatcctggaatagatttctagtagtgaggagagttttgccaatttcaaaccaaacaatgtagggtgtccgcataacccctgctctgcacttagcgcctcccttccctttccctcggctctttcacttttccatcttgcacactggcaatcgttcttgacctctgcccgcagatcctgtgccggtatcagaatatctggaacatcaacctgcagttgcggcccagcctcataacagggatcatgaaagacagtggaaacaagcctccaggtctgcttccccgcaaaggactatacatggcaaatgacttaaagctcctgagacaccatctccagattcccatccacttccccaaggatttcttgtctgtgatgcttgaaaaagggtgaagagagtgggatgtagacagggtatccagtgaaaaacacagaagtcggagattgagggattgataggatggaggggctgcgggagactaaagcaagtgaagcctgccttgggaaacctcaggatcagccttgagcgagctgaaggttgccgggcatgaaagggaagaagagcaggcaaataggtcatgggaaccttgggtgagaggctgagggcggaggagctctgggggatgtcagaagcaaggaagagctagtcctccaccaggaaagcagcaagaggagccctgcctctgggtgcctctgccccacagaagtttgtctgccatgcgtttcctcaccgccgtgaacttggagcatccagagatgctggagaaagcgtcccgggagctgtggatgcgcgtctggtcaaggaatgaagacatcaccgagccgcagagcatcctggcggctgcagagaaggctggtatgtctgcagaacaagcccagggacttctggaaaagatcgcaacgccaaaggtgaagaaccagctcaaggagaccactgaggcagcctgcagatacggagcctttgggctgcccatcaccgtggcccatgtggatggccaaacccacatgttatttggctctgaccggatggagctgctggcgcacctgctgggagagaagtggatgggccctatacctccagccgtgaatgccagactttaagattgcccggaggaagcaaactcttcgtataaaaaaagcaggccatctgcttaacccttggctccaccataaggcactgggactcggatttctctatctgatagaggtattttctgtggccctgggagctgtctgtctttcccctacccccaaggatgccaggaagacgtccaccattagccatgtggcaacctttacttctatgcctcacaagtgcctttcagagagccccaattctgctttcccacaaaataaacctaatgccatcaggcaaaa

SEQ ID NO: 307699 - DNA, 1016 bp, Homo sapiens
gtgggcggtcccaggcaggcccagaagctgggcagcctctgccgggttccgggaaaaggagctcctgctgccactgctcttccggagcctgcagcatggggcccctgccgcgcaccgtggagctcttctatgacgtgctgtccccctactcctggctgggcttcgagatcctgtgccggtatcagaatatctggaacatcaacctgcagttgcggcccagcctcataacagggatcatgaaagacagtggaaacaagcctccaggtctgcttccccgcaaaggactatacatggcaaatgacttaaagctcctgagacaccatctccagattcccatccacttccccaaggatttcttgtctgtgatgcttgaaaaaggaagtttgtctgccatgcgtttcctcaccgccgtgaacttggagcatccagagatgctggagaaagcgtcccgggagctgtggatgcgcgtctggtcaagggctgcagagaaggctggtatgtctgcagaacaagcccagggacttctggaaaagatcgcaacgccaaaggtgaagaaccagctcaaggagaccactgaggcagcctgcagatacggagcctttgggctgcccatcaccgtggcccatgtggatggccaaacccacatgttatttggctctgaccggatggagctgctggcgcacctgctgggagagaagtggatgggccctatacctccagccgtgaatgccagactttaagattgcccggaggaagcaaactcttcgtataaaaaaagcaggccatctgcttaacccttggctccaccataaggcactgggactcggatttctctatctgatagaggtattttctgtggccctgggagctgtctgtctttcccctacccccaaggatgccaggaagacgtccaccattagccatgtggcaacctttacttctatgcctcacaagtgcctttcagagagccccaattctgctttcccacaaaataaacctaatgccatcaggcaaaa

SEQ ID NO: 307700 - DNA, 1170 bp, Homo sapiens
  misc_feature (341)..(341): n is a, c, g, or t
  misc_feature (587)..(587): n is a, c, g, or t
tgagtaggacacggcgaccgtgtattatacaggcaggttactgaactagtgggcgtggcgacaatctgagaaaaggagctcctgctgccactgctcttccggagcctgcagcatggggcccctgccgcgcaccgtggagctcttctatgacgtgctgtccccctactcctggctgggcttcgagatcctgtgccggtatcagaatatctggaacatcaacctgcagttgcggcccagcctcataacagggatcatgaaagacagtggaaacaagcctccaggtctgcttccccgcaaaggactatacatggcaaatgacttttaaaaaggcctttcccccnttggaaaaggaaccaaaccccaattcttcccaaggaatttcccccaattccaatttccccaaaggaattcctgtgtctgtagatgcttgaaaacaggacagttgtgtccgtgccactagttggggcccgctttttcatcctcctacacgccgcgcgtgacacttggacgcatccagagtatgctggagaaagcgtcccgggagctgtggactgcgcgtctggtcaaggaatgaacgacatttcaanccccgggaagggccccccgggccaaagaaagcccatccctgggctggctgcagagaaggctggtatgtctgcagaacaagcccagggacttctggaaaagatcgcaacgccaaaggtgaagaaccagctcaaggagaccactgaggcagcctgcagatacggagcctttgggctgcccatcaccgtggcccatgtggatggccaaacccacatgttatttggctctgaccggatggagctgctggcgcacctgctgggagagaagtggatgggccctatacctccagccgtgaatgccagactttaagattgcccggaggaagcaaactcttcgtataaaaaaagcaggccatctgcttaacccttggctccaccataaggcactgggactcggatttctctatctgatagaggtattttctgtggccctgggagctgtctgtctttcccctacccccaaggatgccaggaagacgtccaccattagccatgtggcaacctttacttctatgcctcacaagtgcctttcagagagccccaattctgctttcccacaaaataaacctaatgccatcaggcaaaa

SEQ ID NO: 307701 - DNA, 656 bp, Homo sapiens
ccgcagggtagaagcccagggcccagcacctcagggtggcctcatggtcagagatggggtggtgggtcacatgtgactcaggggtgcccactgactttgcgccgcagagcatcctggcggctgcagagaaggctggtatgtctgcagaacaagcccagggacttctggaaaagatcgcaacgccaaaggtgaagaaccagctcaaggagaccactgaggcagcctgcagatacggagcctttgggctgcccatcaccgtggcccatgtggatggccaaacccacatgttatttggctctgaccggatggagctgctggcgcacctgctgggagagaagtggatgggccctatacctccagccgtgaatgccagactttaagattgcccggaggaagcaaactcttcgtataaaaaaagcaggccatctgcttaacccttggctccaccataaggcactgggactcggatttctctatctgatagaggtattttctgtggccctgggagctgtctgtctttcccctacccccaaggatgccaggaagacgtccaccattagccatgtggcaacctttacttctatgcctcacaagtgcctttcagagagccccaattctgctttcccacaaaataaacctaatgccatcaggcaaaa

SEQ ID NO: 307702 - DNA, 1409 bp, Homo sapiens
gtgggcggtcccaggcaggcccagaagctgggcagcctctgccgggttccgggaaaaggagctcctgctgccactgctcttccggagcctgcagcatggggcccctgccgcgcaccgtggagctcttctatgacgtgctgtccccctactcctggctgggcttcgagatcctgtgccggtatcagaatatctggaacatcaacctgcagttgcggcccagcctcataacagggatcatgaaagacagtggaaacaagcctccaggtctgcttccccgcaaaggactatacatggcaaatgacttaaagctcctgagacaccatctccagattcccatccacttccccaaggatttcttgtctgtgatgcttgaaaaaggaagtttgtctgccatgcgtttcctcaccgccgtgaacttggagcatccagagatgctggagaaagcgtcccgggagctgtggatgcgcgtctggtcaaggaatgaagacatcaccgagccgcagagcatcctggcggctgcagagaaggctggtatgtctgcagaacaagcccagggacttctggaaaagatcgcaacgccaaaggtgaagaaccagctcaaggagaccactgaggcagcctgcagatacggagtgagcagctctttatgtgtgttcccagcacccatcctgaagatggagacttgagaatctctaagtttgagtccttatgctcctgtacaaaagccccctttccaagtgttctcctcagtgctcttaaacaaccctcatcttcttccttcttttccttgggctcagggaaaggaagggaaggagatgcacagtgagagaaaagagagcatcttagaaacaggaaggcacctggggccacagagcctcttagacctctttgcttctgtgaactcagaaaagtactgactcaaaggtttcaacccctgcctaatacctgctcctttgccttcctccttgcattgtaactgctttctccaggcctttgggctgcccatcaccgtggcccatgtggatggccaaacccacatgttatttggctctgaccggatggagctgctggcgcacctgctgggagagaagtggatgggccctatacctccagccgtgaatgccagactttaagattgcccggaggaagcaaactcttcgtataaaaaaagcaggccatctgcttaacccttggctccaccataaggcactgggactcggatttctctatctgatagaggtattttctgtggccctgggagctgtctgtctttcccctacccccaaggatgccaggaagacgtccaccattagccatgtggcaacctttacttctatgcctcacaagtgcctttcagagagccccaattctgctttcccacaaaataaacctaatgccatcaggcaaaa

SEQ ID NO: 307703 - DNA, 995 bp, Homo sapiens
gtgggcggtcccaggcaggcccagaagctgggcagcctctgccgggttccgggaaaaggagctcctgctgccactgctcttccggagcctgcagcatggggcccctgccgcgcaccgtggagctcttctatgacgtgctgtccccctactcctggctgggcttcgagatcctgtgccggtatcagaatatctggaacatcaacctgcagttgcggcccagcctcataacagggatcatgaaagacagtggaaacaagcctccaggtctgcttccccgcaaaggactatacatggcaaatgacttaaagctcctgagacaccatctccagattcccatccacttccccaaggatttcttgtctgtgatgcttgaaaaaggaagtttgtctgccatgcgtttcctcaccgccgtgaacttggagcatccagagatgctggagaaagcgtcccgggagctgtggatgcgcgtctggtcaaggaatgaagacatcaccgagccgcagagcatcctggcggctgcagagaaggctggtatgtctgcagaacaagcccagggacttctggaaaagatcgcagcctttgggctgcccatcaccgtggcccatgtggatggccaaacccacatgttatttggctctgaccggatggagctgctggcgcacctgctgggagagaagtggatgggccctatacctccagccgtgaatgccagactttaagattgcccggaggaagcaaactcttcgtataaaaaaagcaggccatctgcttaacccttggctccaccataaggcactgggactcggatttctctatctgatagaggtattttctgtggccctgggagctgtctgtctttcccctacccccaaggatgccaggaagacgtccaccattagccatgtggcaacctttacttctatgcctcacaagtgcctttcagagagccccaattctgctttcccacaaaataaacctaatgccatcaggcaaaa

SEQ ID NO: 307704 - DNA, 1577 bp, Homo sapiens
gtgggcggtcccaggcaggcccagaagctgggcagcctctgccgggttccgggaaaaggagctcctgctgccactgctcttccggagcctgcagcatggggcccctgccgcgcaccgtggagctcttctatgacgtgctgtccccctactcctggctgggcttcgagatcctgtgccggtatcagaatatctggaacatcaacctgcagttgcggcccagcctcataacagggatcatgaaagacagtggaaacaagcctccaggtctgcttccccgcaaaggactatacatggcaaatgacttaaagctcctgagacaccatctccagattcccatccacttccccaaggatttcttgtctgtgatgcttgaaaaaggaagtttgtctgccatgcgtttcctcaccgccgtgaacttggagcatccagagatgctggagaaagcgtcccgggagctgtggatgcgcgtctggtcaagggtgagtgtggggctctgggaatcctctgggaggaccttggatgactttctgaccttccccaggcacgttttcagggtcatgatcctgcccccgcccgggggatctactgtcctcccagtcacacccctctccccgcaccgccttcctgctgtcttctcttcttcccagaatgaagacatcaccgagccgcagagcatcctggcggctgcagagaaggctggtatgtctgcagaacaagcccagggacttctggaaaagatcgcaacgccaaaggtgaagaaccagctcaaggagaccactgaggcagcctgcagatacggagtgagcagctctttatgtgtgttcccagcacccatcctgaagatggagacttgagaatctctaagtttgagtccttatgctcctgtacaaaagccccctttccaagtgttctcctcagtgctcttaaacaaccctcatcttcttccttcttttccttgggctcagggaaaggaagggaaggagatgcacagtgagagaaaagagagcatcttagaaacaggaaggcacctggggccacagagcctcttagacctctttgcttctgtgaactcagaaaagtactgactcaaaggtttcaacccctgcctaatacctgctcctttgccttcctccttgcattgtaactgctttctccaggcctttgggctgcccatcaccgtggcccatgtggatggccaaacccacatgttatttggctctgaccggatggagctgctggcgcacctgctgggagagaagtggatgggccctatacctccagccgtgaatgccagactttaagattgcccggaggaagcaaactcttcgtataaaaaaagcaggccatctgcttaacccttggctccaccataaggcactgggactcggatttctctatctgatagaggtattttctgtggccctgggagctgtctgtctttcccctacccccaaggatgccaggaagacgtccaccattagccatgtggcaacctttacttctatgcctcacaagtgcctttcagagagccccaattctgctttcccacaaaataaacctaatgccatcaggcaaaa

SEQ ID NO: 307705 - DNA, 1459 bp, Homo sapiens
gtgggcggtcccaggcaggcccagaagctgggcagcctctgccgggttccgggaaaaggagctcctgctgccactgctcttccggagcctgcagcatggggcccctgccgcgcaccgtggagctcttctatgacgtgctgtccccctactcctggctgggcttcgagatcctgtgccggtatcagaatatctggaacatcaacctgcagttgcggcccagcctcataacagggatcatgaaagacagtggaaacaagcctccaggtctgcttccccgcaaaggactatacatggcaaatgacttaaagctcctgagacaccatctccagattcccatccacttccccaaggatttcttgtctgtgatgcttgaaaaaggaagtttgtctgccatgcgtttcctcaccgccgtgaacttggagcatccagagatgctggagaaagcgtcccgggagctgtggatgcgcgtctggtcaaggaatgaagacatcaccgagccgcagagcatcctggcggctgcagagaaggctggtatgtctgcagaacaagcccagggacttctggaaaagatcgcaacgccaaaggtgaagaaccagctcaaggagaccactgaggcagcctgcagatacggagtgagcagctctttatgtgtgttcccagcacccatcctgaagatggagacttgagaatctctaagtttgagtccttatgctcctgtacaaaagccccctttccaagtgttctcctcagtgctcttaaacaaccctcatcttcttccttcttttccttgggctcagggaaaggaagggaaggagatgcacagtgagagaaaagagagcatcttagaaacaggaaggcacctggggccacagagcctcttagacctctttgcttctgtgaactcagaaaagtactgactcaaaggtttcaacccctgcctaatacctgctcctttgccttcctccttgcattgtaactgctttctccaggcctttgggctgcccatcaccgtggcccatgtggatggccaaacccacatgttatttggctctgaccggatggagctgctggcgcacctgctgggtaagtaagttaaagaatcaaccctgagccaggtgcagtggctcacgcctgtaatcccagcactttggtaggctgaggcgagcagagcacgagttcaggagattaagaccatcctggccaacatggtgaaaccccgtctctactaaaaatataaaaattagctgggactacagctgcctcagtgggaggctgaggcaggagaatcacttgaacctgggaggcggaggttgcagtgagccgagatcgcgccactgcactccagcctgggtgacaaagcaagactccgtctcaaaataaaaagattcaaccctgagctgcctttgaccccagctccacacccactatatcagttgaccagaaggaggggctcagagca

SEQ ID NO: 307706 - DNA, 1449 bp, Homo sapiens
gtgggcggtcccaggcaggcccagaagctgggcagcctctgccgggttccgggaaaaggagctcctgctgccactgctcttccggagcctgcagcatggggcccctgccgcgcaccgtggagctcttctatgacgtgctgtccccctactcctggctgggcttcgagatcctgtgccggtatcagaatatctggaacatcaacctgcagttgcggcccagcctcataacagggatcatgaaagacagtggaaacaagcctccaggtctgcttccccgcaaaggactatacatggcaaatgacttaaagctcctgagacaccatctccagattcccatccacttccccaaggatttcttgtctgtgatgcttgaaaaaggaagtttgtctgccatgcgtttcctcaccgccgtgaacttggagcatccagagatgctggagaaagcgtcccgggagctgtggatgcgcgtctggtcaaggaatgaagacatcaccgagccgcagagcatcctggcggctgcagagaaggctggtatgtctgcagaacaagcccagggacttctggaaaagatcgcaacgccaaaggtgaagaaccagctcaaggagaccactgaggcagcctgcagatacggagtgagcagctctttatgtgtgttcccagcacccatcctgaagatggagacttgagaatctctaagtttgagtccttatgctcctgtacaaaagccccctttccaagtgttctcctcagtgctcttaaacaaccctcatcttcttccttcttttccttgggctcagggaaaggaagggaaggagatgcacagtgagagaaaagagagcatcttagaaacaggaaggcacctggggccacagagcctcttagacctctttgcttctgtgaactcagaaaagtactgactcaaaggtttcaacccctgcctaatacctgctcctttgccttcctccttgcattgtaactgctttctccaggcctttgggctgcccatcaccgtggcccatgtggatggccaaacccacatgttatttggctctgaccggatggagctgctggcgcacctgctgggtaagtaagttaaagaatcaaccctgagccaggtgcagtggctcacgcctgtaatcccagcactttggtaggctgaggcgagcagagcacgagttcaggagattaagaccatcctggccaacatggtgaaaccccgtctctactaaaaatataaaaattagctgggactacagctgcctcagtgggaggctgaggcaggagaatcacttgaacctgggaggcggaggttgcagtgagccgagatcgcgccactgcactccagcctgggtgacaaagcaagactccgtctcaaaataaaaagattcccggggtggcttttaccccagttacaaccacttttttttgcccccaggagggggttatgcc

SEQ ID NO: 307707 - DNA, 1405 bp, Homo sapiens
gtgggcggtcccaggcaggcccagaagctgggcagcctctgccgggttccgggaaaaggagctcctgctgccactgctcttccggagcctgcagcatggggcccctgccgcgcaccgtggagctcttctatgacgtgctgtccccctactcctggctgggcttcgagatcctgtgccggtatcagaatatctggaacatcaacctgcagttgcggcccagcctcataacagggatcatgaaagacagtggaaacaagcctccaggtctgcttccccgcaaaggactatacatggcaaatgacttaaagctcctgagacaccatctccagattcccatccacttccccaaggatttcttgtctgtgatgcttgaaaaaggaagtttgtctgccatgcgtttcctcaccgccgtgaacttggagcatccagagatgctggagaaagcgtcccgggagctgtggatgcgcgtctggtcaaggaatgaagacatcaccgagccgcagagcatcctggcggctgcagagaaggctggtatgtctgcagaacaagcccagggacttctggaaaagatcgcaacgccaaaggtgaagaaccagctcaaggagaccactgaggcagcctgcagatacggagtgagcagctctttatgtgtgttcccagcacccatcctgaagatggagacttgagaatctctaagtttgagtccttatgctcctgtacaaaagccccctttccaagtgttctcctcagtgctcttaaacaaccctcatcttcttccttcttttccttgggctcagggaaaggaagggaaggagatgcacagtgagagaaaagagagcatcttagaaacaggaaggcacctggggccacagagcctcttagacctctttgcttctgtgaactcagactccttgcattgtaactgctttctccaggcctttgggctgcccatcaccgtggcccatgtggatggccaaacccacatgttatttggctctgaccggatggagctgctggcgcacctgctgggtaagtaagttaaagaatcaaccctgagccaggtgcagtggctcacgcctgtaatcccagcactttggtaggctgaggcgagcagagcacgagttcaggagattaagaccatcctggccaacatggtgaaaccccgtctctactaaaaatataaaaattagctgggactacagctgcctcagtgggaggctgaggcaggagaatcacttgaacctgggaggcggaggttgcagtgagccgagatcgcgccactgcactccagcctgggtgacaaagcaagactccgtctcaaaataaaaagattcaaccctgagctgcctttgaccccagctccacacccactatatcagttgaccagaaggaggggctcagagca

SEQ ID NO: 307708 - DNA, 928 bp, Homo sapiens
gtgggcggtcccaggcaggcccagaagctgggcagcctctgccgggttccgggaaaaggagctcctgctgccactgctcttccggagcctgcagcatggggcccctgccgcgcaccgtggagctcttctatgacgtgctgtccccctactcctggctgggcttcgagatcctgtgccggtatcagaatatctggaacatcaacctgcagttgcggcccagcctcataacagggatcatgaaagacagtggaaacaagcctccaggtctgcttccccgcaaaggactatacatggcaaatgacttaaagctcctgagacaccatctccagattcccatccacttccccaaggatttcttgtctgtgatgcttgaaaaaggaagtttgtctgccatgcgtttcctcaccgccgtgaacttggagcatccagagatgctggagaaagcgtcccgggagctgtggatgcgcgtctggtcaaggaatgaagacatcaccgagccgcagagcatcctggcggctgcagagaaggctggtatgtctgcagaacaagcccagggacttctggaaaagatcgcaacgccaaaggtgaagaaccagctcaaggagaccactgaggcagcctgcagatacggagtgagcagctctttatgtgtgttcccagcacccatcctgaagatggagacttgagaatctctaagtttgagtccttatgctcctgtacaaaagccccctttccaagtgttctcctcagtgctcttaaacaaccctcatcttcttccttcttttccttgggctcagggaaaggaagggaaggagatgcacagtgagagaaaagagagcatcttagaaagggggcttttgtacaggagcataaggactcgacttagagattctcaagtctccatcttcacggatgggatcctctagat

SEQ ID NO: 307709 - DNA, 1236 bp, Homo sapiens
gtgggcggtcccaggcaggcccagaagctgggcagcctctgccgggttccgggaaaaggagctcctgctgccactgctcttccggagcctgcagcatggggcccctgccgcgcaccgtggagctcttctatgacgtgctgtccccctactcctggctgggcttcgagatcctgtgccggtatcagaatatctggaacatcaacctgcagttgcggcccagcctcataacagggatcatgaaagacagtggaaacaagcctccaggtctgcttccccgcaaaggactatacatggcaaatgacttaaagctcctgagacaccatctccagattcccatccacttccccaaggatttcttgtctgtgatgcttgaaaaaggaagtttgtctgccatgcgtttcctcaccgccgtgaacttggagcatccagagatgctggagaaagcgtcccgggagctgtggatgcgcgtctggtcaaggaatgaagacatcaccgagccgcagagcatcctggcggtgagtgtcctggctccaccccaactgcactcatagagaatctgagaacagttggcgtttgggggtaaagaagacaataggtctcttattgcatggaaaaggttataattactggggaagaaaggatgtctgtgattcagggcacaaactactgaaaagttggaactaaggatcctcaaaaggatatctcaaggttgaaaggggaagtgcaaaagggacaatatatgggaagaatttatttgctgaaagatgtcagtgagagaaagatgctcagtgttggaacccctggatggggagggatatagtattcacaagtctccacaaactccaacacaaacctcaccaacacatccagagtggaaggcaggagacttgttccaagaggctttaaaaagacgaaaagagataactaatgccagggttatataggagcctgagtgagaacaaatggaaatagctcaaaacattgaccagtgagccatggatgggggtataaaagtaagtttgtcttcaggattaaattaggaaattcaaaacagtattattcctctggtttacaaaaaaaaatagttgagacctattcaaatttaatatataaagtggcaaatcacacaaaagttaaacgtataaggaatggcaaatatatcttctacagtctatactcctgcaaagtacatgtgtaatttttagcttgcttttttacttcatatttaatcatttt

SEQ ID NO: 307710 - DNA, 1404 bp, Homo sapiens
gtgggcggtcccaggcaggcccagaagctgggcagcctctgccgggttccgggaaaaggagctcctgctgccactgctcttccggagcctgcagcatggggcccctgccgcgcaccgtggagctcttctatgacgtgctgtccccctactcctggctgggcttcgagatcctgtgccggtatcagaatatctggaacatcaacctgcagttgcggcccagcctcataacagggatcatgaaagacagtggaaacaagcctccaggtctgcttccccgcaaaggactatacatggcaaatgacttaaagctcctgagacaccatctccagattcccatccacttccccaaggatttcttgtctgtgatgcttgaaaaaggaagtttgtctgccatgcgtttcctcaccgccgtgaacttggagcatccagagatgctggagaaagcgtcccgggagctgtggatgcgcgtctggtcaagggtgagtgtggggctctgggaatcctctgggaggaccttggatgactttctgaccttccccaggcacgttttcagggtcatgatcctgcccccgcccgggggatctactgtcctcccagtcacacccctctccccgcaccgccttcctgctgtcttctcttcttcccagaatgaagacatcaccgagccgcagagcatcctggcggtgagtgtcctggctccaccccaactgcactcatagagaatctgagaacagttggcgtttgggggtaaagaagacaataggtctcttattgcatggaaaaggttataattactggggaagaaaggatgtctgtgattcagggcacaaactactgaaaagttggaactaaggatcctcaaaaggatatctcaaggttgaaaggggaagtgcaaaagggacaatatatgggaagaatttatttgctgaaagatgtcagtgagagaaagatgctcagtgttggaacccctggatggggagggatatagtattcacaagtctccacaaactccaacacaaacctcaccaacacatccagagtggaaggcaggagacttgttccaagaggctttaaaaagacgaaaagagataactaatgccagggttatataggagcctgagtgagaacaaatggaaatagctcaaaacattgaccagtgagccatggatgggggtataaaagtaagtttgtcttcaggattaaattaggaaattcaaaacagtattattcctctggtttacaaaaaaaaatagttgagacctattcaaatttaatatataaagtggcaaatcacacaaaagttaaacgtataaggaatggcaaatatatcttctacagtctatactcctgcaaagtacatgtgtaatttttagcttgcttttttacttcatatttaatcatttt

SEQ ID NO: 307711 - DNA, 968 bp, Homo sapiens
tgagtaggacacggcgaccgtgtattatacaggcaggttactgaactagtgggcgtggcgacaatctgagaaaaggagctcctgctgccactgctcttccggagcctgcagcatggggcccctgccgcgcaccgtggagctcttctatgacgtgctgtccccctactcctggctgggcttcgaggtgacgctgggaggggtcgcctcggcagtgtctggggagtgagggcggagggaagagtgagcgcagggctccgggacagaggtctcgtgtaactcctggcgccgcccaaggggttaaggcaagcagggagagctccggggctgaaggtcactttgtgcttttaaacggaatagagtcgctggctccaacccgagcctttatatcccgactgcagtttcccacggtggtggaaagaggggcggctccaaacattcagggagaaatgcagaacacggccacctcttagcccaacgatggcagttttggggaaaactggccacaggagcgaagatcctggaatagatttctagtagtgaggagagttttgccaatttcaaaccaaacaatgtagggtgtccgcataacccctgctctgcacttagcgcctcccttccctttccctcggctctttcacttttccatcttgcacactggcaatcgttcttgacctctgcccgcagatcctgtgccggtatcagaatatctggaacatcaacctgcagttgcggcccagcctcataacagggatcatgaaagacagtggtaggaagggagggtcggggcaggggtgatctcagtggcccaagagagccgaccccagcgggtccttatattggcactggcagccagaaagctgccctctgccccgtctctactaaaaatacaaaattagccgggcgtggtagtgcatgcctgtataccacagctactcgggaggctgaggcgggagaatcgcttgaaccca

SEQ ID NO: 307712 - DNA, 6631 bp, Homo sapiens
agggaaggttggcagagggatccatgtgactgaggccggagcacggcaaagatgagcctgcccgcccgcctgctgcctggatgcggagggtgagggctggcgcacgggaggccgctggctgcgcattctgggcgccgagtgcccgggatgagctcacgcccgcgtctgcggctctctccacctgccgacctgccgggggcccactgagctgacggcgcacctgggctccggccgcagcgtggggcgcggcgcccgggagcaggtgtgcaggagcgcagcgcgcggcgagcgcagccctcgctccggagcccggccgcgccgcgtgcccgggcggctaggcagcggcggcggcggcggcgggcggcgggcgggcggcggcccccgggcaggtgccgagcggcgagcggagccgggccgggcggagcgcggggggcgaggccggcgcgtcgctcgcgggaggccggggagcggcaggggcatgtggatactggctctctccttgttccagagcttcgcgaatgttttcagtgaagacctacactccagcctctactttgtcaatgcatctctgcaagaggtagtgtttgccagcaccacggggactctggtgccctgccccgcagcaggcatccctcctgtgactctcagatggtacctagccacgggcgaggagatctacgatgtccccgggatccgccacgtccaccccaacggcactctccaaattttccccttccctccttcaagcttcagtaccttaatccatgataatacttattattgcacagctgaaaatccttcagggaaaattagaagtcaggatgtccacatcaaggctgttttacgggagccctatacagtccgtgtggaggaccagaaaaccatgagaggcaatgttgcggtcttcaagtgcattatcccctcctcggtggaggcgtacatcactgtcgtctcatgggagaaagacactgtttcacttgtctcaggatctagatttctcatcacatccacgggagccttgtatattaaagatgtacagaatgaagatggattgtataactaccgctgcatcacgcggcatcgatacaccggagagacgaggcagagcaacagcgccagactttttgtatcagacccagcgaactcagccccatccatactggatgggtttgaccatcgcaaagccatggctgggcagcgtgtggagctgccttgcaaagcgctcgggcaccctgagccagattaccgctggctgaaggacaacatgcccctggaactttcagggaggttccagaagaccgtgacggggctgctcattgagaacattcgcccctcggactcaggcagctatgtttgtgaagtgtccaacagatacggaactgctaaggtgataggccgcctgtacgtgaaacagccactgaaagccaccatcagtcccaggaaggttaaaagcagcgtgggtagccaagtttccttgtcctgcagcgtgacaggaactgaggaccaggaactctcctggtaccgcaatggtgaaatcctcaaccctggaaaaaatgtgaggatcacagggatcaaccacgaaaaccttataatggatcacatggtcaaaagtgacgggggcgcataccagtgctttgtgcgcaaggacaagctgtccgctcaagactatgtgcaggtggtccttgaagatggaactcccaaaattatttctgcctttagtgaaaaggtggtgagtccagcagagccggtttcccttatgtgcaacgtgaagggaacacctttgcccacgatcacgtggaccctggacgatgacccgattctcaagggtggcagtcaccgcatcagccagatgatcacgtcggaggggaacgtggtcagctacctgaacatctccagctcccaggtccgggacgggggagtctaccgctgcactgccaacaactcggcgggagtcgtcctgtaccaggctcgaataaacgtaagagggcctgcaagcattcgaccaatgaaaaacatcacagcaatagcaggacgggacacatacattcactgtcgtgtgattggctatccgtattactccattaaatggtacaagaactctaacctgcttcctttcaaccaccgccaagtggcatttgagaacaatggaactcttaaactttcagatgtgcaaaaggaagtggacgagggggagtacacgtgcaacgtgttggttcaaccacaactctccaccagccagagcgtccacgtgaccgtgaaagttccgcctttcatacaaccctttgagtttccaagattctccattgggcagcgggtcttcatcccctgtgttgtggtctcaggggacttacccatcacgatcacctggcagaaggatggccggccaatccctgggagccttggggtgaccattgacaatattgacttcacgagctccttgaggatttccaatctctcgctcatgcacaatgggaattacacctgcatagcccggaatgaggccgccgctgtggagcaccaaagccagttgattgtcagagttcctcccaagtttgtggttcagccacgggaccaggacgggatttatggcaaagcagtcatcctcaattgttctgctgagggttaccctgtacctaccatcgtgtggaaattctctaaaggtgctggggttccccagttccagccaattgccctaaatggccgaatccaagttctcagcaatgggtcgttgctgatcaagcatgtcgtggaggaagacagtggctactacctctgcaaggtcagcaacgatgtgggcgcagacgtcagcaagtccatgtacctcacggttaaaattcctgcgatgataacatcctatccaaatactaccctggccacgcaggggcagaaaaaggagatgagctgcacggcgcatggtgagaagcccattatagtccgctgggagaaggaggaccgaatcattaaccctgagatggcccgttatcttgtgtccaccaaggaggtgggagaagaggtgatttctactctgcagattttgccaactgtgagagaagattctggtttcttttcctgccatgctattaattcttatggggaggaccgtggaataattcagctcacagtgcaagagcccccagaccctcccgaaattgagatcaaagatgtcaaagcacgcacaattacgctcaggtggaccatggggtttgatggaaacagtcccatcacaggctacgatattgaatgcaaaaataaatcagactcctgggattctgctcagagaaccaaagatgtttcccctcagctgaactcggccaccatcattgatatccacccttcctccacctacagcatccgcatgtacgccaagaaccggattggcaagagcgagcccagcaacgagctcaccatcacggcggacgaggcagctcctgatggtccacctcaggaagttcacctggagcctatatcatctcagagcatcagggtcacatggaaggctcccaagaaacatttgcaaaatgggattatccgtggctaccaaataggttaccgagagtacagcactgggggtaacttccaattcaacattatcagtgtcgacaccagcggggacagtgaggtttacaccctggacaacctgaataagttcactcagtacggcctggtggtgcaggcctgtaaccgggccggcacggggccttcttctcaggaaatcatcaccaccactctcgaggatgtgcccagttacccccccgaaaatgtccaagccatagcaacatcaccagaaagcatatcaatatcctggtccacactttccaaggaagccttgaatggaattctccaggggttcagagtcatttactgggccaacctcatggacggagagctgggtgagattaaaaacatcaccaccacacagccttcactggagctggacgggctggaaaagtacaccaactacagcatccaggtgctggccttcacccgcgcaggagacggggtcaggagtgagcagatcttcacccggaccaaagaggatgttccaggtcctcccgcgggtgtgaaggcagcggcggcctcagcctccatggtctttgtgtcctggcttccccctctcaagctgaacggcatcatccgaaagtacactgtattctgctcccacccctatcccacagtgatcagcgagtttgaggcctctcccgactcgttttcctacagaattcccaacctgagtaggaatcgtcagtacagcgtctgggtggtggctgttacttcagccggaagaggcaacagcagtgaaatcatcacagtcgagccactagcaaaagctcctgcacgaatcctgaccttcagtgggacagtgactactccatggatgaaagacattgtcttgccttgtaaggctgttggggacccttctcctgcagtcaaatggatgaaagacagtaacgggacacccagtctagtaacgattgatgggcggaggagcatctttagcaacggaagcttcattattcgcacggtgaaagcagaagactccggctattacagctgcattgccaataacaactggggatctgatgaaattattttaaacttacaagtacaagttccaccagatcagcctcggcttacagtctccaagaccacgtcttcctccatcaccctttcttggctccctggagacaacgggggcagctctatcagaggatacatactgcagtactccgaggacaatagtgagcagtgggggagttttccaatcagccccagcgaacgttcctatcgcttggaaaatctcaaatgtgggacttggtataagttcacactgacagcccaaaatggagtgggcccagggcgcataagtgaaatcatagaagcaaagaccttaggaaaagagccccagttctcaaaggagcaggagctgtttgccagcatcaacaccacacgcgtgaggctgaacctcattggctggaatgatggcggctgccccatcacctccttcacactagagtacaggccctttgggaccacagtttggaccacagctcagaggacctctctctccaagtcctacatcctgtatgacctgcaggaagccacctggtatgagctgcagatgcgggtgtgcaacagtgcgggctgcgcggagaagcaggccaacttcgctacgctgaactacgatggcagtacaattcctccactcattaagtcagttgtccaaaacgaagaagggctgacgaccaacgaggggctcaagatgctggtgaccatctcctgtatcctggtgggggtcttgctgctgtttgtgctcctgctggttgtgcggaggaggcggcgggagcagaggctaaagaggctgcgagatgcaaagagtttagctgaaatgctcatgagtaagaatacccggacttcagatacgttaagcaagcaacagcagaccctgcgaatgcacatcgacatacccagggctcagcttttgattgaagagagagacacgatggagaccattgatgatcgctccacggttctgttgacggatgctgactttggagaggcagctaagcagaagtccctgacggtcactcacacggtccattaccaatcggtgtctcaggccactgggcccttagtggatgtttcagacgctcggccgggaacgaatcccaccaccaggaggaatgccaaggctgggcccacagcgagaaaccgctatgccagccagtggaccctcaaccgaccccaccccaccatctcagcacacaccctcaccacagactggaggctgccaacacccagggctgcaggatcagtagacaaagagagcgacagttacagcgtcagcccctcgcaagacacagatcgagcaagaagcagcatggtctccacagaaagtgcctcctccacttacgaagaactggccagggcctacgaacacgccaagatggaagagcaactgaggcacgccaagttcaccatcacggagtgcttcatatcagacacgtcatcggagcagttgacggcagggacaaatgagtacacggacagtctgacctccagcaccccttccgaatcgggaatctgcaggttcactgcatctccccccaaacctcaggatggaggaagagtaatgaatatggcagttccaaaggcacatcggccaggtgacctcatacatttgcctccataccttagaatggactttttgttaaaccgaggtggtccaggcaccagcagggacctgagcttaggacaagcatgcttggaacctcagaaaagccggaccctgaagcgccccacggtcctggagcccatcccgatggaagccgcctcctccgcctcctccacgagagaaggacagtcgtggcagccgggggccgtggccacattacctcagcgggagggagcagagctgggacaggcagctaaaatgagcagctcccaagaatcactgctcgactcccggggccatttgaaaggaaacaatccttacgcaaaatcttacaccctggtataacagacagcatgactggacagcggttgtaaatacaattcaaacaattcaatcaaagctaccttttttttacggaattccaatatttataattaaagaaaattgccaaaatatatt

SEQ ID NO: 307713 - DNA, 6454 bp, Homo sapiens
agggaaggttggcagagggatccatgtgactgaggccggagcacggcaaagatgagcctgcccgcccgcctgctgcctggatgcggagggtgagggctggcgcacgggaggccgctggctgcgcattctgggcgccgagtgcccgggatgagctcacgcccgcgtctgcggctctctccacctgccgacctgccgggggcccactgagctgacggcgcacctgggctccggccgcagcgtggggcgcggcgcccgggagcaggtgtgcaggagcgcagcgcgcggcgagcgcagccctcgctccggagcccggccgcgccgcgtgcccgggcggctaggcagcggcggcggcggcggcgggcggcgggcgggcggcggcccccgggcaggtgccgagcggcgagcggagccgggccgggcggagcgcggggggcgaggccggcgcgtcgctcgcgggaggccggggagcggcaggggcatgtggatactggctctctccttgttccagagcttcgcgaatgttttcagtgaagacctacactccagcctctactttgtcaatgcatctctgcaagaggtagtgtttgccagcaccacggggactctggtgccctgccccgcagcaggcatccctcctgtgactctcagatggtacctagccacgggcgaggagatctacgatgtccccgggatccgccacgtccaccccaacggcactctccaaattttccccttccctccttcaagcttcagtaccttaatccatgataatacttattattgcacagctgaaaatccttcagggaaaattagaagtcaggatgtccacatcaaggctgttttacgggagccctatacagtccgtgtggaggaccagaaaaccatgagaggcaatgttgcggtcttcaagtgcattatcccctcctcggtggaggcgtacatcactgtcgtctcatgggagaaagacactgtttcacttgtctcaggatctagatttctcatcacatccacgggagccttgtatattaaagatgtacagaatgaagatggattgtataactaccgctgcatcacgcggcatcgatacaccggagagacgaggcagagcaacagcgccagactttttgtatcagacccagcgaactcagccccatccatactggatgggtttgaccatcgcaaagccatggctgggcagcgtgtggagctgccttgcaaagcgctcgggcaccctgagccagattaccgctggctgaaggacaacatgcccctggaactttcagggaggttccagaagaccgtgacggggctgctcattgagaacattcgcccctcggactcaggcagctatgtttgtgaagtgtccaacagatacggaactgctaaggtgataggccgcctgtacgtgaaacagccactgaaagccaccatcagtcccaggaaggttaaaagcagcgtgggtagccaagtttccttgtcctgcagcgtgacaggaactgaggaccaggaactctcctggtaccgcaatggtgaaatcctcaaccctggaaaaaatgtgaggatcacagggatcaaccacgaaaaccttataatggatcacatggtcaaaagtgacgggggcgcataccagtgctttgtgcgcaaggacaagctgtccgctcaagactatgtgcaggtggtccttgaagatggaactcccaaaattatttctgcctttagtgaaaaggtggtgagtccagcagagccggtttcccttatgtgcaacgtgaagggaacacctttgcccacgatcacgtggaccctggacgatgacccgattctcaagggtggcagtcaccgcatcagccagatgatcacgtcggaggggaacgtggtcagctacctgaacatctccagctcccaggtccgggacgggggagtctaccgctgcactgccaacaactcggcgggagtcgtcctgtaccaggctcgaataaacgtaagagggcctgcaagcattcgaccaatgaaaaacatcacagcaatagcaggacgggacacatacattcactgtcgtgtgattggctatccgtattactccattaaatggtacaagaactctaacctgcttcctttcaaccaccgccaagtggcatttgagaacaatggaactcttaaactttcagatgtgcaaaaggaagtggacgagggggagtacacgtgcaacgtgttggttcaaccacaactctccaccagccagagcgtccacgtgaccgtgaaagttccgcctttcatacaaccctttgagtttccaagattctccattgggcagcgggtcttcatcccctgtgttgtggtctcaggggacttacccatcacgatcacctggcagaaggatggccggccaatccctgggagccttggggtgaccattgacaatattgacttcacgagctccttgaggatttccaatctctcgctcatgcacaatgggaattacacctgcatagcccggaatgaggccgccgctgtggagcaccaaagccagttgattgtcagagttcctcccaagtttgtggttcagccacgggaccaggacgggatttatggcaaagcagtcatcctcaattgttctgctgagggttaccctgtacctaccatcgtgtggaaattctctaaaggtgctggggttccccagttccagccaattgccctaaatggccgaatccaagttctcagcaatgggtcgttgctgatcaagcatgtcgtggaggaagacagtggctactacctctgcaaggtcagcaacgatgtgggcgcagacgtcagcaagtccatgtacctcacggttaaaattcctgcgatgataacatcctatccaaatactaccctggccacgcaggggcagaaaaaggagatgagctgcacggcgcatggtgagaagcccattatagtccgctgggagaaggaggaccgaatcattaaccctgagatggcccgttatcttgtgtccaccaaggaggtgggagaagaggtgatttctactctgcagattttgccaactgtgagagaagattctggtttcttttcctgccatgctattaattcttatggggaggaccgtggaataattcagctcacagtgcaagagcccccagaccctcccgaaattgagatcaaagatgtcaaagcacgcacaattacgctcaggtggaccatggggtttgatggaaacagtcccatcacaggctacgatattgaatgcaaaaataaatcagactcctgggattctgctcagagaaccaaagatgtttcccctcagctgaactcggccaccatcattgatatccacccttcctccacctacagcatccgcatgtacgccaagaaccggattggcaagagcgagcccagcaacgagctcaccatcacggcggacgaggcagctcctgatggtccacctcaggaagttcacctggagcctatatcatctcagagcatcagggtcacatggaaggctcccaagaaacatttgcaaaatgggattatccgtggctaccaaataggttaccgagagtacagcactgggggtaacttccaattcaacattatcagtgtcgacaccagcggggacagtgaggtttacaccctggacaacctgaataagttcactcagtacggcctggtggtgcaggcctgtaaccgggccggcacggggccttcttctcaggaaatcatcaccaccactctcgaggatgtgcccagttacccccccgaaaatgtccaagccatagcaacatcaccagaaagcatatcaatatcctggtccacactttccaaggaagccttgaatggaattctccaggggttcagagtcatttactgggccaacctcatggacggagagctgggtgagattaaaaacatcaccaccacacagccttcactggagctggacgggctggaaaagtacaccaactacagcatccaggtgctggccttcacccgcgcaggagacggggtcaggagtgagcagatcttcacccggaccaaagaggatgttccaggtcctcccgcgggtgtgaaggcagcggcggcctcagcctccatggtctttgtgtcctggcttccccctctcaagctgaacggcatcatccgaaagtacactgtattctgctcccacccctatcccacagtgatcagcgagtttgaggcctctcccgactcgttttcctacagaattcccaacctgagtaggaatcgtcagtacagcgtctgggtggtggctgttacttcagccggaagaggcaacagcagtgaaatcatcacagtcgagccactagcaaaagctcctgcacgaatcctgaccttcagtgggacagtgactactccatggatgaaagacattgtcttgccttgtaaggctgttggggacccttctcctgcagtcaaatggatgaaagacagtaacgggacacccagtctagtaacgattgatgggcggaggagcatctttagcaacggaagcttcattattcgcacggtgaaagcagaagactccggctattacagctgcattgccaataacaactggggatctgatgaaattattttaaacttacaagtacaagttccaccagatcagcctcggcttacagtctccaagaccacgtcttcctccatcaccctttcttggctccctggagacaacgggggcagctctatcagaggatacatactgcagtactccgaggacaatagtgagcagtgggggagttttccaatcagccccagcgaacgttcctatcgcttggaaaatctcaaatgtgggacttggtataagttcacactgacagcccaaaatggagtgggcccagggcgcataagtgaaatcatagaagcaaagaccttaggaaaagagccccagttctcaaaggagcaggagctgtttgccagcatcaacaccacacgcgtgaggctgaacctcattggctggaatgatggcggctgccccatcacctccttcacactagagtacaggccctttgggaccacagtttggaccacagctcagaggacctctctctccaagtcctacatcctgtatgacctgcaggaagccacctggtatgagctgcagatgcgggtgtgcaacagtgcgggctgcgcggagaagcaggccaacttcgctacgctgaactacgatggcaatgcaaagagtttagctgaaatgctcatgagtaagaatacccggacttcagatacgttaagcaagcaacagcagaccctgcgaatgcacatcgacatacccagggctcagcttttgattgaagagagagacacgatggagaccattgatgatcgctccacggttctgttgacggatgctgactttggagaggcagctaagcagaagtccctgacggtcactcacacggtccattaccaatcggtgtctcaggccactgggcccttagtggatgtttcagacgctcggccgggaacgaatcccaccaccaggaggaatgccaaggctgggcccacagcgagaaaccgctatgccagccagtggaccctcaaccgaccccaccccaccatctcagcacacaccctcaccacagactggaggctgccaacacccagggctgcaggatcagtagacaaagagagcgacagttacagcgtcagcccctcgcaagacacagatcgagcaagaagcagcatggtctccacagaaagtgcctcctccacttacgaagaactggccagggcctacgaacacgccaagatggaagagcaactgaggcacgccaagttcaccatcacggagtgcttcatatcagacacgtcatcggagcagttgacggcagggacaaatgagtacacggacagtctgacctccagcaccccttccgaatcgggaatctgcaggttcactgcatctccccccaaacctcaggatggaggaagagtaatgaatatggcagttccaaaggcacatcggccaggtgacctcatacatttgcctccataccttagaatggactttttgttaaaccgaggtggtccaggcaccagcagggacctgagcttaggacaagcatgcttggaacctcagaaaagccggaccctgaagcgccccacggtcctggagcccatcccgatggaagccgcctcctccgcctcctccacgagagaaggacagtcgtggcagccgggggccgtggccacattacctcagcgggagggagcagagctgggacaggcagctaaaatgagcagctcccaagaatcactgctcgactcccggggccatttgaaaggaaacaatccttacgcaaaatcttacaccctggtataacagacagcatgactggacagcggttgtaaatacaattcaaacaattcaatcaaagctaccttttttttacggaattccaatatttataattaaagaaaattgccaaaatatatt

SEQ ID NO: 307714 - DNA, 7141 bp, Homo sapiens
agggaaggttggcagagggatccatgtgactgaggccggagcacggcaaagatgagcctgcccgcccgcctgctgcctggatgcggagggtgagggctggcgcacgggaggccgctggctgcgcattctgggcgccgagtgcccgggatgagctcacgcccgcgtctgcggctctctccacctgccgacctgccgggggcccactgagctgacggcgcacctgggctccggccgcagcgtggggcgcggcgcccgggagcaggtgtgcaggagcgcagcgcgcggcgagcgcagccctcgctccggagcccggccgcgccgcgtgcccgggcggctaggcagcggcggcggcggcggcgggcggcgggcgggcggcggcccccgggcaggtgccgagcggcgagcggagccgggccgggcggagcgcggggggcgaggccggcgcgtcgctcgcgggaggccggggagcggcaggggcatgtggatactggctctctccttgttccagagcttcgcgaatgttttcagtgaagacctacactccagcctctactttgtcaatgcatctctgcaagaggtagtgtttgccagcaccacggggactctggtgccctgccccgcagcaggcatccctcctgtgactctcagatggtacctagccacgggcgaggagatctacgatgtccccgggatccgccacgtccaccccaacggcactctccaaattttccccttccctccttcaagcttcagtaccttaatccatgataatacttattattgcacagctgaaaatccttcagggaaaattagaagtcaggatgtccacatcaaggctgttttacgggagccctatacagtccgtgtggaggaccagaaaaccatgagaggcaatgttgcggtcttcaagtgcattatcccctcctcggtggaggcgtacatcactgtcgtctcatgggagaaagacactgtttcacttgtctcaggatctagatttctcatcacatccacgggagccttgtatattaaagatgtacagaatgaagatggattgtataactaccgctgcatcacgcggcatcgatacaccggagagacgaggcagagcaacagcgccagactttttgtatcagacccagcgaactcagccccatccatactggatgggtttgaccatcgcaaagccatggctgggcagcgtgtggagctgccttgcaaagcgctcgggcaccctgagccagattaccgctggctgaaggacaacatgcccctggaactttcagggaggttccagaagaccgtgacggggctgctcattgagaacattcgcccctcggactcaggcagctatgtttgtgaagtgtccaacagatacggaactgctaaggtgataggccgcctgtacgtgaaacagccactgaaagccaccatcagtcccaggaaggttaaaagcagcgtgggtagccaagtttccttgtcctgcagcgtgacaggaactgaggaccaggaactctcctggtaccgcaatggtgaaatcctcaaccctggaaaaaatgtgaggatcacagggatcaaccacgaaaaccttataatggatcacatggtcaaaagtgacgggggcgcataccagtgctttgtgcgcaaggacaagctgtccgctcaagactatgtgcaggtggtccttgaagatggaactcccaaaattatttctgcctttagtgaaaaggtggtgagtccagcagagccggtttcccttatgtgcaacgtgaagggaacacctttgcccacgatcacgtggaccctggacgatgacccgattctcaagggtggcagtcaccgcatcagccagatgatcacgtcggaggggaacgtggtcagctacctgaacatctccagctcccaggtccgggacgggggagtctaccgctgcactgccaacaactcggcgggagtcgtcctgtaccaggctcgaataaacgtaagagggcctgcaagcattcgaccaatgaaaaacatcacagcaatagcaggacgggacacatacattcactgtcgtgtgattggctatccgtattactccattaaatggtacaagaactctaacctgcttcctttcaaccaccgccaagtggcatttgagaacaatggaactcttaaactttcagatgtgcaaaaggaagtggacgagggggagtacacgtgcaacgtgttggttcaaccacaactctccaccagccagagcgtccacgtgaccgtgaaagttccgcctttcatacaaccctttgagtttccaagattctccattgggcagcgggtcttcatcccctgtgttgtggtctcaggggacttacccatcacgatcacctggcagaaggatggccggccaatccctgggagccttggggtgaccattgacaatattgacttcacgagctccttgaggatttccaatctctcgctcatgcacaatgggaattacacctgcatagcccggaatgaggccgccgctgtggagcaccaaagccagttgattgtcagagttcctcccaagtttgtggttcagccacgggaccaggacgggatttatggcaaagcagtcatcctcaattgttctgctgagggttaccctgtacctaccatcgtgtggaaattctctaaaggtgctggggttccccagttccagccaattgccctaaatggccgaatccaagttctcagcaatgggtcgttgctgatcaagcatgtcgtggaggaagacagtggctactacctctgcaaggtcagcaacgatgtgggcgcagacgtcagcaagtccatgtacctcacggttaaaattcctgcgatgataacatcctatccaaatactaccctggccacgcaggggcagaaaaaggagatgagctgcacggcgcatggtgagaagcccattatagtccgctgggagaaggaggaccgaatcattaaccctgagatggcccgttatcttgtgtccaccaaggaggtgggagaagaggtgatttctactctgcagattttgccaactgtgagagaagattctggtttcttttcctgccatgctattaattcttatggggaggaccgtggaataattcagctcacagtgcaagagcccccagaccctcccgaaattgagatcaaagatgtcaaagcacgcacaattacgctcaggtggaccatggggtttgatggaaacagtcccatcacaggctacgatattgaatgcaaaaataaatcagactcctgggattctgctcagagaaccaaagatgtttcccctcagctgaactcggccaccatcattgatatccacccttcctccacctacagcatccgcatgtacgccaagaaccggattggcaagagcgagcccagcaacgagctcaccatcacggcggacgaggcagctcctgatggtccacctcaggaagttcacctggagcctatatcatctcagagcatcagggtcacatggaaggctcccaagaaacatttgcaaaatgggattatccgtggctaccaaataggttaccgagagtacagcactgggggtaacttccaattcaacattatcagtgtcgacaccagcggggacagtgaggtttacaccctggacaacctgaataagttcactcagtacggcctggtggtgcaggcctgtaaccgggccggcacggggccttcttctcaggaaatcatcaccaccactctcgaggatgtgcccagttacccccccgaaaatgtccaagccatagcaacatcaccagaaagcatatcaatatcctggtccacactttccaaggaagccttgaatggaattctccaggggttcagagtcatttactgggccaacctcatggacggagagctgggtgagattaaaaacatcaccaccacacagccttcactggagctggacgggctggaaaagtacaccaactacagcatccaggtgctggccttcacccgcgcaggagacggggtcaggagtgagcagatcttcacccggaccaaagaggatgttccaggtcctcccgcgggtgtgaaggcagcggcggcctcagcctccatggtctttgtgtcctggcttccccctctcaagctgaacggcatcatccgaaagtacactgtattctgctcccacccctatcccacagtgatcagcgagtttgaggcctctcccgactcgttttcctacagaattcccaacctgagtaggaatcgtcagtacagcgtctgggtggtggctgttacttcagccggaagaggcaacagcagtgaaatcatcacagtcgagccactagcaaaagctcctgcacgaatcctgaccttcagtgggacagtgactactccatggatgaaagacattgtcttgccttgtaaggctgttggggacccttctcctgcagtcaaatggatgaaagacagtaacgggacacccagtctagtaacgattgatgggcggaggagcatctttagcaacggaagcttcattattcgcacggtgaaagcagaagactccggctattacagctgcattgccaataacaactggggatctgatgaaattattttaaacttacaagtacaagttccaccagatcagcctcggcttacagtctccaagaccacgtcttcctccatcaccctttcttggctccctggagacaacgggggcagctctatcagaggatacatactgcagtactccgaggacaatagtgagcagtgggggagttttccaatcagccccagcgaacgttcctatcgcttggaaaatctcaaatgtgggacttggtataagttcacactgacagcccaaaatggagtgggcccagggcgcataagtgaaatcatagaagcaaagaccttaggaaaagagccccagttctcaaaggagcaggagctgtttgccagcatcaacaccacacgcgtgaggctgaacctcattggctggaatgatggcggctgccccatcacctccttcacactagagtacaggccctttgggaccacagtttggaccacagctcagaggacctctctctccaagtcctacatcctgtatgacctgcaggaagccacctggtatgagctgcagatgcgggtgtgcaacagtgcgggctgcgcggagaagcaggccaacttcgctacgctgaactacgatggcagtacaattcctccactcattaagtcagttgtccaaaacgaagaagggctgacgaccaacgaggggctcaagatgctggtgaccatctcctgtatcctggtgggggtcttgctgctgtttgtgctcctgctggttgtgcggaggaggcggcgggagcagaggctaaagaggctgcgagatgcaaagagtttagctgaaatgctcatgagtaagaatacccggacttcagatacgttaagcaagcaacagcagaccctgcgaatgcacatcgacatacccagggctcagcttttgattgaagagagagacacgatggagaccattgatgatcgctccacggttctgttgacggatgctgactttggagaggcagctaagcagaagtccctgacggtcactcacacggtccattaccaatcggtgtctcaggccactgggcccttagtggatgtttcagacgctcggccgggaacgaatcccaccaccaggaggaatgccaaggctgggcccacagcgagaaaccgctatgccagccagtggaccctcaaccgaccccaccccaccatctcagcacacaccctcaccacagactggaggctgccaacacccagggctgcaggatcagtagacaaagagagcgacagttacagcgtcagcccctcgcaagacacagatcgagcaagaagcagcatggtctccacagaaagtgcctcctccacttacgaagaactggccagggcctacgaacacgccaagatggaagagcaactgaggcacgccaagttcaccatcacggagtgcttcatatcagacacgtcatcggagcagttgacggcagggacaaatgagtacacggacagtctgacctccagcaccccttccgaatcgggaatctgcaggttcactgcatctccccccaaacctcaggatggaggaagagtaatgaatatggcagttccaaaggcacatcggccaggtgacctcatacatttgcctccataccttagaatggactttttgttaaaccgaggtggtccaggcaccagcagggacctgagcttaggacaagcatgcttggaacctcagaaaagccggaccctgaagcgccccacggtcctggagcccatcccgatggaagccgcctcctccgcctcctccacgagagaaggacagtcgtggcagccgggggccgtggccacattacctcagcgggagggagcagagctgggacaggcagctaaaatgagcagctcccaagaatcactgctcgactcccggggccatttgaaaggaaacaatccttacgcaaaatcttacaccctggtataacagacagcatgactggacagcggttgtaaatacaattcaaacaattcaatcaaagctaccttttttttacggaattccaatatttataattaaagaaaattgccaaaatatattaaaaaaaaaaaagagaaaatactgaaaccacagacagtgcaaagactctcctgctttttttctgtctgagtgtgagctccatccgcctgggcatctgattttttgggaaagaagtccagttttatgatcttcacaggctattgcatttttactgattttctacaaaagtgcatgggggggattaattaaaccttctgactggaagttctatcacacaagaggcaagaaagaaaacagggtgggtgggaaatcagcctatttgtgaatttaaaaggaacaccgatttgcgggcaggggaaaacttcagtcacgtttgcacacctttctttcccattagaaaccgggttctcaatttggtcttcttttgttgttaattaggatgagtgccgtcagtgaaggggtggggggaatcaatttggttttctctcttgtttcttttttaatttaatgagacactctttgcattttgtctaagcgaaataaaaaagaaaaggttgtctgcctttattt

SEQ ID NO: 307715 - DNA, 5969 bp, Homo sapiens
agggaaggttggcagagggatccatgtgactgaggccggagcacggcaaagatgagcctgcccgcccgcctgctgcctggatgcggagggtgagggctggcgcacgggaggccgctggctgcgcattctgggcgccgagtgcccgggatgagctcacgcccgcgtctgcggctctctccacctgccgacctgccgggggcccactgagctgacggcgcacctgggctccggccgcagcgtggggcgcggcgcccgggagcaggtgtgcaggagcgcagcgcgcggcgagcgcagccctcgctccggagcccggccgcgccgcgtgcccgggcggctaggcagcggcggcggcggcggcgggcggcgggcgggcggcggcccccgggcaggtgccgagcggcgagcggagccgggccgggcggagcgcggggggcgaggccggcgcgtcgctcgcgggaggccggggagcggcaggggcatgtggatactggctctctccttgttccagagcttcgcgaatgttttcagtgaagacctacactccagcctctactttgtcaatgcatctctgcaagaggtagtgtttgccagcaccacggggactctggtgccctgccccgcagcaggcatccctcctgtgactctcagatggtacctagccacgggcgaggagatctacgatgtccccgggatccgccacgtccaccccaacggcactctccaaattttccccttccctccttcaagcttcagtaccttaatccatgataatacttattattgcacagctgaaaatccttcagggaaaattagaagtcaggatgtccacatcaaggctgttttacgggagccctatacagtccgtgtggaggaccagaaaaccatgagaggcaatgttgcggtcttcaagtgcattatcccctcctcggtggaggcgtacatcactgtcgtctcatgggagaaagacactgtttcacttgtctcaggatctagatttctcatcacatccacgggagccttgtatattaaagatgtacagaatgaagatggattgtataactaccgctgcatcacgcggcatcgatacaccggagagacgaggcagagcaacagcgccagactttttgtatcagacccagcgaactcagccccatccatactggatgggtttgaccatcgcaaagccatggctgggcagcgtgtggagctgccttgcaaagcgctcgggcaccctgagccagattaccgctggctgaaggacaacatgcccctggaactttcagggaggttccagaagaccgtgacggggctgctcattgagaacattcgcccctcggactcaggcagctatgtttgtgaagtgtccaacagatacggaactgctaaggtgataggccgcctgtacgtgaaacagccactgaaagccaccatcagtcccaggaaggttaaaagcagcgtgggtagccaagtttccttgtcctgcagcgtgacaggaactgaggaccaggaactctcctggtaccgcaatggtgaaatcctcaaccctggaaaaaatgtgaggatcacagggatcaaccacgaaaaccttataatggatcacatggtcaaaagtgacgggggcgcataccagtgctttgtgcgcaaggacaagctgtccgctcaagactatgtgcaggtggtccttgaagatggaactcccaaaattatttctgcctttagtgaaaaggtggtgagtccagcagagccggtttcccttatgtgcaacgtgaagggaacacctttgcccacgatcacgtggaccctggacgatgacccgattctcaagggtggcagtcaccgcatcagccagatgatcacgtcggaggggaacgtggtcagctacctgaacatctccagctcccaggtccgggacgggggagtctaccgctgcactgccaacaactcggcgggagtcgtcctgtaccaggctcgaataaacgtaagagggcctgcaagcattcgaccaatgaaaaacatcacagcaatagcaggacgggacacatacattcactgtcgtgtgattggctatccgtattactccattaaatggtacaagaactctaacctgcttcctttcaaccaccgccaagtggcatttgagaacaatggaactcttaaactttcagatgtgcaaaaggaagtggacgagggggagtacacgtgcaacgtgttggttcaaccacaactctccaccagccagagcgtccacgtgaccgtgaaagttccgcctttcatacaaccctttgagtttccaagattctccattgggcagcgggtcttcatcccctgtgttgtggtctcaggggacttacccatcacgatcacctggcagaaggatggccggccaatccctgggagccttggggtgaccattgacaatattgacttcacgagctccttgaggatttccaatctctcgctcatgcacaatgggaattacacctgcatagcccggaatgaggccgccgctgtggagcaccaaagccagttgattgtcagagttcctcccaagtttgtggttcagccacgggaccaggacgggatttatggcaaagcagtcatcctcaattgttctgctgagggttaccctgtacctaccatcgtgtggaaattctctaaaggtgctggggttccccagttccagccaattgccctaaatggccgaatccaagttctcagcaatgggtcgttgctgatcaagcatgtcgtggaggaagacagtggctactacctctgcaaggtcagcaacgatgtgggcgcagacgtcagcaagtccatgtacctcacggttaaaattcctgcgatgataacatcctatccaaatactaccctggccacgcaggggcagaaaaaggagatgagctgcacggcgcatggtgagaagcccattatagtccgctgggagaaggaggaccgaatcattaaccctgagatggcccgttatcttgtgtccaccaaggaggtgggagaagaggtgatttctactctgcagattttgccaactgtgagagaagattctggtttcttttcctgccatgctattaattcttatggggaggaccgtggaataattcagctcacagtgcaagagcccccagaccctcccgaaattgagatcaaagatgtcaaagcacgcacaattacgctcaggtggaccatggggtttgatggaaacagtcccatcacaggctacgatattgaatgcaaaaataaatcagactcctgggattctgctcagagaaccaaagatgtttcccctcagctgaactcggccaccatcattgatatccacccttcctccacctacagcatccgcatgtacgccaagaaccggattggcaagagcgagcccagcaacgagctcaccatcacggcggacgaggcagctcctgatggtccacctcaggaagttcacctggagcctatatcatctcagagcatcagggtcacatggaaggctcccaagaaacatttgcaaaatgggattatccgtggctaccaaataggttaccgagagtacagcactgggggtaacttccaattcaacattatcagtgtcgacaccagcggggacagtgaggtttacaccctggacaacctgaataagttcactcagtacggcctggtggtgcaggcctgtaaccgggccggcacggggccttcttctcaggaaatcatcaccaccactctcgaggatgtgcccagttacccccccgaaaatgtccaagccatagcaacatcaccagaaagcatatcaatatcctggtccacactttccaaggaagccttgaatggaattctccaggggttcagagtcatttactgggccaacctcatggacggagagctgggtgagattaaaaacatcaccaccacacagccttcactggagctggacgggctggaaaagtacaccaactacagcatccaggtgctggccttcacccgcgcaggagacggggtcaggagtgagcagatcttcacccggaccaaagaggatgttccaggtcctcccgcgggtgtgaaggcagcggcggcctcagcctccatggtctttgtgtcctggcttccccctctcaagctgaacggcatcatccgaaagtacactgtattctgctcccacccctatcccacagtgatcagcgagtttgaggcctctcccgactcgttttcctacagaattcccaacctgagtaggaatcgtcagtacagcgtctgggtggtggctgttacttcagccggaagaggcaacagcagtgaaatcatcacagtcgagccactagcaaaagctcctgcacgaatcctgaccttcagtgggacagtgactactccatggatgaaagacattgtcttgccttgtaaggctgttggggacccttctcctgcagtcaaatggatgaaagacagtaacgggacacccagtctagtaacgattgatgggcggaggagcatctttagcaacggaagcttcattattcgcacggtgaaagcagaagactccggctattacagctgcattgccaataacaactggggatctgatgaaattattttaaacttacaagtacaagttccaccagatcagcctcggcttacagtctccaagaccacgtcttcctccatcaccctttcttggctccctggagacaacgggggcagctctatcagaggatacatactgcagtactccgaggacaatagtgagcagtgggggagttttccaatcagccccagcgaacgttcctatcgcttggaaaatctcaaatgtgggacttggtataagttcacactgacagcccaaaatggagtgggcccagggcgcataagtgaaatcatagaagcaaagaccttaggaaaagagccccagttctcaaaggagcaggagctgtttgccagcatcaacaccacacgcgtgaggctgaacctcattggctggaatgatggcggctgccccatcacctccttcacactagagtacaggccctttgggaccacagtttggaccacagctcagaggacctctctctccaagtcctacatcctgtatgacctgcaggaagccacctggtatgagctgcagatgcgggtgtgcaacagtgcgggctgcgcggagaagcaggccaacttcgctacgctgaactacgatggcagtacaattcctccactcattaagtcagttgtccaaaacgaagaagggctgacgaccaacgaggggctcaagatgctggtgaccatctcctgtatcctggtgggggtcttgctgctgtttgtgctcctgctggttgtgcggaggaggcggcgggagcagaggctaaagaggctgcgagatgcaaagagtttagctgaaatgctcatgagtaagaatacccggacttcagatacgttaagcaagcaacagcagaccctgcgaatgcacatcgacatacccagggctcagcttttgattgaagagagagacacgatggagaccattgatgatcgctccacggttctgttgacggatgctgactttggagaggcagctaagcagaagtccctgacggtcactcacacggtccattaccaatcggtgtctcaggccactgggcccttagtggatgtttcagacgctcggccgggaacgaatcccaccaccaggaggaatgccaaggctgggcccacagcgagaaaccgctatgccagccagtggaccctcaaccgaccccaccccaccatctcagcacacaccctcaccacagactggaggctgccaacacccagggctgcaggatcagtagacaaagagagcgacagttacagcgtcagcccctcgcaagacacagaatgaagcgtaatgggacgtggatcgtgatcctcgtgtgtccgtcaatctgatagcagtgaccttgccagaagtttttcattagcattgcgtctccagggaagaacgg

SEQ ID NO: 307716 - DNA, 3630 bp, Homo sapiens
agcggcggcaggtctgaacgcttcggtaggataagtgcggtgggagggggctctgcggttttggggagcccagggcgggaacccggacccggctggaagtccggagcctggccgcagccccgcccctccgctctttcttggtgaccttaagccagtggctgcctttttctgagcccgggcggggccgaaggcggcccgtaggccctcgggactcccagcactgcagagggtgtgaggtctgacatccaagacacgttgtttcgtatttctgaaggaagaactcaagctccgggaagtgatggctggggatggggcgggcaacttggggaccgagtgtacgatccacgcctaaggttgagggcggccgagctagccaggcagccgtgaccccagtgcttttcagacgtttcttagcttccagagcccaacacatacagctgatacacgcagaccagatctggtcaggtcctcggaagctgagtccagagcgatgctgctgaagacagtgctcttgctgggacatgtggcccaggtgctgatgctggacaatgggctcctgcagacaccacccatgggctggctggcctgggaacgcttccgctgcaacattaactgtgatgaggacccaaagaactgcataagtgaacagctcttcatggagatggctgaccggatggcacaggatggatggcgggacatgggctacacatacctcaacattgatgactgctggatcggtggtcgcgatgccagtggccgcctgatgccagatcccaagcgcttccctcatggcattcctttcctggctgactacgttcactccctgggcctgaagttgggtatctacgcggacatgggcaacttcacctgcatgggttacccaggcaccacactggacaaggtggtccaggatgctcagaccttcgccgagtggaaggtagacatgctcaagctggatggctgcttctccacccccgaggagcgggcccaggggtaccccaagatggctgctgccctgaatgccacaggccgccccatcgccttctcctgcagctggccagcctatgaaggcggcctccccccaagggtgaactacagtctgctggcggacatctgcaacctctggcgtaactatgatgacatccaggactcctggtggagcgtgctctccatcctgaattggttcgtggagcaccaggacatactgcagccagtggccggccctgggcactggaatgaccctgacatgctgctcattgggaactttggtctcagcttagagcaatcccgggcccagatggccctgtggacggtgctggcagcccccctcttgatgtccacagacctgcgtaccatctccgcccagaacatggacattctgcagaatccactcatgatcaaaatcaaccaggatcccttaggcatccagggacgcaggattcacaaggaaaaatctctcatcgaagtgtacatgcggcctctgtccaacaaggctagcgccttagtcttcttcagctgcaggaccgatatgccttatcgctaccactcctcccttggccagctgaacttcaccgggtctgtgatatatgaggcccaggacgtctactcaggtgacatcatcagtggcctccgagatgaaaccaacttcacagtgatcatcaacccttcaggggtagtgatgtggtacctgtatcccatcaagaacctggagatgtcccagcagtgaggagctgggacatgtgacaggctgtggtggcaccactgagcctagaccatggagccttggcatgcccagggcaagtggggaggttctctgctccccaggcctgctcggtgactgaccccatcatacccaaagtgcaatctcacggccaggttctatgccctgtccaagcgtaaaccctcttggaaacttcttttggggcaattttcctgtggccttcctggcctctacttccatgtgcgcagccccacagacgttgctgagcaactcgccagcctcctgagctccatgcccatcaggactctagcctctgaccttgctgttgactctgaaatcaggatttggaagttttcgaattaggagtagagagatctgacctcttgccaggaatgcccatggatcatgtgattggcttttctacccatagagggccttgcagcctgataccacctgggagtgagggtcacaaaggagaccttggctccctcaggtcaccaataaacctgttctttaatcaagtagttgtaatatggacctggggtacctttagttagggactctggtggcactacacggggtgctggattcaaatctcacctctatggatgatgtctggcatcgtctggcccctccttttccaaagtgaccagaagattgtacttcctagagatgccagacttgcctcacacccaggagctgcccctgctgtgcctggtatgctggcagtggtgatggtgacaacacaatgaggccaagtagcaatgctcccaggtcctgcagcttgtgctctgcccagcagtgcccctggcccagcacctcagcctgctcttctctctggtggctccaccccaacccctacttcttttcctttatttctctcccaacctggctgcaaaggaggttcatattccccagatgtgtccacaaacctgtccaggagttgtgtcttaaaattgatttcctgtccctcttcctaaggacaggggtaacagtcaaagtgaaggaatgatgggttcttgcctgtcttgctttggtccgtatttcccaagccctcctcttttagccaaggctacagggcacttgtcttccctggtggctctcccctttggagagagctagtggcagagcaacctagctaggtcctccttgggctttgaatgcaggagcacccagtgccccaggccttgcactgtgctgcccaaggagtattttctgggtggatctcccatactcctcagggttctgaggtccttgtatttagggtatggtgtaaaaacttacatatgcacattttgttacatcatttaagatgattgaagctttactggttaagtacagggtcaccagagaaagttcctttccccagttgatgtcttgaggctgttgagaaacttaggacagaagcctacctcatcccaggcctgcccctccgtgcatagctctgcctttgggtcttgttcatagtgctgttcaggcaaaatggaatagtctcaggtgggaacaccttctcttgctagctccaggaaggctttgtgggaaatgagttgagaccatggacttgggagttgggggccagagttgagcctggacttgaccaattaattcccttacctttcagcccaagatagctacatgtctttacttgctgtataagttttccttttgtcctgggggtgcctgattgatcctatctcttcacccttcattctttcaacaaacatgccatctatctcccaggacatttattcccttctattcaaggccagttaggaatgcaattattttttttttcagttaaatacagacttgtttggacgcaaggtaccctttctctttttaaaaactttttatcatgaaaactttcaaatacaaaaataaaatggtagagtgaacctccatgtacccag

SEQ ID NO: 307717 - DNA, 2240 bp, Homo sapiens
agcggcggcaggtctgaacgcttcggtaggataagtgcggtgggagggggctctgcggttttggggagcccagggcgggaacccggacccggctggaagtccggagcctggccgcagccccgcccctccgctctttcttggtgaccttaagccagtggctgcctttttctgagcccgggcggggccgaaggcggcccgtaggccctcgggactcccagcactgcagagggtgtgaggtctgacatccaagacacgttgtttcgtatttctgaaggaagaactcaagctccgggaagtgatggctggggatggggcgggcaacttggggaccgagtgtacgatccacgcctaaggttgagggcggccgagctagccaggcagccgtgaccccagtgcttttcagacgtttcttagcttccagagcccaacacatacagctgatacacgcagaccagatctggtcaggtcctcggaagctgagtccagagcgatgctgctgaagacagtgctcttgctgggacatgtggcccaggtgctgatgctggacaatgggctcctgcagacaccacccatgggctggctggcctgggaacgcttccgctgcaacattaactgtgatgaggacccaaagaactgcataagtgaacagctcttcatggagatggctgaccggatggcacaggatggatggcgggacatgggctacacatacctcaacattgatgactgctggatcggtggtcgcgatgccagtggccgcctgatgccagatcccaagcgcttccctcatggcattcctttcctggctgactacgttcactccctgggcctgaagttgggtatctacgcggacatgggcaacttcacctgcatgggttacccaggcaccacactggacaaggtggtccaggatgctcagaccttcgccgagtggaaggtagacatgctcaagctggatggctgcttctccacccccgaggagcgggcccaggggtaccccaagatggctgctgccctgaatgccacaggccgccccatcgccttctcctgcagctggccagcctatgaaggcggcctccccccaagggtgaactacagtctgctggcggacatctgcaacctctggcgtaactatgatgacatccaggactcctggtggagcgtgctctccatcctgaattggttcgtggagcaccaggacatactgcagccagtggccggccctgggcactggaatgaccctgacatgctgctcattgggaactttggtctcagcttagagcaatcccgggcccagatggccctgtggacggtgctggcagcccccctcttgatgtccacagacctgcgtaccatctccgcccagaacatggacattctgcagaatccactcatgatcaaaatcaaccaggatcccttaggcatccagggacgcaggattcacaaggaaaaatctctcatcgaagtgtacatgcggcctctgtccaacaaggctagcgccttagtcttcttcagctgcaggaccgatatgccttatcgctaccactcctcccttggccagctgaacttcaccgggtctgtgatatatgaggcccaggacgtctactcaggtgacatcatcagtggcctccgagatgaaaccaacttcacagtgatcatcaacccttcaggggtagtgatgtggtacctgtatcccatcaagaacctggagatgtcccagcagtgaggagctgggacatgtgacaggctgtggtggcaccactgagcctagaccatggagccttggcatgcccagggcaagtggggaggttctctgctccccaggcctgctcggtgactgaccccatcatacccaaagtgcaatctcacggccaggttctatgccctgtccaagcgtaaaccctcttggaaacttcttttggggcaattttcctgtggccttcctggcctctacttccatgtgcgcagccccacagacgttgctgagcaactcgccagcctcctgagctccatgcccatcaggactctagcctctgaccttgctgttgactctgaaatcaggatttggaagttttcgaattaggagtagagagatctgacctcttgccaggaatgcccatggatcatgtgattggcttttctacccatagagggccttgcagcctgataccacctgggagtgagggtcacaaaggagaccttggctccctcaggtcaccaataaacctgttctttaatca

SEQ ID NO: 307718 - DNA, 4095 bp, Homo sapiens
agcggcggcaggtctgaacgcttcggtaggataagtgcggtgggagggggctctgcggttttggggagcccagggcgggaacccggacccggctggaagtccggagcctggccgcagccccgcccctccgctctttcttggtgaccttaagccagtggctgcctttttctgagcccgggcggggccgaaggcggcccgtaggccctcgggactcccagcactgcagagggtgtgaggtctgacatccaagacacgttgtttcgtatttctgaaggaagaactcaagctccgggaagtgatggctggggatggggcgggcaacttggggaccgagtgtacgatccacgcctaaggttgagggcggccgagctagccaggcagccgtgaccccagtgcttttcagacgtttcttagcttccagagcccaacacatacagctgatacacgcagaccagatctggtcaggtcctcggaagctgagtccagagcgatgctgctgaagacagtgctcttgctgggacatgtggcccaggtgctgatgctggacaatgggctcctgcagacaccacccatgggctggctggcctgggaacgcttccgctgcaacattaactgtgatgaggacccaaagaactgcataagtgaacagctcttcatggagatggctgaccggatggcacaggatggatggcgggacatgggctacacatacctcaacattgatgactgctggatcggtggtcgcgatgccagtggccgcctgatgccagatcccaagcgcttccctcatggcattcctttcctggctgactacgttcactccctgggcctgaagttgggtatctacgcggacatgggcaacttcacctgcatgggttacccaggcaccacactggacaaggtggtccaggatgctcagaccttcgccgagtggaaggtagacatgctcaagctggatggctgcttctccacccccgaggagcgggcccaggggtaccccaagatggctgctgccctgaatgccacaggccgccccatcgccttctcctgcagctggccagcctatgaaggcggcctccccccaagggtgaactacagtctgctggcggacatctgcaacctctggcgtaactatgatgacatccaggactcctggtggagcgtgctctccatcctgaattggttcgtggagcaccaggacatactgcagccagtggccggccctgggcactggaatgaccctgacatgctgctcattgggaactttggtctcagcttagagcaatcccgggcccagatggccctgtggacggtgctggcagcccccctcttgatgtccacagacctgcgtaccatctccgcccagaacatggacattctgcagaatccactcatgatcaaaatcaaccaggatcccttaggcatccagggacgcaggattcacaaggaaaaatctctcatcgaagtgtacatgcggcctctgtccaacaaggctagcgccttagtcttcttcagctgcaggaccgatatgccttatcgctaccactcctcccttggccagctgaacttcaccgggtctgtgatatatgaggcccaggacgtctactcaggtgacatcatcagtggcctccgagatgaaaccaacttcacagtgatcatcaacccttcaggggtagtgatgtggtacctgtatcccatcaagaacctggagatgtcccagcagtgaggagctgggacatgtgacaggctgtggtggcaccactgagcctagaccatggagccttggcatgcccagggcaagtggggaggttctctgctccccaggcctgctcggtgactgaccccatcatacccaaagtgcaatctcacggccaggttctatgccctgtccaagcgtaaaccctcttggaaacttcttttggggcaattttcctgtggccttcctggcctctacttccatgtgcgcagccccacagacgttgctgagcaactcgccagcctcctgagctccatgcccatcaggactctagcctctgaccttgctgttgactctgaaatcaggatttggaagttttcgaattaggagtagagagatctgacctcttgccaggaatgcccatggatcatgtgattggcttttctacccatagagggccttgcagcctgataccacctgggagtgagggtcacaaaggagaccttggctccctcaggtcaccaataaacctgttctttaatcaagtagttgtaatatggacctggggtacctttagttagggactctggtggcactacacggggtgctggattcaaatctcacctctatggatgatgtctggcatcgtctggcccctccttttccaaagtgaccagaagattgtacttcctagagatgccagacttgcctcacacccaggagctgcccctgctgtgcctggtatgctggcagtggtgatggtgacaacacaatgaggccaagtagcaatgctcccaggtcctgcagcttgtgctctgcccagcagtgcccctggcccagcacctcagcctgctcttctctctggtggctccaccccaacccctacttcttttcctttatttctctcccaacctggctgcaaaggaggttcatattccccagatgtgtccacaaacctgtccaggagttgtgtcttaaaattgatttcctgtccctcttcctaaggacaggggtaacagtcaaagtgaaggaatgatgggttcttgcctgtcttgctttggtccgtatttcccaagccctcctcttttagccaaggctacagggcacttgtcttccctggtggctctcccctttggagagagctagtggcagagcaacctagctaggtcctccttgggctttgaatgcaggagcacccagtgccccaggccttgcactgtgctgcccaaggagtattttctgggtggatctcccatactcctcagggttctgaggtccttgtatttagggtatggtgtaaaaacttacatatgcacattttgttacatcatttaagatgattgaagctttactggttaagtacagggtcaccagagaaagttcctttccccagttgatgtcttgaggctgttgagaaacttaggacagaagcctacctcatcccaggcctgcccctccgtgcatagctctgcctttgggtcttgttcatagtgctgttcaggcaaaatggaatagtctcaggtgggaacaccttctcttgctagctccaggaaggctttgtgggaaatgagttgagaccatggacttgggagttgggggccagagttgagcctggacttgaccaattaattcccttacctttcagcccaagatagctacatgtctttacttgctgtataagttttccttttgtcctgggggtgcctgattgatcctatctcttcacccttcattctttcaacaaacatgccatctatctcccaggacatttattcccttctattcaaggccagttaggaatgcaattattttttttttcagttaaatacagacttgtttggacgcaaggtaccctttctctttttaaaaactttttatcatgaaaactttcaaatacaaaaataaaatggtagagtgaacctccatgtacccagcatccagctccagtaaccatcaacgtgtaccattatttcatctctcttcctgcacatgctcttctgatgtgtgagctagagtatctgaaaggaaatttcagaaaaccctaaaaaccactatgtctctaacagataagggctttaaaaatacatatatgagccgggcgcggtgactcatgcctgtaatcccagcactttgggaggctgaggtaggcggatcacaaggtcaggagattgagaccatcctggctaacacggtgaaaccccatctctattaaaaatacaaaaaattagccgggcatggtggtgggcgcctgtagtcccagccactcgggaggctgaggcaggagaacagcgtgatcctgggaggcggaggttgcagtgagccgagatggcaccaccatactccagcctgggtgacagagccagactccatctcaaaaaaaaaaaaaaaaaaaaaaaaaa

SEQ ID NO: 307719 - DNA, 3872 bp, Homo sapiens
agcggcggcaggtctgaacgcttcggtaggataagtgcggtgggagggggctctgcggttttggggagcccagggcgggaacccggacccggctggaagtccggagcctggccgcagccccgcccctccgctctttcttggtgaccttaagccagtggctgcctttttctgagcccgggcggggccgaaggcggcccgtaggccctcgggactcccagcactgcagagggtgtgaggtctgacatccaagacacgttgtttcgtatttctgaaggaagaactcaagctccgggaagtgatggctggggatggggcgggcaacttggggaccgagtgtacgatccacgcctaaggttgagggcggccgagctagccaggcagccgtgaccccagtgcttttcagacgtttcttagcttccagagcccaacacatacagctgatacacgcagaccagatctggtcaggtcctcggaagctgagtccagagcgatgctgctgaagacagtgctcttgctgggacatgtggcccaggtgctgatgctggacaatgggctcctgcagacaccacccatgggctggctggcctgggaacgcttccgctgcaacattaactgtgatgaggacccaaagaactgcataagtgaacagctcttcatggagatggctgaccggatggcacaggatggatggcgggacatgggctacacatacctcaacattgatgactgctggatcggtggtcgcgatgccagtggccgcctgatgccagatcccaagcgcttccctcatggcattcctttcctggctgactacgttcactccctgggcctgaagttgggtatctacgcggacatgggcaacttcacctgcatgggttacccaggcaccacactggacaaggtggtccaggatgctcagaccttcgccgagtggaaggtagacatgctcaagctggatggctgcttctccacccccgaggagcgggcccaggggtaccccaagatggctgctgccctgaatgccacaggccgccccatcgccttctcctgcagctggccagcctatgaaggcggcctccccccaagggtgaactacagtctgctggcggacatctgcaacctctggcgtaactatgatgacatccaggactcctggtggagcgtgctctccatcctgaattggttcgtggagcaccaggacatactgcagccagtggccggccctgggcactggaatgaccctgacatgctgctcattgggaactttggtctcagcttagagcaatcccgggcccagatggccctgtggacggtgctggcagcccccctcttgatgtccacagacctgcgtaccatctccgcccagaacatggacattctgcagaatccactcatgatcaaaatcaaccaggatcccttaggcatccagggacgcaggattcacaaggaaaaatctctcatcgaagtgtacatgcggcctctgtccaacaaggctagcgccttagtcttcttcagctgcaggaccgatatgccttatcgctaccactcctcccttggccagctgaacttcaccgggtctgtgatatatgaggcccaggacgtctactcaggtgacatcatcagtggcctccgagatgaaaccaacttcacagtgatcatcaacccttcaggggtagtgatgtggtacctgtatcccatcaagaacctggagatgtcccagcagtgaggagctgggacatgtgacaggctgtggtggcaccactgagcctagaccatggagccttggcatgcccagggcaagtggggaggttctctgctccccaggcctgctcggtgactgaccccatcatacccaaagtgcaatctcacggccaggttctatgccctgtccaagcgtaaaccctcttggaaacttcttttggggcaattttcctgtggccttcctggcctctacttccatgtgcgcagccccacagacgttgctgagcaactcgccagcctcctgagctccatgcccatcaggactctagcctctgaccttgctgttgactctgaaatcaggatttggaagttttcgaattaggagtagagagatctgacctcttgccaggaatgcccatggatcatgtgattggcttttctacccatagagggccttgcagcctgataccacctgggagtgagggtcacaaaggagaccttggctccctcaggtcaccaataaacctgttctttaatcaagtagttgtaatatggacctggggtacctttagttagggactctggtggcactacacggggtgctggattcaaatctcacctctatggatgatgtctggcatcgtctggcccctccttttccaaagtgaccagaagattgtacttcctagagatgccagacttgcctcacacccaggagctgcccctgctgtgcctggtatgctggcagtggtgatggtgacaacacaatgaggccaagtagcaatgctcccaggtcctgcagcttgtgctctgcccagcagtgcccctggcccagcacctcagcctgctcttctctctggtggctccaccccaacccctacttcttttcctttatttctctcccaacctggctgcaaaggaggttcatattccccagatgtgtccacaaacctgtccaggagttgtgtcttaaaattgatttcctgtccctcttcctaaggacaggggtaacagtcaaagtgaaggaatgatgggttcttgcctgtcttgctttggtccgtatttcccaagccctcctcttttagccaaggctacagggcacttgtcttccctggtggctctcccctttggagagagctagtggcagagcaacctagctaggtcctccttgggctttgaatgcaggagcacccagtgccccaggccttgcactgtgctgcccaaggagtattttctgggtggatctcccatactcctcagggttctgaggtccttgtatttagggtatggtgtaaaaacttacatatgcacattttgttacatcatttaagatgattgaagctttactggttaagtacagggtcaccagagaaagttcctttccccagttgatgtcttgaggctgttgagaaacttaggacagaagcctacctcatcccaggcctgcccctccgtgcatagctctgcctttgggtcttgttcatagtgctgttcaggcaaaatggaatagtctcaggtgggaacaccttctcttgctagctccaggaaggctttgtgggaaatgagttgagaccatggacttgggagttgggggccagagttgagcctggacttgaccaattaattcccttacctttcagcccaagatagctacatgtctttacttgctgtataagttttccttttgtcctgggggtgcctgattgatcctatctcttcacccttcattctttcaacaaacatgccatctatctcccaggacatttattcccttctattcaaggccagttaggaatgcaattattttttttttcagttaaatacagacttgtttggacgcaaggtaccctttctctttttaaaaactttttatcatgaaaactttcaaatacaaaaataaaatggtagagtgaacctccatgtacccagaaaaaaaaaaaaaaaaaaaaaaaaaaaacaaaaaaaaaaaaaaaaaaccaaacaaaagacaagaaagaaccacaagaaaaaaaaaagagtcgggcgcccccgccagcagcgcagagaaagaggctccaacacacaacttggtggaggcgccggaccaccacactagtaaaaaacagcacgggcacagagcgtcacgcgagacgacccgggagaaagcagggcggggtccacccagaaacgcg

SEQ ID NO: 307720 - DNA, 2506 bp, Homo sapiens
agcggcggcaggtctgaacgcttcggtaggataagtgcggtgggagggggctctgcggttttggggagcccagggcgggaacccggacccggctggaagtccggagcctggccgcagccccgcccctccgctctttcttggtgaccttaagccagtggctgcctttttctgagcccgggcggggccgaaggcggcccgtaggccctcgggactcccagcactgcagagggtgtgaggtctgacatccaagacacgttgtttcgtatttctgaaggaagaactcaagctccgggaagtgatggctggggatggggcgggcaacttggggaccgagtgtacgatccacgcctaaggttgagggcggccgagctagccaggcagccgtgaccccagtgcttttcagacgtttcttagcttccagagcccaacacatacagctgatacacgcagaccagatctggtcaggtcctcggaagctgagtccagagcgatgctgctgaagacagtgctcttgctgggacatgtggcccaggtgctgatgctggacaatgggctcctgcagacaccacccatgggctggctggcctgggaacgcttccgctgcaacattaactgtgatgaggacccaaagaactgcataagtgaacagctcttcatggagatggctgaccggatggcacaggatggatggcgggacatgggctacacatacctcaacattgatgactgctggatcggtggtcgcgatgccagtggccgcctgatgccagatcccaagcgcttccctcatggcattcctttcctggctgactacccttcctggcctctacttccatgtgcgcagccccacagacgttgctgagcaactcgccagcctcctgagctccatgcccatcaggactctagcctctgaccttgctgttgactctgaaatcaggatttggaagttttcgaattaggagtagagagatctgacctcttgccaggaatgcccatggatcatgtgattggcttttctacccatagagggccttgcagcctgataccacctgggagtgagggtcacaaaggagaccttggctccctcaggtcaccaataaacctgttctttaatcaagtagttgtaatatggacctggggtacctttagttagggactctggtggcactacacggggtgctggattcaaatctcacctctatggatgatgtctggcatcgtctggcccctccttttccaaagtgaccagaagattgtacttcctagagatgccagacttgcctcacacccaggagctgcccctgctgtgcctggtatgctggcagtggtgatggtgacaacacaatgaggccaagtagcaatgctcccaggtcctgcagcttgtgctctgcccagcagtgcccctggcccagcacctcagcctgctcttctctctggtggctccaccccaacccctacttcttttcctttatttctctcccaacctggctgcaaaggaggttcatattccccagatgtgtccacaaacctgtccaggagttgtgtcttaaaattgatttcctgtccctcttcctaaggacaggggtaacagtcaaagtgaaggaatgatgggttcttgcctgtcttgctttggtccgtatttcccaagccctcctcttttagccaaggctacagggcacttgtcttccctggtggctctcccctttggagagagctagtggcagagcaacctagctaggtcctccttgggctttgaatgcaggagcacccagtgccccaggccttgcactgtgctgcccaaggagtattttctgggtggatctcccatactcctcagggttctgaggtccttgtatttagggtatggtgtaaaaacttacatatgcacattttgttacatcatttaagatgattgaagctttactggttaagtacagggtcaccagagaaagttcctttccccagttgatgtcttgaggctgttgagaaacttaggacagaagcctacctcatcccaggcctgcccctccgtgcatagctctgcctttgggtcttgttcatagtgctgttcaggcaaaatggaatagtctcaggtgggaacaccttctcttgctagctccaggaaggctttgtgggaaatgagttgagaccatggacttgggagttgggggccagagttgagcctggacttgaccaattaattcccttacctttcagcccaagatagctacatgtctttacttgctgtataagttttccttttgtcctgggggtgcctgattgatcctatctcttcacccttcattctttcaacaaacatgccatctatctcccaggacatttattcccttctattcaaggccagttaggaatgcaattattttttttttcagttaaatacagacttgtttggacgcaaggtaccctttctctttttaaaaactttttatcatgaaaactttcaaatacaaaaataaaatggtagagtgaacctccatgtacccag

SEQ ID NO: 307721 - DNA, 2334 bp, Homo sapiens
agcggcggcaggtctgaacgcttcggtaggataagtgcggtgggagggggctctgcggttttggggagcccagggcgggaacccggacccggctggaagtccggagcctggccgcagccccgcccctccgctctttcttggtgaccttaagccagtggctgcctttttctgagcccgggcggggccgaaggcggcccgtaggccctcgggactcccagcactgcagagggtgtgaggtctgacatccaagacacgttgtttcgtatttctgaaggaagaactcaagctccgggaagtgatggctggggatggggcgggcaacttggggaccgagtgtacgatccacgcctaaggttgagggcggccgagctagccaggcagccgtgaccccagtgcttttcagacgtttcttagcttccagagcccaacacatacagctgatacacgcagaccagatctggtcaggtcctcggaagctgagtccagagcgatgctgctgaagacagtgctcttgctgggacatgtggcccaggtgctgatgctggacaatgggctcctgcagacaccacccatgggctggctggcctgggaacgcttccgctgcaacattaactgtgatgaggacccaaagaactgcataagccttcctggcctctacttccatgtgcgcagccccacagacgttgctgagcaactcgccagcctcctgagctccatgcccatcaggactctagcctctgaccttgctgttgactctgaaatcaggatttggaagttttcgaattaggagtagagagatctgacctcttgccaggaatgcccatggatcatgtgattggcttttctacccatagagggccttgcagcctgataccacctgggagtgagggtcacaaaggagaccttggctccctcaggtcaccaataaacctgttctttaatcaagtagttgtaatatggacctggggtacctttagttagggactctggtggcactacacggggtgctggattcaaatctcacctctatggatgatgtctggcatcgtctggcccctccttttccaaagtgaccagaagattgtacttcctagagatgccagacttgcctcacacccaggagctgcccctgctgtgcctggtatgctggcagtggtgatggtgacaacacaatgaggccaagtagcaatgctcccaggtcctgcagcttgtgctctgcccagcagtgcccctggcccagcacctcagcctgctcttctctctggtggctccaccccaacccctacttcttttcctttatttctctcccaacctggctgcaaaggaggttcatattccccagatgtgtccacaaacctgtccaggagttgtgtcttaaaattgatttcctgtccctcttcctaaggacaggggtaacagtcaaagtgaaggaatgatgggttcttgcctgtcttgctttggtccgtatttcccaagccctcctcttttagccaaggctacagggcacttgtcttccctggtggctctcccctttggagagagctagtggcagagcaacctagctaggtcctccttgggctttgaatgcaggagcacccagtgccccaggccttgcactgtgctgcccaaggagtattttctgggtggatctcccatactcctcagggttctgaggtccttgtatttagggtatggtgtaaaaacttacatatgcacattttgttacatcatttaagatgattgaagctttactggttaagtacagggtcaccagagaaagttcctttccccagttgatgtcttgaggctgttgagaaacttaggacagaagcctacctcatcccaggcctgcccctccgtgcatagctctgcctttgggtcttgttcatagtgctgttcaggcaaaatggaatagtctcaggtgggaacaccttctcttgctagctccaggaaggctttgtgggaaatgagttgagaccatggacttgggagttgggggccagagttgagcctggacttgaccaattaattcccttacctttcagcccaagatagctacatgtctttacttgctgtataagttttccttttgtcctgggggtgcctgattgatcctatctcttcacccttcattctttcaacaaacatgccatctatctcccaggacatttattcccttctattcaaggccagttaggaatgcaattattttttttttcagttaaatacagacttgtttggacgcaaggtaccctttctctttttaaaaactttttatcatgaaaactttcaaatacaaaaataaaatggtagagtgaacctccatgtacccag

SEQ ID NO: 307722 - DNA, 1598 bp, Homo sapiens
cttttttttttttgtaaacaggtccaaaagaacctttattactttttatgacttgccacttatgctttctcttgccaggaatgcccatggatcatgtgattggcttttctacccatagagggccttgcagcctgataccacctgggagtgagggtcacaaaggagaccttggctccctcaggtcaccaataaacctgttctttaatcaagtagttgtaatatggacctggggtacctttagttagggactctggtggcactacacggggtgctggattcaaatctcacctctatggatgatgtctggcatcgtctggcccctccttttccaaagtgaccagaagattgtacttcctagagatgccagacttgcctcacacccaggagctgcccctgctgtgcctggtatgctggcagtggtgatggtgacaacacaatgaggccaagtagcaatgctcccaggtcctgcagcttgtgctctgcccagcagtgcccctggcccagcacctcagcctgctcttctctctggtggctccaccccaacccctacttcttttcctttatttctctcccaacctggctgcaaaggaggttcatattccccagatgtgtccacaaacctgtccaggagttgtgtcttaaaattgatttcctgtccctcttcctaaggacaggggtaacagtcaaagtgaaggaatgatgggttcttgcctgtcttgctttggtccgtatttcccaagccctcctcttttagccaaggctacagggcacttgtcttccctggtggctctcccctttggagagagctagtggcagagcaacctagctaggtcctccttgggctttgaatgcaggagcacccagtgccccaggccttgcactgtgctgcccaaggagtattttctgggtggatctcccatactcctcagggttctgaggtccttgtatttagggtatggtgtaaaaacttacatatgcacattttgttacatcatttaagatgattgaagctttactggttaagtacagggtcaccagagaaagttcctttccccagttgatgtcttgaggctgttgagaaacttaggacagaagcctacctcatcccaggcctgcccctccgtgcatagctctgcctttgggtcttgttcatagtgctgttcaggcaaaatggaatagtctcaggtgggaacaccttctcttgctagctccaggaaggctttgtgggaaatgagttgagaccatggacttgggagttgggggccagagttgagcctggacttgaccaattaattcccttacctttcagcccaagatagctacatgtctttacttgctgtataagttttccttttgtcctgggggtgcctgattgatcctatctcttcacccttcattctttcaacaaacatgccatctatctcccaggacatttattcccttctattcaaggccagttaggaatgcaattattttttttttcagttaaatacagacttgtttggacgcaaggtaccctttctctttttaaaaactttttatcatgaaaactttcaaatacaaaaataaaatggtagagtgaacctccatgtacccag

SEQ ID NO: 307723 - DNA, 1553 bp, Homo sapiens
agcggcggcaggtctgaacgcttcggtaggataagtgcggtgggagggggctctgcggttttggggagcccagggcgggaacccggacccggctggaagtccggagcctggccgcagccccgcccctccgctctttcttggtgaccttaagccagtggctgcctttttctgagcccgggcggggccgaaggcggcccgtaggccctcgggactcccagcactgcagagggtgtgaggtctgacatccaagacacgttgtttcgtatttctgaaggaagaactcaagctccgggaagtgatggctggggatggggcgggcaacttggggaccgagtgtacgatccacgcctaaggttgagggcggccgagctagccaggcagccgtgaccccagtgcttttcagacgtttcttagcttccagagcccaacacatacagctgatacacgcagaccagatctggtcaggtcctcggaagctgagtccagagcgatgctgctgaagacagtgctcttgctgggacatgtggcccaggtgctgatgctggacaatgggctcctgcagacaccacccatgggctggctggcctgggaacgcttccgctgcaacattaactgtgatgaggacccaaagaactgcataagtgaacagctcttcatggagatggctgaccggatggcacaggatggatggcgggacatgggctacacatacctcaacattgatgactgctggatcggtggtcgcgatgccagtggccgcctgatgccagatcccaagcgcttccctcatggcattcctttcctggctgactacgttcactccctgggcctgaagttgggtatctacgcggacatgggcaacttcacctgcatgggttacccaggcaccacactggacaaggtggtccaggatgctcagaccttcgccgagtggaaggtagacatgctcaagctggatggctgcttctccacccccgaggagcgggcccaggggtaccccaagatggctgctgccctgaatgccacaggccgccccatcgccttctcctgcagctggccagcctatgaaggcggcctccccccaagggtgaactacagtctgctggcggacatctgcaacctctggcgtaactatgatgacatccaggactcctggtggagcgtgctctccatcctgaattggttcgtggagcaccaggacatactgcagccagtggccggccctgggcactggaatgaccctgacatgctgctcattgggaactttggtctcagcttagagcaatcccgggcccagatggccctgtggacggtgctggcagcccccctcttgatgtccacagacctgcgtaccatctccgcccagaacatggacattctgcagaatccactcatgatcaaaatcaaccaggatcccttaggcatccagggacgcaggattcacaaggtaatgaagatgttctggaattacagtacttacggttgcctatctttctgtacaaataacacatggcttttgcctcctgactggagcctttcaggtatacagagag

SEQ ID NO: 307724 - DNA, 1112 bp, Homo sapiens
agcggcggcaggtctgaacgcttcggtaggataagtgcggtgggagggggctctgcggttttggggagcccagggcgggaacccggacccggctggaagtccggagcctggccgcagccccgcccctccgctctttcttggtgaccttaagccagtggctgcctttttctgagcccgggcggggccgaaggcggcccgtaggccctcgggactcccagcactgcagagggtgtgaggtctgacatccaagacacgttgtttcgtatttctgaaggaagaactcaagctccgggaagtgatggctggggatggggcgggcaacttggggaccgagtgtacgatccacgcctaaggttgagggcggccgagctagccaggcagccgtgaccccagtgcttttcagacgtttcttagcttccagagcccaacacatacagctgatacacgcagaccagatctggtcaggtcctcggaagctgagtccagagcgatgctgctgaagacagtgctcttgctgggacatgtggcccaggtgctgatgctggacaatgggctcctgcagacaccacccatgggctggctggcctgggaacgcttccgctgcaacattaactgtgatgaggacccaaagaactgcataagtgaacagctcttcatggagatggctgaccggatggcacaggatggatggcgggacatgggctacacatacctcaacattgatgactgctggatcggtggtcgcgatgccagtggccgcctgatgccagatcccaagcgcttccctcatggcattcctttcctggctgactacgttcactccctgggcctgaagttgggtatctacgcggacatgggcaacttcacctgcatgggttacccaggcaccacactggacaaggtggtccaggatgctcagaccttcgccgagtggaaggtagacatgctcaagctggatggctgcttctccacccccgaggagcgggcccaggggtaccccaagatggctgctgccctgaatgccacaggccgccccatcgccttctcctgcagctggccagcctatgaaggcggcctccccccaagggtaagccattctgccccctgcctga

SEQ ID NO: 307725 - DNA, 1116 bp, Homo sapiens
agcggcggcaggtctgaacgcttcggtaggataagtgcggtgggagggggctctgcggttttggggagcccagggcgggaacccggacccggctggaagtccggagcctggccgcagccccgcccctccgctctttcttggtgaccttaagccagtggctgcctttttctgagcccgggcggggccgaaggcggcccgtaggccctcgggactcccagcactgcagagggtgtgaggtctgacatccaagacacgttgtttcgtatttctgaaggaagaactcaagctccgggaagtgatggctggggatggggcgggcaacttggggaccgagtgtacgatccacgcctaaggttgagggcggccgagctagccaggcagccgtgaccccagtgcttttcagacgtttcttagcttccagagcccaacacatacagctgatacacgcagaccagatctggtcaggtcctcggaagctgagtccagagcgatgctgctgaagacagtgctcttgctgggacatgtggcccaggtgctgatgctggacaatgggctcctgcagacaccacccatgggctggctggcctgggaacgcttccgctgcaacattaactgtgatgaggacccaaagaactgcataagtgaacagctcttcatggagatggctgaccggatggcacaggatggatggcgggacatgggctacacatacctcaacattgatgactgctggatcggtggtcgcgatgccagtggccgcctgatgccagatcccaagcgcttccctcatggcattcctttcctggctgactacccttcctggcctctacttccatgtgcgcagccccacagacgttgctgagcaactcgccagcctcctgagctccatgcccatcaggactctagcctctgaccttgctgttgactctgaaatcaggatttggaagttttcgaattaggagtagagagatctgacctcttgccaggaatgcccatggatcatgtgattggcttttctacccatagagggccttgcagcctgataccacctgggagtgagggtcacaaaggagaccttggctccctcaggtcaccaataaacctgttctttaatca

SEQ ID NO: 307726 - DNA, 478 bp, Homo sapiens
acttgctcgcataaaaaatttgtcacacttattgttaaatcctaatatgtagagaaatgtcctctgggttggaataggaaaatagggaattttaatgggaggagaagtaatttaaattcttaatctctccattgcagcctgtgaggcatgctacattaagcatgtagtatcattttattttgagctaagcaaggcacttaaatacaggctggaccagccgtgttaaaacaggcacatctctgcccaaattatcatgaagaaaagtgagcattgtgtttccctctggtttacatttaggatgtggatctggaccgccagtctttaagcagcatagataaaaatccctctgagaggggacagagccagctctctaacccaacagatgacagctggaagggtagaccatacgcaagtaaggccactttttaatttgttttaaataagtaacatgtttatgtgattcatatattcagaaggc

SEQ ID NO: 307727 - DNA, 516 bp, Homo sapiens
actgacatgcttttcttagattttcacagttaattatctctgatgtatgtgtgtgtgtgtgtgtgtgcacgcacgtgcattttttcatccccatttctaaatcctggtcttatgaaaaatgtgccttgtgttcccccagcaactattttccagcaccattttcctgcagccatcgattcctttcaggatgctgtgaagtgcttatcagagttcgcctgcaacgccgctttccctgacacgagcatggaagcgattcggctcatccgcttctgtggcaaatacgtctctgagaggcctcgggtgctacaagaatacacaagtgatgacatgaatgtagctcctggtgacagagtctgggtccgaggctggttccccatcttattcgaactctcctgcatcattaatagatgcaagttagatgtacgaacaaggtaaccatgttcccgtgcggtggccccttacatcactgaaatgaacctcagtcacttgctcacctgaccccactctcttctctgt

SEQ ID NO: 307728 - DNA, 8863 bp, Homo sapiens
atgcaggagagccagaccaagagcatgttcgtgtcccgggccctggagaagatcctagccgacaaggaggtgaagcggccccagcactcccagctgcgcagggcctgccaggtggcgctcgatgaaattaaagcagaaatagaaaagcagaggcttggcactgctgcaccaccaaaggcaaacttcattgaagctgacaagtattttcttccattcgagctagcttgccagtccaagtccccaagggtagtcagcacatcccttgactgcttgcagaaactcatcgcatacgggcacatcactggcaacgcccctgacagtggagcccctgggaagcggctgatcgacagaattgttgaaaccatttgcagttgttttcagggccctcagactgatgaaggggttcagttacaaataattaaggctcttctgactgcagtgacttccccacacattgaaattcatgagggtactatcctgcagacagtgagaacatgttacaatatctatttggccagcaaaaatctcatcaatcaaaccactgccaaggctacccttactcagatgctgaacgtcattttcacccgcatggaaaaccaagtgttgcaggaggccagagaactggaaaaaccaatccagtcaaaaccccagtcccctgtgatccaagctgcagcagtatccccaaagttcgttcgtttgaagcacagtcaggcacaaagcaaaccaacaactcccgaaaaaacagatttaaccaacggtgaacatgccaggagtgattctggaaaagtaagcacagaaaatggagacgcacccagagaaagaggctcatcactgtcagggactgatgacggagcccaggaggtggtgaaggacatcttggaagatgtagtcacatctgccattaaagaagcagcggaaaagcatggtctgacagaacctgagagagttctaggtgaactggagtgccaggaatgtgctattcccccaggagttgatgaaaactcacagaccaacgggatagccgatgacaggcagtccttgtcgtcagcagataatctggaatcggatgcacaaggacatcaagtggctgccaggttctcccacgttctgcagaaggatgccttccttgtgttccgctccctgtgcaagctgtccatgaaaccccttggtgaaggccctccagacccaaaatcccatgagctgcgttccaaggtggtttccctgcagctgctcctctctgtgttgcaaaatgctggccccgtattcaggactcacgagatgttcatcaatgcaatcaagcaatatctctgtgtggccttgtccaaaaacggcgtctcttcagtgcctgatgtctttgagctctctcttgccatttttcttactcttctttcaaactttaaaatgcacttgaaaatgcagatagaggtctttttcaaagagattttcctgaacattttagaaacatcaacaagttcttttgagcacaggtggatggtcattcagactctgacgaggatctgtgcagatgcccagtgtgttgtggatatttatgtcaactacgactgtgatttaaatgctgctaacatttttgagcgccttgtaaatgatttatccaaaattgctcagggaagaagtggacatgagctgggaatgacacctctgcaggagctcagcctgaggaagaaaggcctggagtgcctcgtgtccattctcaagtgcatggtggagtggagcaaagacctgtatgtgaatcccaaccaccagaccagcctcggtcaggagaggctcacggatcaggaaataggggatgggaaaggccttgacatggcaagacggtgtagtgtgacgtccatggagtccacagtgtcctcggggacccagacaactgttcaggatgaccctgagcaatttgaggtcatcaagcaacaaaaagaaatcattgaacacggcatcgagctgttcaacaagaaacccaagagggggatccagtttctccaggagcagggcatgctgggaacgtcagttgaagacatagcccaattcctgcaccaggaggagcgcctggattccacccaagtaggcgattttctgggagatagcgcaaggttcaacaaggaggtgatgtatgcctacgtggaccaacttgacttctgtgaaaaagaatttgtctcagccctgcggacattcctagaaggtttccgcctacctggagaagcccaaaagattgaccgattaatggagaagtttgccgcaagatacatagaatgcaaccaagggcaaactctgtttgctagtgctgacactgcttatgtcctagcgtattcaattattatgctgactacagacttgcacagtcctcaggtaaaaaataaaatgacgaaagagcagtatattaaaatgaatcggggtatcaatgatagtaaagatctgccagaagagtatctctcaagcatctatgaagagatagaaggcaagaaaattgcaatgaaagaaacaaaagagctaacgattgcaaccaaatctactaagcagaatgtagctagtgaaaagcagcggcggctgctgtacaacttagagatggagcaaatggctaaaacagccaaagctctgatggaggctgtgagccatgccaaagccccgtttaccagtgccactcacctggaccatgtccggccaatgttcaaactggtgtggacgccactattggcagcctacagcatcggactccagaactgtgatgacactgaagtggcctccttgtgtttggaaggcatccgatgtgcaatccgaatcgcctgcatctttggaatgcagctggaacgagatgcctatgttcaggctcttgctcgcttctccctactcacagccagctccagcatcacaaaaatgaagcagaaaaacatcgacaccattaagacgcttatcacagtggctcacaccgatggcaactaccttgggaattcctggcatgagatcttgaaatgcatcagccagctggagctcgctcagctgataggaaccggtgtgaagacgcgctacctgtctggatctgggcgtgaaagagaagggagcctgaagggccacacattggcaggagaagagttcatgggccttggcctcggtaatttggtgagtggcggagtggataaaagacagatggccagcttccaagaatcggttggtgagaccagctcgcagagtgtggttgtagctgtggacaggatttttactgggtctaccagactggatggaaatgcaatagttgactttgtccgctggctgtgtgctgtgtccatggatgaactggcttccccccaccatcctcgcatgttcagcttgcagaagattgtggagatatcatactacaacatgaatcggatccgactacagtggtctcgaatatggcatgtgattggagatcacttcaataaggttggctgcaaccctaatgaagatgtggctatctttgctgttgactcattaaggcaactctccatgaagtttcttgagaagggtgaattagccaacttccgtttccagaaagattttctgaggccctttgagcatattatgaagaaaaacaggtctcccaccatccgggacatggcgatccgctgcattgcccagatggtgaactcccaggcggccaacatccgctcaggttggaagaacatctttgccgtgttccaccaggcagcctctgatcatgatgggaacattgtggagctggccttccagaccacttgccacattgtcacaactattttccagcaccattttcctgcagccatcgattcctttcaggatgctgtgaagtgcttatcagagttcgcctgcaacgccgctttccctgacacgagcatggaagcgattcggctcatccgcttctgtggcaaatacgtctctgagaggcctcgggtgctacaagaatacacaagtgatgacatgaatgtagctcctggtgacagagtctgggtccgaggctggttccccatcttattcgaactctcctgcatcattaatagatgcaagttagatgtacgaacaaggggactcacagtcatgtttgagatcatgaagagctatggccacacctttgaaaagcactggtggcaggacctgttcagaatcgtgtttcggatttttgacaatatgaaactccctgagcaactgtcagagaaatctgagtggatgacaacaacctgcaatcacgcactttatgctatttgtgatgtttttacccagttttatgaagctttgaatgaagttcttctttctgatgtatttgcacaattgcagtggtgtgtcaaacaagataatgaacagttggcgcgatcaggtacaaattgcttagaaaacttagtaatatccaatggagagaaattcagtcctgaagtctgggatgaaacctgcaactgtatgttggatattttcaaaacaaccatcccacatgttttgctgacatggagacctgtaggaatggaggaagattcatcagaaaagcatttggatgtggatctggaccgccagtctttaagcagcatagataaaaatccctctgagaggggacagagccagctctctaacccaacagatgacagctggaagggtagaccatacgcaaatcagaaactgtttgccagcctcctcatcaagtgtgtggtccagttggaattgatacagaccattgacaacattgtgttctaccctgcgacgagcaaaaaggaggatgcagagcacatggttgccgcccagcaagacacgctggatgcagatatccacatagagacggaggatcagggcatgtataagtacatgtcttcccagcacctcttcaagctgttggactgtttgcaggaatcccattcattctcaaaggccttcaactccaattacgagcagcggactgtcctgtggcgagcaggttttaagggcaagtctaaacccaatcttctaaaacaagaaaccagcagcctggcctgttgtttgaggatcctgtttcgaatgtatgttgatgagaaccgcagggattcctgggaagaaatacagcagagacttttaactgtttgcagtgaagctcttgcctatttcatcactgtgaattctgagagccatcgggaggcctggacaagtctcttgttgttacttctaactaaaaccctcaaaataaatgatgaaaagttcaaagcacatgcttcaatgtactacccctacttgtgtgaaattatgcagtttgacctgatccctgagctccgagcagttctgcggaagttcttcctacggataggtgttgtgtataagatatggataccagaagagccatcacaggtaccagcagcactgtcaccagtgtggtagccctggctgcccaggccagtgctgcagctctgcagaatgttcagcatgccatttctgactggcacatctcgtgaagtttcatagaaacaaggagttggcatcttggatctcagaatggcctggaaacggatggcctctacgctgttccatcacagtctccaactaaggcttatggtatttcattaaactgttgcatacccagttagcacagtaggtggggagtctgcttcatttctatcattccatttttctgattaaactgtcaaatctgtcattgcatatgccatcgttttctagcaaaatcccatgattggctataaacgttttgtaagaagtcactctccttgaaaatactgaacatagctgtataggtttgtgattattagagaatatgttaataaaacttcttgtaacggctaactgccacctaaaatatgctgggttttctgttgtttgagtgtgttagagaaatttgaatgtttttgtcagttacgagtcagccgtaattagattagtttaaggacaggtcaggattagagaagagttgtttttgtgttttgttaatgtctgagtgatttttaaagtattttacaaaaagatattgaaaatttggttgaaggcagagtttagtaattaagttagaattaagagttttgcgaggttaaaaaaatgtgcctcgtggatctccctgttttagtaacatggagagaaaaagtctacacgaaaaagtgaacaatttaatgaagatgattagccttccttgaaataagtatttgtggatgggtgttaaattaaaatttccagaatacactgtccatctcacacactctgaaatctaatatatgaagtagtaatgaaaatgaagtagtaatttaaccagagttcatttatccttgaataaacctttttattttcacctcagaaaagtgagtgtactggcagttagtgtcactgctttgcacagtccccattaaaggaccctccagagagggacagtaactgtgcatgagaagccgctcccataagcctcctcagccagatgtcatgggtggaactggagctgtgtcggggccagcacagctgaactgtgacaatggcaggaggtggcatgtgcccagcacttccattaatctgagcctaggagttgaattctttggcaaggttggattctgaggtccttattatgttgaatgatggtgcaatactctcacctgcagtagaactgagttctgctgcagcttgtgtaaaagtgggcagtacacaagtacgtcccaaagcctgtgagcagtatacgtggatgctcacccatgagaaggagcacacacgcctcattctctgccctcacccactgctcacctagagcatcgctgagcgttagacaaagtgttacacagaatgattaaaactttcagacttctacctatgctctttagtcctgtaaattgggttgtattgatgtcaactctggtgccttagaagttagtagtttgggaacctatctgtaaaatcagatgttttttctttgtagagaaggatttctggtgcttttgcttactaagagaccgatattcttaagttgttttcttgttttaacagccttgagaaatgtttggttttggccagcagaattcttgtctacttttttctttcccaaaaagtgttttttaatttctctaccaaagaaaaaatgagcaggtttaggtttttacatgacttatatacattagataaaaggagctgtataatttagcaggaagggactatgggagaatactttactgtgagtggaaaatgttagcacatttgactggtttgccctggaatccactgcacctttacactgcaccatgaaacctacactccctggtatcatagcgcgtcatcacctcaacaagtcagtcgtctccattgatatttgtacaaaaggtatacatggggaacacgtgttcattcattaagtccatcttgcgtgcagctatatccctgattggttatttttcctttccttctgaggttctcatgtcattttcttcatcggatgtgactaaaatttttctggtgtcttctgccctctctttaattttgcctcttgaggggtagcagatgtgtcagtgcattttattacttgctgaaacattcaggcttacatttcttattagtttagtattttaaaagatttaattttctgaatgaggcatttgaattgtaccagcaatggacttttaaaaaattggatgtaaaaccattcagggtgatttttcttgtcagtggacagtgacgaacagagatttgaaatcccttacctccaataataagccattcagcctaaattcatttttatgaataaatctcttctttctcatggtaaatgtggcttgtgccactcaaacactagtgaaagggtatgtacaaccgcaacatcaggccaggacaccatttatttaaccaagtaatggaggagagtgaaacattttccaaggccttatttctttttcagaatgctttaagtgttgattatatgtgctgggtctctagagaagtttttatttgttacaatactgctgctttgagcaattttgtttctcttcattgtctgttagggaaatcaccagctttggcatcttaacaacaaacagtggatgggtaatttttatttctgatacgcatctttagagtcaaatatatcttttccctgtactcctcatgtacaaccaaagaacatacattatgaaaattgtattataatatctggaaacacaacattttcctctggcaggtgacttttgtacgaaatgaaaaaaaaaaaacctgtattttttttgttgttcttttgtgattaaggatatacatttagtagtctttgttattaaaggaacctgctgataagtacaagtgtgaccatctcattcaaatgtttgttgttatgatgcaaatggatattggtttcaatagaagctggatccttaatactgcattttctgaattctgttttaatatttgtgttaaagtagacatagctgaactcacatggaatcctggagttttgttatcagcagctttgcagtttgggaaacaaagaaaccaaagctgagtgttttaaagaatgaacatatctggaaatccttgctctcaaaacaaaacaatataatctatcaaaggtgttttactcagtgttctaatttttaaaaaattttatctgcatatttgcatcaaatatttatgtgtaaaatgtatgttttacctccttaaaatgcctaaaagttagttaatagttactttggtttaacctatacacaatgattaagtgcatttaatattggtaatttaatgaaaaccattccttgcccaatggatgtataaatttttgaaagaataagcagaattatataatatgaaatgctatgtaaagttttctatgtaaaaatattatgtataatactattaaaatatcccatgctttgatcaggtggtacatcaataaaattttaaaaagtaaaaaagttac

SEQ ID NO: 307729 - DNA, 8810 bp, Homo sapiens
atgcaggagagccagaccaagagcatgttcgtgtcccgggccctggagaagatcctagccgacaaggaggtgaagcggccccagcactcccagctgcgcagggcctgccaggtggcgctcgatgaaattaaagcagaaatagaaaagcagaggcttggcactgctgcaccaccaaaggcaaacttcattgaagctgacaagtattttcttccattcgagctagcttgccagtccaagtccccaagggtagtcagcacatcccttgactgcttgcagaaactcatcgcatacgggcacatcactggcaacgcccctgacagtggagcccctgggaagcggctgatcgacagaattgttgaaaccatttgcagttgttttcagggccctcagactgatgaaggggttcagttacaaataattaaggctcttctgactgcagtgacttccccacacattgaaattcatgagggtactatcctgcagacagtgagaacatgttacaatatctatttggccagcaaaaatctcatcaatcaaaccactgccaaggctacccttactcagatgctgaacgtcattttcacccgcatggaaaaccaagtgttgcaggaggccagagaactggaaaaaccaatccagtcaaaaccccagtcccctgtgatccaagctgcagcagtatccccaaagttcgttcgtttgaagcacagtcaggcacaaagcaaaccaacaactcccgaaaaaacagatttaaccaacggtgaacatgccaggagtgattctggaaaagtaagcacagaaaatggagacgcacccagagaaagaggctcatcactgtcagggactgatgacggagcccaggaggtggtgaaggacatcttggaagatgtagtcacatctgccattaaagaagcagcggaaaagcatggtctgacagaacctgagagagttctaggtgaactggagtgccaggaatgtgctattcccccaggagttgatgaaaactcacagaccaacgggatagccgatgacaggcagtccttgtcgtcagcagataatctggaatcggatgcacaaggacatcaagtggctgccaggttctcccacgttctgcagaaggatgccttccttgtgttccgctccctgtgcaagctgtccatgaaaccccttggtgaaggccctccagacccaaaatcccatgagctgcgttccaaggtggtttccctgcagctgctcctctctgtgttgcaaaatgctggccccgtattcaggactcacgagatgttcatcaatgcaatcaagcaatatctctgtgtggccttgtccaaaaacggcgtctcttcagtgcctgatgtctttgagctctctcttgccatttttcttactcttctttcaaactttaaaatgcacttgaaaatgcagatagaggtctttttcaaagagattttcctgaacattttagaaacatcaacaagttcttttgagcacaggtggatggtcattcagactctgacgaggatctgtgcagatgcccagtgtgttgtggatatttatgtcaactacgactgtgatttaaatgctgctaacatttttgagcgccttgtaaatgatttatccaaaattgctcagggaagaagtggacatgagctgggaatgacacctctgcaggagctcagcctgaggaagaaaggcctggagtgcctcgtgtccattctcaagtgcatggtggagtggagcaaagacctgtatgtgaatcccaaccaccagaccagcctcggtcaggagaggctcacggatcaggaaataggggatgggaaaggccttgacatggcaagacggtgtagtgtgacgtccatggagtccacagtgtcctcggggacccagacaactgttcaggatgaccctgagcaatttgaggtcatcaagcaacaaaaagaaatcattgaacacggcatcgagctgttcaacaagaaacccaagagggggatccagtttctccaggagcagggcatgctgggaacgtcagttgaagacatagcccaattcctgcaccaggaggagcgcctggattccacccaagtaggcgattttctgggagatagcgcaaggttcaacaaggaggtgatgtatgcctacgtggaccaacttgacttctgtgaaaaagaatttgtctcagccctgcggacattcctagaaggtttccgcctacctggagaagcccaaaagattgaccgattaatggagaagtttgccgcaagatacatagaatgcaaccaagggcaaactctgtttgctagtgctgacactgcttatgtcctagcgtattcaattattatgctgactacagacttgcacagtcctcaggtaaaaaataaaatgacgaaagagcagtatattaaaatgaatcggggtatcaatgatagtaaagatctgccagaagagtatctctcaagcatctatgaagagatagaaggcaagaaaattgcaatgaaagaaacaaaagagctaacgattgcaaccaaatctactaagcagaatgtagctagtgaaaagcagcggcggctgctgtacaacttagagatggagcaaatggctaaaacagccaaagctctgatggaggctgtgagccatgccaaagccccgtttaccagtgccactcacctggaccatgtccggccaatgttcaaactggtgtggacgccactattggcagcctacagcatcggactccagaactgtgatgacactgaagtggcctccttgtgtttggaaggcatccgatgtgcaatccgaatcgcctgcatctttggaatgcagctggaacgagatgcctatgttcaggctcttgctcgcttctccctactcacagccagctccagcatcacaaaaatgaagcagaaaaacatcgacaccattaagacgcttatcacagtggctcacaccgatggcaactaccttgggaattcctggcatgagatcttgaaatgcatcagccagctggagctcgctcagctgataggaaccggtgtgaagacgcgctacctgtctggatctgggcgtgaaagagaagggagcctgaagggccacacattggcaggagaagagttcatgggccttggcctcggtaatttggtgagtggcggagtggataaaagacagatggccagcttccaagaatcggttggtgagaccagctcgcagagtgtggttgtagctgtggacaggatttttactgggtctaccagactggatggaaatgcaatagttgactttgtccgctggctgtgtgctgtgtccatggatgaactggcttccccccaccatcctcgcatgttcagcttgcagaagattgtggagatatcatactacaacatgaatcggatccgactacagtggtctcgaatatggcatgtgattggagatcacttcaataaggttggctgcaaccctaatgaagatgtggctatctttgctgttgactcattaaggcaactctccatgaagtttcttgagaagggtgaattagccaacttccgtttccagaaagattttctgaggccctttgagcatattatgaagaaaaacaggtctcccaccatccgggacatggcgatccgctgcattgcccagatggtgaactcccaggcggccaacatccgctcaggttggaagaacatctttgccgtgttccaccaggcagcctctgatcatgatgggaacattgtggagctggccttccagaccacttgccacattgtcacaactattttccagcaccattttcctgcagccatcgattcctttcaggatgctgtgaagtgcttatcagagttcgcctgcaacgccgctttccctgacacgagcatggaagcgattcggctcatccgcttctgtggcaaatacgtctctgagaggcctcgggtgctacaagaatacacaagtgatgacatgaatgtagctcctggtgacagagtctgggtccgaggctggttccccatcttattcgaactctcctgcatcattaatagatgcaagttagatgtacgaacaaggggactcacagtcatgtttgagatcatgaagagctatggccacacctttgaaaagcactggtggcaggacctgttcagaatcgtgtttcggatttttgacaatatgaaactccctgagcaactgtcagagaaatctgagtggatgacaacaacctgcaatcacgcactttatgctatttgtgatgtttttacccagttttatgaagctttgaatgaagttcttctttctgatgtatttgcacaattgcagtggtgtgtcaaacaagataatgaacagttggcgcgatcaggtacaaattgcttagaaaacttagtaatatccaatggagagaaattcagtcctgaagtctgggatgaaacctgcaactgtatgttggatattttcaaaacaaccatcccacatgttttgctgacatggagacctgtaggaatggaggaagattcatcagaaaagcatttggatgtggatctggaccgccagtctttaagcagcatagataaaaatccctctgagaggggacagagccagctctctaacccaacagatgacagctggaagggtagaccatacgcaaatcagaaactgtttgccagcctcctcatcaagtgtgtggtccagttggaattgatacagaccattgacaacattgtgttctaccctgcgacgagcaaaaaggaggatgcagagcacatggttgccgcccagcaagacacgctggatgcagatatccacatagagacggaggatcagggcatgtataagtacatgtcttcccagcacctcttcaagctgttggactgtttgcaggaatcccattcattctcaaaggccttcaactccaattacgagcagcggactgtcctgtggcgagcaggttttaagggcaagtctaaacccaatcttctaaaacaagaaaccagcagcctggcctgttgtttgaggatcctgtttcgaatgtatgttgatgagaaccgcagggattcctgggaagaaatacagcagagacttttaactgtttgcagtgaagctcttgcctatttcatcactgtgaattctgagagccatcgggaggcctggacaagtctcttgttgttacttctaactaaaaccctcaaaataaatgatgaaaagttcaaagcacatgcttcaatgtactacccctacttgtgtgaaattatgcagtttgacctgatccctgagctccgagcagttctgcggaagttcttcctacggataggtgttgtgtataagatatggataccagaagagccatcacaggtaccagcagcactgtcaccagtgtggtagccctggctgcccaggccagtgctgcagctctgcagaatgttcagcatgccatttctgactggcacatctcgtgaagtttcatagaaacaaggagttggcatcttggatctcagaatggcctggaaacggatggcctctacgctgttccatcacagtctccaactaaggcttatggtatttcattaaactgttgcatacccagttagcacagtaggtggggagtctgcttcatttctatcattccatttttctgattaaactgtcaaatctgtcattgcatatgccatcgttttctagcaaaatcccatgattggctataaacgttttgtaagaagtcactctccttgaaaatactgaacatagctgtataggtttgtgattattagagaatatgttaataaaacttcttgtaacggctaactgccacctaaaatatgctgggttttctgttgtttgagtgtgttagagaaatttgaatgtttttgtcagttacgagtcagccgtaattagattagtttaaggacaggtcaggattagagaagagttgtttttgtgttttgttaatgtctgagtgatttttaaagtattttacaaaaagatattgaaaatttggttgaaggcagagtttagtaattaagttagaattaagagttttgcgaggttaaaaaaatgtgcctcgtggatctccctgttttagtaacatggagagaaaaagtctacacgaaaaagtgaacaatttaatgaagatgattagccttccttgaaataagtatttgtggatgggtgttaaattaaaatttccagaatacactgtccatctcacacactctgaaatctaatatatgaagtagtaatgaaaatgaagtagtaatttaaccagagttcatttatccttgaataaacctttttattttcacctcagaaaagtgagtgtactggcagttagtgtcactgctttgcacagtccccattaaaggaccctccagagagggacagtaactgtgcatgagaagccgctcccataagcctcctcagccagatgtcatgggtggaactggagctgtgtcggggccagcacagctgaactgtgacaatggcaggaggtggcatgtgcccagcacttccattaatctgagcctaggagttgaattctttggcaaggttggattctgaggtccttattatgttgaatgatggtgcaatactctcacctgcagtagaactgagttctgctgcagcttgtgtaaaagtgggcagtacacaagtacgtcccaaagcctgtgagcagtatacgtggatgctcacccatgagaaggagcacacacgcctcattctctgccctcacccactgctcacctagagcatcgctgagcgttagacaaagtgttacacagaatgattaaaactttcagacttctacctatgctctttagtcctgtaaattgggttgtattgatgtcaactctggtgccttagaagttagtagtttgggaacctatctgtaaaatcagatgttttttctttgtagagaaggatttctggtgcttttgcttactaagagaccgatattcttaagttgttttcttgttttaacagccttgagaaatgtttggttttggccagcagaattcttgtctacttttttctttcccaaaaagtgttttttaatttctctaccaaagaaaaaatgagcaggtttaggtttttacatgacttatatacattagataaaaggagctgtataatttagcaggaagggactatgggagaatactttactgtgagtggaaaatgttagcacatttgactggtttgccctggaatccactgcacctttacactgcaccatgaaacctacactccctggtatcatagcgcgtcatcacctcaacaagtcagtcgtctccattgatatttgtacaaaaggtatacatggggaacacgtgttcattcattaagtccatcttgcgtgcagctatatccctgattggttatttttcctttccttctgaggttctcatgtcattttcttcatcggatgtgactaaaatttttctggtgtcttctgccctctctttaattttgcctcttgaggggtagcagatgtgtcagtgcattttattacttgctgaaacattcaggcttacatttcttattagtttagtattttaaaagatttaattttctgaatgaggcatttgaattgtaccagcaatggacttttaaaaaattggatgtgaaatcccttacctccaataataagccattcagcctaaattcatttttatgaataaatctcttctttctcatggtaaatgtggcttgtgccactcaaacactagtgaaagggtatgtacaaccgcaacatcaggccaggacaccatttatttaaccaagtaatggaggagagtgaaacattttccaaggccttatttctttttcagaatgctttaagtgttgattatatgtgctgggtctctagagaagtttttatttgttacaatactgctgctttgagcaattttgtttctcttcattgtctgttagggaaatcaccagctttggcatcttaacaacaaacagtggatgggtaatttttatttctgatacgcatctttagagtcaaatatatcttttccctgtactcctcatgtacaaccaaagaacatacattatgaaaattgtattataatatctggaaacacaacattttcctctggcaggtgacttttgtacgaaatgaaaaaaaaaaaacctgtattttttttgttgttcttttgtgattaaggatatacatttagtagtctttgttattaaaggaacctgctgataagtacaagtgtgaccatctcattcaaatgtttgttgttatgatgcaaatggatattggtttcaatagaagctggatccttaatactgcattttctgaattctgttttaatatttgtgttaaagtagacatagctgaactcacatggaatcctggagttttgttatcagcagctttgcagtttgggaaacaaagaaaccaaagctgagtgttttaaagaatgaacatatctggaaatccttgctctcaaaacaaaacaatataatctatcaaaggtgttttactcagtgttctaatttttaaaaaattttatctgcatatttgcatcaaatatttatgtgtaaaatgtatgttttacctccttaaaatgcctaaaagttagttaatagttactttggtttaacctatacacaatgattaagtgcatttaatattggtaatttaatgaaaaccattccttgcccaatggatgtataaatttttgaaagaataagcagaattatataatatgaaatgctatgtaaagttttctatgtaaaaatattatgtataatactattaaaatatcccatgctttgatcaggtggtacatcaataaaattttaaaaagtaaaaaagttac

SEQ ID NO: 307730 - DNA, 8673 bp, Homo sapiens
atgcaggagagccagaccaagagcatgttcgtgtcccgggccctggagaagatcctagccgacaaggaggtgaagcggccccagcactcccagctgcgcagggcctgccaggtggcgctcgatgaaattaaagcagaaatagaaaagcagaggcttggcactgctgcaccaccaaaggcaaacttcattgaagctgacaagtattttcttccattcgagctagcttgccagtccaagtccccaagggtagtcagcacatcccttgactgcttgcagaaactcatcgcatacgggcacatcactggcaacgcccctgacagtggagcccctgggaagcggctgatcgacagaattgttgaaaccatttgcagttgttttcagggccctcagactgatgaaggggttcagttacaaataattaaggctcttctgactgcagtgacttccccacacattgaaattcatgagggtactatcctgcagacagtgagaacatgttacaatatctatttggccagcaaaaatctcatcaatcaaaccactgccaaggctacccttactcagatgctgaacatgccaggagtgattctggaaaagtaagcacagaaaatggagacgcacccagagaaagaggctcatcactgtcagggactgatgacggagcccaggaggtggtgaaggacatcttggaagatgtagtcacatctgccattaaagaagcagcggaaaagcatggtctgacagaacctgagagagttctaggtgaactggagtgccaggaatgtgctattcccccaggagttgatgaaaactcacagaccaacgggatagccgatgacaggcagtccttgtcgtcagcagataatctggaatcggatgcacaaggacatcaagtggctgccaggttctcccacgttctgcagaaggatgccttccttgtgttccgctccctgtgcaagctgtccatgaaaccccttggtgaaggccctccagacccaaaatcccatgagctgcgttccaaggtggtttccctgcagctgctcctctctgtgttgcaaaatgctggccccgtattcaggactcacgagatgttcatcaatgcaatcaagcaatatctctgtgtggccttgtccaaaaacggcgtctcttcagtgcctgatgtctttgagctctctcttgccatttttcttactcttctttcaaactttaaaatgcacttgaaaatgcagatagaggtctttttcaaagagattttcctgaacattttagaaacatcaacaagttcttttgagcacaggtggatggtcattcagactctgacgaggatctgtgcagatgcccagtgtgttgtggatatttatgtcaactacgactgtgatttaaatgctgctaacatttttgagcgccttgtaaatgatttatccaaaattgctcagggaagaagtggacatgagctgggaatgacacctctgcaggagctcagcctgaggaagaaaggcctggagtgcctcgtgtccattctcaagtgcatggtggagtggagcaaagacctgtatgtgaatcccaaccaccagaccagcctcggtcaggagaggctcacggatcaggaaataggggatgggaaaggccttgacatggcaagacggtgtagtgtgacgtccatggagtccacagtgtcctcggggacccagacaactgttcaggatgaccctgagcaatttgaggtcatcaagcaacaaaaagaaatcattgaacacggcatcgagctgttcaacaagaaacccaagagggggatccagtttctccaggagcagggcatgctgggaacgtcagttgaagacatagcccaattcctgcaccaggaggagcgcctggattccacccaagtaggcgattttctgggagatagcgcaaggttcaacaaggaggtgatgtatgcctacgtggaccaacttgacttctgtgaaaaagaatttgtctcagccctgcggacattcctagaaggtttccgcctacctggagaagcccaaaagattgaccgattaatggagaagtttgccgcaagatacatagaatgcaaccaagggcaaactctgtttgctagtgctgacactgcttatgtcctagcgtattcaattattatgctgactacagacttgcacagtcctcaggtaaaaaataaaatgacgaaagagcagtatattaaaatgaatcggggtatcaatgatagtaaagatctgccagaagagtatctctcaagcatctatgaagagatagaaggcaagaaaattgcaatgaaagaaacaaaagagctaacgattgcaaccaaatctactaagcagaatgtagctagtgaaaagcagcggcggctgctgtacaacttagagatggagcaaatggctaaaacagccaaagctctgatggaggctgtgagccatgccaaagccccgtttaccagtgccactcacctggaccatgtccggccaatgttcaaactggtgtggacgccactattggcagcctacagcatcggactccagaactgtgatgacactgaagtggcctccttgtgtttggaaggcatccgatgtgcaatccgaatcgcctgcatctttggaatgcagctggaacgagatgcctatgttcaggctcttgctcgcttctccctactcacagccagctccagcatcacaaaaatgaagcagaaaaacatcgacaccattaagacgcttatcacagtggctcacaccgatggcaactaccttgggaattcctggcatgagatcttgaaatgcatcagccagctggagctcgctcagctgataggaaccggtgtgaagacgcgctacctgtctggatctgggcgtgaaagagaagggagcctgaagggccacacattggcaggagaagagttcatgggccttggcctcggtaatttggtgagtggcggagtggataaaagacagatggccagcttccaagaatcggttggtgagaccagctcgcagagtgtggttgtagctgtggacaggatttttactgggtctaccagactggatggaaatgcaatagttgactttgtccgctggctgtgtgctgtgtccatggatgaactggcttccccccaccatcctcgcatgttcagcttgcagaagattgtggagatatcatactacaacatgaatcggatccgactacagtggtctcgaatatggcatgtgattggagatcacttcaataaggttggctgcaaccctaatgaagatgtggctatctttgctgttgactcattaaggcaactctccatgaagtttcttgagaagggtgaattagccaacttccgtttccagaaagattttctgaggccctttgagcatattatgaagaaaaacaggtctcccaccatccgggacatggcgatccgctgcattgcccagatggtgaactcccaggcggccaacatccgctcaggttggaagaacatctttgccgtgttccaccaggcagcctctgatcatgatgggaacattgtggagctggccttccagaccacttgccacattgtcacaactattttccagcaccattttcctgcagccatcgattcctttcaggatgctgtgaagtgcttatcagagttcgcctgcaacgccgctttccctgacacgagcatggaagcgattcggctcatccgcttctgtggcaaatacgtctctgagaggcctcgggtgctacaagaatacacaagtgatgacatgaatgtagctcctggtgacagagtctgggtccgaggctggttccccatcttattcgaactctcctgcatcattaatagatgcaagttagatgtacgaacaaggggactcacagtcatgtttgagatcatgaagagctatggccacacctttgaaaagcactggtggcaggacctgttcagaatcgtgtttcggatttttgacaatatgaaactccctgagcaactgtcagagaaatctgagtggatgacaacaacctgcaatcacgcactttatgctatttgtgatgtttttacccagttttatgaagctttgaatgaagttcttctttctgatgtatttgcacaattgcagtggtgtgtcaaacaagataatgaacagttggcgcgatcaggtacaaattgcttagaaaacttagtaatatccaatggagagaaattcagtcctgaagtctgggatgaaacctgcaactgtatgttggatattttcaaaacaaccatcccacatgttttgctgacatggagacctgtaggaatggaggaagattcatcagaaaagcatttggatgtggatctggaccgccagtctttaagcagcatagataaaaatccctctgagaggggacagagccagctctctaacccaacagatgacagctggaagggtagaccatacgcaaatcagaaactgtttgccagcctcctcatcaagtgtgtggtccagttggaattgatacagaccattgacaacattgtgttctaccctgcgacgagcaaaaaggaggatgcagagcacatggttgccgcccagcaagacacgctggatgcagatatccacatagagacggaggatcagggcatgtataagtacatgtcttcccagcacctcttcaagctgttggactgtttgcaggaatcccattcattctcaaaggccttcaactccaattacgagcagcggactgtcctgtggcgagcaggttttaagggcaagtctaaacccaatcttctaaaacaagaaaccagcagcctggcctgttgtttgaggatcctgtttcgaatgtatgttgatgagaaccgcagggattcctgggaagaaatacagcagagacttttaactgtttgcagtgaagctcttgcctatttcatcactgtgaattctgagagccatcgggaggcctggacaagtctcttgttgttacttctaactaaaaccctcaaaataaatgatgaaaagttcaaagcacatgcttcaatgtactacccctacttgtgtgaaattatgcagtttgacctgatccctgagctccgagcagttctgcggaagttcttcctacggataggtgttgtgtataagatatggataccagaagagccatcacaggtaccagcagcactgtcaccagtgtggtagccctggctgcccaggccagtgctgcagctctgcagaatgttcagcatgccatttctgactggcacatctcgtgaagtttcatagaaacaaggagttggcatcttggatctcagaatggcctggaaacggatggcctctacgctgttccatcacagtctccaactaaggcttatggtatttcattaaactgttgcatacccagttagcacagtaggtggggagtctgcttcatttctatcattccatttttctgattaaactgtcaaatctgtcattgcatatgccatcgttttctagcaaaatcccatgattggctataaacgttttgtaagaagtcactctccttgaaaatactgaacatagctgtataggtttgtgattattagagaatatgttaataaaacttcttgtaacggctaactgccacctaaaatatgctgggttttctgttgtttgagtgtgttagagaaatttgaatgtttttgtcagttacgagtcagccgtaattagattagtttaaggacaggtcaggattagagaagagttgtttttgtgttttgttaatgtctgagtgatttttaaagtattttacaaaaagatattgaaaatttggttgaaggcagagtttagtaattaagttagaattaagagttttgcgaggttaaaaaaatgtgcctcgtggatctccctgttttagtaacatggagagaaaaagtctacacgaaaaagtgaacaatttaatgaagatgattagccttccttgaaataagtatttgtggatgggtgttaaattaaaatttccagaatacactgtccatctcacacactctgaaatctaatatatgaagtagtaatgaaaatgaagtagtaatttaaccagagttcatttatccttgaataaacctttttattttcacctcagaaaagtgagtgtactggcagttagtgtcactgctttgcacagtccccattaaaggaccctccagagagggacagtaactgtgcatgagaagccgctcccataagcctcctcagccagatgtcatgggtggaactggagctgtgtcggggccagcacagctgaactgtgacaatggcaggaggtggcatgtgcccagcacttccattaatctgagcctaggagttgaattctttggcaaggttggattctgaggtccttattatgttgaatgatggtgcaatactctcacctgcagtagaactgagttctgctgcagcttgtgtaaaagtgggcagtacacaagtacgtcccaaagcctgtgagcagtatacgtggatgctcacccatgagaaggagcacacacgcctcattctctgccctcacccactgctcacctagagcatcgctgagcgttagacaaagtgttacacagaatgattaaaactttcagacttctacctatgctctttagtcctgtaaattgggttgtattgatgtcaactctggtgccttagaagttagtagtttgggaacctatctgtaaaatcagatgttttttctttgtagagaaggatttctggtgcttttgcttactaagagaccgatattcttaagttgttttcttgttttaacagccttgagaaatgtttggttttggccagcagaattcttgtctacttttttctttcccaaaaagtgttttttaatttctctaccaaagaaaaaatgagcaggtttaggtttttacatgacttatatacattagataaaaggagctgtataatttagcaggaagggactatgggagaatactttactgtgagtggaaaatgttagcacatttgactggtttgccctggaatccactgcacctttacactgcaccatgaaacctacactccctggtatcatagcgcgtcatcacctcaacaagtcagtcgtctccattgatatttgtacaaaaggtatacatggggaacacgtgttcattcattaagtccatcttgcgtgcagctatatccctgattggttatttttcctttccttctgaggttctcatgtcattttcttcatcggatgtgactaaaatttttctggtgtcttctgccctctctttaattttgcctcttgaggggtagcagatgtgtcagtgcattttattacttgctgaaacattcaggcttacatttcttattagtttagtattttaaaagatttaattttctgaatgaggcatttgaattgtaccagcaatggacttttaaaaaattggatgtaaaaccattcagggtgatttttcttgtcagtggacagtgacgaacagagatttgaaatcccttacctccaataataagccattcagcctaaattcatttttatgaataaatctcttctttctcatggtaaatgtggcttgtgccactcaaacactagtgaaagggtatgtacaaccgcaacatcaggccaggacaccatttatttaaccaagtaatggaggagagtgaaacattttccaaggccttatttctttttcagaatgctttaagtgttgattatatgtgctgggtctctagagaagtttttatttgttacaatactgctgctttgagcaattttgtttctcttcattgtctgttagggaaatcaccagctttggcatcttaacaacaaacagtggatgggtaatttttatttctgatacgcatctttagagtcaaatatatcttttccctgtactcctcatgtacaaccaaagaacatacattatgaaaattgtattataatatctggaaacacaacattttcctctggcaggtgacttttgtacgaaatgaaaaaaaaaaaacctgtattttttttgttgttcttttgtgattaaggatatacatttagtagtctttgttattaaaggaacctgctgataagtacaagtgtgaccatctcattcaaatgtttgttgttatgatgcaaatggatattggtttcaatagaagctggatccttaatactgcattttctgaattctgttttaatatttgtgttaaagtagacatagctgaactcacatggaatcctggagttttgttatcagcagctttgcagtttgggaaacaaagaaaccaaagctgagtgttttaaagaatgaacatatctggaaatccttgctctcaaaacaaaacaatataatctatcaaaggtgttttactcagtgttctaatttttaaaaaattttatctgcatatttgcatcaaatatttatgtgtaaaatgtatgttttacctccttaaaatgcctaaaagttagttaatagttactttggtttaacctatacacaatgattaagtgcatttaatattggtaatttaatgaaaaccattccttgcccaatggatgtataaatttttgaaagaataagcagaattatataatatgaaatgctatgtaaagttttctatgtaaaaatattatgtataatactattaaaatatcccatgctttgatcaggtggtacatcaataaaattttaaaaagtaaaaaagttac

SEQ ID NO: 307731 - DNA, 8814 bp, Homo sapiens
atgcaggagagccagaccaagagcatgttcgtgtcccgggccctggagaagatcctagccgacaaggaggtgaagcggccccagcactcccagctgcgcagggcctgccaggtggcgctcgatgaaattaaagcagaaatagaaaagcagaggcttggcactgctgcaccaccaaaggcaaacttcattgaagctgacaagtattttcttccattcgagctagcttgccagtccaagtccccaagggtagtcagcacatcccttgactgcttgcagaaactcatcgcatacgggcacatcactggcaacgcccctgacagtggagcccctgggaagcggctgatcgacagaattgttgaaaccatttgcagttgttttcagggccctcagactgatgaaggggttcagttacaaataattaaggctcttctgactgcagtgacttccccacacattgaaattcatgagggtactatcctgcagacagtgagaacatgttacaatatctatttggccagcaaaaatctcatcaatcaaaccactgccaaggctacccttactcagatgctgaacgtcattttcacccgcatggaaaaccaagtgttgcaggaggccagagaactggaaaaaccaatccagtcaaaaccccagtcccctgtgatccaagctgcagcagtatccccaaagttcgttcgtttgaagcacagtcaggcacaaagcaaaccaacaactcccgaaaaaacagatttaaccaacggtgaacatgccaggagtgattctggaaaagtaagcacagaaaatggagacgcacccagagaaagaggctcatcactgtcagggactgatgacggagcccaggaggtggtgaaggacatcttggaagatgtagtcacatctgccattaaagaagcagcggaaaagcatggtctgacagaacctgagagagttctaggtgaactggagtgccaggaatgtgctattcccccaggagttgatgaaaactcacagaccaacgggatagccgatgacaggcagtccttgtcgtcagcagataatctggaatcggatgcacaaggacatcaagtggctgccaggttctcccacgttctgcagaaggatgccttccttgtgttccgctccctgtgcaagctgtccatgaaaccccttggtgaaggccctccagacccaaaatcccatgagctgcgttccaaggtggtttccctgcagctgctcctctctgtgttgcaaaatgctggccccgtattcaggactcacgagatgttcatcaatgcaatcaagcaatatctctgtgtggccttgtccaaaaacggcgtctcttcagtgcctgatgtctttgagctctctcttgccatttttcttactcttctttcaaactttaaaatgcacttgaaaatgcagatagaggtctttttcaaagagattttcctgaacattttagaaacatcaacaagttcttttgagcacaggtggatggtcattcagactctgacgaggatctgtgcagatgcccagtgtgttgtggatatttatgtcaactacgactgtgatttaaatgctgctaacatttttgagcgccttgtaaatgatttatccaaaattgctcagggaagaagtggacatgagctgggaatgacacctctgcaggagctcagcctgaggaagaaaggcctggagtgcctcgtgtccattctcaagtgcatggtggagtggagcaaagacctgtatgtgaatcccaaccaccagaccagcctcggtcaggagaggctcacggatcaggaaataggggatgggaaaggccttgacatggcaagacggtgtagtgtgacgtccatggagtccacagtgtcctcggggacccagacaactgttcaggatgaccctgagcaatttgaggtcatcaagcaacaaaaagaaatcattgaacacggcatcgagctgttcaacaagaaacccaagagggggatccagtttctccaggagcagggcatgctgggaacgtcagttgaagacatagcccaattcctgcaccaggaggagcgcctggattccacccaagtaggcgattttctgggagatagcgcaaggttcaacaaggaggtgatgtatgcctacgtggaccaacttgacttctgtgaaaaagaatttgtctcagccctgcggacattcctagaaggtttccgcctacctggagaagcccaaaagattgaccgattaatggagaagtttgccgcaagatacatagaatgcaaccaagggcaaactctgtttgctagtgctgacactgcttatgtcctagcgtattcaattattatgctgactacagacttgcacagtcctcaggtaaaaaataaaatgacgaaagagcagtatattaaaatgaatcggggtatcaatgatagtaaagatctgccagaagagtatctctcaagcatctatgaagagatagaaggcaagaaaattgcaatgaaagaaacaaaagagctaacgattgcaaccaaatctactaagcagaatgtagctagtgaaaagcagcggcggctgctgtacaacttagagatggagcaaatggctaaaacagccaaagctctgatggaggctgtgagccatgccaaagccccgtttaccagtgccactcacctggaccatgtccggccaatgttcaaactggtgtggacgccactattggcagcctacagcatcggactccagaactgtgatgacactgaagtggcctccttgtgtttggaaggcatccgatgtgcaatccgaatcgcctgcatctttggaatgcagctggaacgagatgcctatgttcaggctcttgctcgcttctccctactcacagccagctccagcatcacaaaaatgaagcagaaaaacatcgacaccattaagacgcttatcacagtggctcacaccgatggcaactaccttgggaattcctggcatgagatcttgaaatgcatcagccagctggagctcgctcagctgataggaaccggtgtgaagacgcgctacctgtctggatctgggcgtgaaagagaagggagcctgaagggccacacattggcaggagaagagttcatgggccttggcctcggtaatttggtgagtggcggagtggataaaagacagatggccagcttccaagaatcggttggtgagaccagctcgcagagtgtggttgtagctgtggacaggatttttactgggtctaccagactggatggaaatgcaatagttgactttgtccgctggctgtgtgctgtgtccatggatgaactggcttccccccaccatcctcgcatgttcagcttgcagaagattgtggagatatcatactacaacatgaatcggatccgactacagtggtctcgaatatggcatgtgattggagatcacttcaataaggttggctgcaaccctaatgaagatgtggctatctttgctgttgactcattaaggcaactctccatgaagtttcttgagaagggtgaattagccaacttccgtttccagaaagattttctgaggccctttgagcatattatgaagaaaaacaggtctcccaccatccgggacatggcgatccgctgcattgcccagatggtgaactcccaggcggccaacatccgctcaggttggaagaacatctttgccgtgttccaccaggcagcctctgatcatgatgggaacattgtggagctggccttccagaccacttgccacattgtcacaactattttccagcaccattttcctgcagccatcgattcctttcaggatgctgtgaagtgcttatcagagttcgcctgcaacgccgctttccctgacacgagcatggaagcgattcggctcatccgcttctgtggcaaatacgtctctgagaggcctcgggtgctacaagaatacacaagtgatgacatgaatgtagctcctggtgacagagtctgggtccgaggctggttccccatcttattcgaactctcctgcatcattaatagatgcaagttagatgtacgaacaaggggactcacagtcatgtttgagatcatgaagagctatggccacacctttgaaaagcactggtggcaggacctgttcagaatcgtgtttcggatttttgacaatatgaaactccctgagcaactgtcagagaaatctgagtggatgacaacaacctgcaatcacgcactttatgctatttgtgatgtttttacccagttttatgaagctttgaatgaagttcttctttctgatgtatttgcacaattgcagtggtgtgtcaaacaagataatgaacagttggcgcgatcaggtacaaattgcttagaaaacttagtaatatccaatggagagaaattcagtcctgaagtctgggatgaaacctgcaactgtatgttggatattttcaaaacaaccatcccacatgttttgctgacatggagacctgtaggaatggaggaagattcatcagaaaagcatttggatgtggatctggaccgccagtctttaagcagcatagataaaaatccctctgagaggggacagagccagctctctaacccaacagatgacagctggaagggtagaccatacgcaaatcagaaactgtttgccagcctcctcatcaagtgtgtggtccagttggaattgatacagaccattgacaacattgtgttctaccctgcgacgagcaaaaaggaggatgcagagcacatggttgccgcccagcaagacacgctggatgcagatatccacatagagacggaggatcagggcatgtataagtacatgtcttcccagcacctcttcaagctgttggactgtttgcaggaatcccattcattctcaaaggccttcaactccaattacgagcagcggactgtcctgtggcgagcaggttttaagggcaagtctaaacccaatcttctaaaacaagaaaccagcagcctggcctgttgtttgaggatcctgtttcgaatgtatgttgatgagaaccgcagggattcctgggaagaaatacagcagagacttttaactgtttgcagtgaagctcttgcctatttcatcactgtgaattctgagagccatcgggaggcctggacaagtctcttgttgttacttctaactaaaaccctcaaaataaatgatgaaaagagtttgacctgatccctgagctccgagcagttctgcggaagttcttcctacggataggtgttgtgtataagatatggataccagaagagccatcacaggtaccagcagcactgtcaccagtgtggtagccctggctgcccaggccagtgctgcagctctgcagaatgttcagcatgccatttctgactggcacatctcgtgaagtttcatagaaacaaggagttggcatcttggatctcagaatggcctggaaacggatggcctctacgctgttccatcacagtctccaactaaggcttatggtatttcattaaactgttgcatacccagttagcacagtaggtggggagtctgcttcatttctatcattccatttttctgattaaactgtcaaatctgtcattgcatatgccatcgttttctagcaaaatcccatgattggctataaacgttttgtaagaagtcactctccttgaaaatactgaacatagctgtataggtttgtgattattagagaatatgttaataaaacttcttgtaacggctaactgccacctaaaatatgctgggttttctgttgtttgagtgtgttagagaaatttgaatgtttttgtcagttacgagtcagccgtaattagattagtttaaggacaggtcaggattagagaagagttgtttttgtgttttgttaatgtctgagtgatttttaaagtattttacaaaaagatattgaaaatttggttgaaggcagagtttagtaattaagttagaattaagagttttgcgaggttaaaaaaatgtgcctcgtggatctccctgttttagtaacatggagagaaaaagtctacacgaaaaagtgaacaatttaatgaagatgattagccttccttgaaataagtatttgtggatgggtgttaaattaaaatttccagaatacactgtccatctcacacactctgaaatctaatatatgaagtagtaatgaaaatgaagtagtaatttaaccagagttcatttatccttgaataaacctttttattttcacctcagaaaagtgagtgtactggcagttagtgtcactgctttgcacagtccccattaaaggaccctccagagagggacagtaactgtgcatgagaagccgctcccataagcctcctcagccagatgtcatgggtggaactggagctgtgtcggggccagcacagctgaactgtgacaatggcaggaggtggcatgtgcccagcacttccattaatctgagcctaggagttgaattctttggcaaggttggattctgaggtccttattatgttgaatgatggtgcaatactctcacctgcagtagaactgagttctgctgcagcttgtgtaaaagtgggcagtacacaagtacgtcccaaagcctgtgagcagtatacgtggatgctcacccatgagaaggagcacacacgcctcattctctgccctcacccactgctcacctagagcatcgctgagcgttagacaaagtgttacacagaatgattaaaactttcagacttctacctatgctctttagtcctgtaaattgggttgtattgatgtcaactctggtgccttagaagttagtagtttgggaacctatctgtaaaatcagatgttttttctttgtagagaaggatttctggtgcttttgcttactaagagaccgatattcttaagttgttttcttgttttaacagccttgagaaatgtttggttttggccagcagaattcttgtctacttttttctttcccaaaaagtgttttttaatttctctaccaaagaaaaaatgagcaggtttaggtttttacatgacttatatacattagataaaaggagctgtataatttagcaggaagggactatgggagaatactttactgtgagtggaaaatgttagcacatttgactggtttgccctggaatccactgcacctttacactgcaccatgaaacctacactccctggtatcatagcgcgtcatcacctcaacaagtcagtcgtctccattgatatttgtacaaaaggtatacatggggaacacgtgttcattcattaagtccatcttgcgtgcagctatatccctgattggttatttttcctttccttctgaggttctcatgtcattttcttcatcggatgtgactaaaatttttctggtgtcttctgccctctctttaattttgcctcttgaggggtagcagatgtgtcagtgcattttattacttgctgaaacattcaggcttacatttcttattagtttagtattttaaaagatttaattttctgaatgaggcatttgaattgtaccagcaatggacttttaaaaaattggatgtaaaaccattcagggtgatttttcttgtcagtggacagtgacgaacagagatttgaaatcccttacctccaataataagccattcagcctaaattcatttttatgaataaatctcttctttctcatggtaaatgtggcttgtgccactcaaacactagtgaaagggtatgtacaaccgcaacatcaggccaggacaccatttatttaaccaagtaatggaggagagtgaaacattttccaaggccttatttctttttcagaatgctttaagtgttgattatatgtgctgggtctctagagaagtttttatttgttacaatactgctgctttgagcaattttgtttctcttcattgtctgttagggaaatcaccagctttggcatcttaacaacaaacagtggatgggtaatttttatttctgatacgcatctttagagtcaaatatatcttttccctgtactcctcatgtacaaccaaagaacatacattatgaaaattgtattataatatctggaaacacaacattttcctctggcaggtgacttttgtacgaaatgaaaaaaaaaaaacctgtattttttttgttgttcttttgtgattaaggatatacatttagtagtctttgttattaaaggaacctgctgataagtacaagtgtgaccatctcattcaaatgtttgttgttatgatgcaaatggatattggtttcaatagaagctggatccttaatactgcattttctgaattctgttttaatatttgtgttaaagtagacatagctgaactcacatggaatcctggagttttgttatcagcagctttgcagtttgggaaacaaagaaaccaaagctgagtgttttaaagaatgaacatatctggaaatccttgctctcaaaacaaaacaatataatctatcaaaggtgttttactcagtgttctaatttttaaaaaattttatctgcatatttgcatcaaatatttatgtgtaaaatgtatgttttacctccttaaaatgcctaaaagttagttaatagttactttggtttaacctatacacaatgattaagtgcatttaatattggtaatttaatgaaaaccattccttgcccaatggatgtataaatttttgaaagaataagcagaattatataatatgaaatgctatgtaaagttttctatgtaaaaatattatgtataatactattaaaatatcccatgctttgatcaggtggtacatcaataaaattttaaaaagtaaaaaagttac

SEQ ID NO: 307732 - DNA, 5735 bp, Homo sapiens
tacaccctcctcggcctcccaaagtgctgagattacaggtgtgagccaccacacccggtctaatgtttattttgtctggaattatcttcctaggatttttactgggtctaccagactggatggaaatgcaatagttgactttgtccgctggctgtgtgctgtgtccatggatgaactggcttccccccaccatcctcgcatgttcagcttgcagaagattgtggagatatcatactacaacatgaatcggatccgactacagtggtctcgaatatggcatgtgattggagatcacttcaataaggttggctgcaaccctaatgaagatgtggctatctttgctgttgactcattaaggcaactctccatgaagtttcttgagaagggtgaattagccaacttccgtttccagaaagattttctgaggccctttgagcatattatgaagaaaaacaggtctcccaccatccgggacatggcgatccgctgcattgcccagatggtgaactcccaggcggccaacatccgctcaggttggaagaacatctttgccgtgttccaccaggcagcctctgatcatgatgggaacattgtggagctggccttccagaccacttgccacattgtcacaactattttccagcaccattttcctgcagccatcgattcctttcaggatgctgtgaagtgcttatcagagttcgcctgcaacgccgctttccctgacacgagcatggaagcgattcggctcatccgcttctgtggcaaatacgtctctgagaggcctcgggtgctacaagaatacacaagtgatgacatgaatgtagctcctggtgacagagtctgggtccgaggctggttccccatcttattcgaactctcctgcatcattaatagatgcaagttagatgtacgaacaaggggactcacagtcatgtttgagatcatgaagagctatggccacacctttgaaaagcactggtggcaggacctgttcagaatcgtgtttcggatttttgacaatatgaaactccctgagcaactgtcagagaaatctgagtggatgacaacaacctgcaatcacgcactttatgctatttgtgatgtttttacccagttttatgaagctttgaatgaagttcttctttctgatgtatttgcacaattgcagtggtgtgtcaaacaagataatgaacagttggcgcgatcaggtacaaattgcttagaaaacttagtaatatccaatggagagaaattcagtcctgaagtctgggatgaaacctgcaactgtatgttggatattttcaaaacaaccatcccacatgttttgctgacatggagacctgtaggaatggaggaagattcatcagaaaagcatttggatgtggatctggaccgccagtctttaagcagcatagataaaaatccctctgagaggggacagagccagctctctaacccaacagatgacagctggaagggtagaccatacgcaaatcagaaactgtttgccagcctcctcatcaagtgtgtggtccagttggaattgatacagaccattgacaacattgtgttctaccctgcgacgagcaaaaaggaggatgcagagcacatggttgccgcccagcaagacacgctggatgcagatatccacatagagacggaggatcagggcatgtataagtacatgtcttcccagcacctcttcaagctgttggactgtttgcaggaatcccattcattctcaaaggccttcaactccaattacgagcagcggactgtcctgtggcgagcaggttttaagggcaagtctaaacccaatcttctaaaacaagaaaccagcagcctggcctgttgtttgaggatcctgtttcgaatgtatgttgatgagaaccgcagggattcctgggaagaaatacagcagagacttttaactgtttgcagtgaagctcttgcctatttcatcactgtgaattctgagagccatcgggaggcctggacaagtctcttgttgttacttctaactaaaaccctcaaaataaatgatgaaaagttcaaagcacatgcttcaatgtactacccctacttgtgtgaaattatgcagtttgacctgatccctgagctccgagcagttctgcggaagttcttcctacggataggtgttgtgtataagatatggataccagaagagccatcacaggtaccagcagcactgtcaccagtgtggtagccctggctgcccaggccagtgctgcagctctgcagaatgttcagcatgccatttctgactggcacatctcgtgaagtttcatagaaacaaggagttggcatcttggatctcagaatggcctggaaacggatggcctctacgctgttccatcacagtctccaactaaggcttatggtatttcattaaactgttgcatacccagttagcacagtaggtggggagtctgcttcatttctatcattccatttttctgattaaactgtcaaatctgtcattgcatatgccatcgttttctagcaaaatcccatgattggctataaacgttttgtaagaagtcactctccttgaaaatactgaacatagctgtataggtttgtgattattagagaatatgttaataaaacttcttgtaacggctaactgccacctaaaatatgctgggttttctgttgtttgagtgtgttagagaaatttgaatgtttttgtcagttacgagtcagccgtaattagattagtttaaggacaggtcaggattagagaagagttgtttttgtgttttgttaatgtctgagtgatttttaaagtattttacaaaaagatattgaaaatttggttgaaggcagagtttagtaattaagttagaattaagagttttgcgaggttaaaaaaatgtgcctcgtggatctccctgttttagtaacatggagagaaaaagtctacacgaaaaagtgaacaatttaatgaagatgattagccttccttgaaataagtatttgtggatgggtgttaaattaaaatttccagaatacactgtccatctcacacactctgaaatctaatatatgaagtagtaatgaaaatgaagtagtaatttaaccagagttcatttatccttgaataaacctttttattttcacctcagaaaagtgagtgtactggcagttagtgtcactgctttgcacagtccccattaaaggaccctccagagagggacagtaactgtgcatgagaagccgctcccataagcctcctcagccagatgtcatgggtggaactggagctgtgtcggggccagcacagctgaactgtgacaatggcaggaggtggcatgtgcccagcacttccattaatctgagcctaggagttgaattctttggcaaggttggattctgaggtccttattatgttgaatgatggtgcaatactctcacctgcagtagaactgagttctgctgcagcttgtgtaaaagtgggcagtacacaagtacgtcccaaagcctgtgagcagtatacgtggatgctcacccatgagaaggagcacacacgcctcattctctgccctcacccactgctcacctagagcatcgctgagcgttagacaaagtgttacacagaatgattaaaactttcagacttctacctatgctctttagtcctgtaaattgggttgtattgatgtcaactctggtgccttagaagttagtagtttgggaacctatctgtaaaatcagatgttttttctttgtagagaaggatttctggtgcttttgcttactaagagaccgatattcttaagttgttttcttgttttaacagccttgagaaatgtttggttttggccagcagaattcttgtctacttttttctttcccaaaaagtgttttttaatttctctaccaaagaaaaaatgagcaggtttaggtttttacatgacttatatacattagataaaaggagctgtataatttagcaggaagggactatgggagaatactttactgtgagtggaaaatgttagcacatttgactggtttgccctggaatccactgcacctttacactgcaccatgaaacctacactccctggtatcatagcgcgtcatcacctcaacaagtcagtcgtctccattgatatttgtacaaaaggtatacatggggaacacgtgttcattcattaagtccatcttgcgtgcagctatatccctgattggttatttttcctttccttctgaggttctcatgtcattttcttcatcggatgtgactaaaatttttctggtgtcttctgccctctctttaattttgcctcttgaggggtagcagatgtgtcagtgcattttattacttgctgaaacattcaggcttacatttcttattagtttagtattttaaaagatttaattttctgaatgaggcatttgaattgtaccagcaatggacttttaaaaaattggatgtaaaaccattcagggtgatttttcttgtcagtggacagtgacgaacagagatttgaaatcccttacctccaataataagccattcagcctaaattcatttttatgaataaatctcttctttctcatggtaaatgtggcttgtgccactcaaacactagtgaaagggtatgtacaaccgcaacatcaggccaggacaccatttatttaaccaagtaatggaggagagtgaaacattttccaaggccttatttctttttcagaatgctttaagtgttgattatatgtgctgggtctctagagaagtttttatttgttacaatactgctgctttgagcaattttgtttctcttcattgtctgttagggaaatcaccagctttggcatcttaacaacaaacagtggatgggtaatttttatttctgatacgcatctttagagtcaaatatatcttttccctgtactcctcatgtacaaccaaagaacatacattatgaaaattgtattataatatctggaaacacaacattttcctctggcaggtgacttttgtacgaaatgaaaaaaaaaaaacctgtattttttttgttgttcttttgtgattaaggatatacatttagtagtctttgttattaaaggaacctgctgataagtacaagtgtgaccatctcattcaaatgtttgttgttatgatgcaaatggatattggtttcaatagaagctggatccttaatactgcattttctgaattctgttttaatatttgtgttaaagtagacatagctgaactcacatggaatcctggagttttgttatcagcagctttgcagtttgggaaacaaagaaaccaaagctgagtgttttaaagaatgaacatatctggaaatccttgctctcaaaacaaaacaatataatctatcaaaggtgttttactcagtgttctaatttttaaaaaattttatctgcatatttgcatcaaatatttatgtgtaaaatgtatgttttacctccttaaaatgcctaaaagttagttaatagttactttggtttaacctatacacaatgattaagtgcatttaatattggtaatttaatgaaaaccattccttgcccaatggatgtataaatttttgaaagaataagcagaattatataatatgaaatgctatgtaaagttttctatgtaaaaatattatgtataatactattaaaatatcccatgctttgatcaggtggtacatcaataaaattttaaaaagtaaaaaagttac

SEQ ID NO: 307733 - DNA, 4651 bp, Homo sapiens
acttgctcgcataaaaaatttgtcacacttattgttaaatcctaatatgtagagaaatgtcctctgggttggaataggaaaatagggaattttaatgggaggagaagtaatttaaattcttaatctctccattgcagcctgtgaggcatgctacattaagcatgtagtatcattttattttgagctaagcaaggcacttaaatacaggctggaccagccgtgttaaaacaggcacatctctgcccaaattatcatgaagaaaagtgagcattgtgtttccctctggtttacatttaggatgtggatctggaccgccagtctttaagcagcatagataaaaatccctctgagaggggacagagccagctctctaacccaacagatgacagctggaagggtagaccatacgcaaatcagaaactgtttgccagcctcctcatcaagtgtgtggtccagttggaattgatacagaccattgacaacattgtgttctaccctgcgacgagcaaaaaggaggatgcagagcacatggttgccgcccagcaagacacgctggatgcagatatccacatagagacggaggatcagggcatgtataagtacatgtcttcccagcacctcttcaagctgttggactgtttgcaggaatcccattcattctcaaaggccttcaactccaattacgagcagcggactgtcctgtggcgagcaggttttaagggcaagtctaaacccaatcttctaaaacaagaaaccagcagcctggcctgttgtttgaggatcctgtttcgaatgtatgttgatgagaaccgcagggattcctgggaagaaatacagcagagacttttaactgtttgcagtgaagctcttgcctatttcatcactgtgaattctgagagccatcgggaggcctggacaagtctcttgttgttacttctaactaaaaccctcaaaataaatgatgaaaagttcaaagcacatgcttcaatgtactacccctacttgtgtgaaattatgcagtttgacctgatccctgagctccgagcagttctgcggaagttcttcctacggataggtgttgtgtataagatatggataccagaagagccatcacaggtaccagcagcactgtcaccagtgtggtagccctggctgcccaggccagtgctgcagctctgcagaatgttcagcatgccatttctgactggcacatctcgtgaagtttcatagaaacaaggagttggcatcttggatctcagaatggcctggaaacggatggcctctacgctgttccatcacagtctccaactaaggcttatggtatttcattaaactgttgcatacccagttagcacagtaggtggggagtctgcttcatttctatcattccatttttctgattaaactgtcaaatctgtcattgcatatgccatcgttttctagcaaaatcccatgattggctataaacgttttgtaagaagtcactctccttgaaaatactgaacatagctgtataggtttgtgattattagagaatatgttaataaaacttcttgtaacggctaactgccacctaaaatatgctgggttttctgttgtttgagtgtgttagagaaatttgaatgtttttgtcagttacgagtcagccgtaattagattagtttaaggacaggtcaggattagagaagagttgtttttgtgttttgttaatgtctgagtgatttttaaagtattttacaaaaagatattgaaaatttggttgaaggcagagtttagtaattaagttagaattaagagttttgcgaggttaaaaaaatgtgcctcgtggatctccctgttttagtaacatggagagaaaaagtctacacgaaaaagtgaacaatttaatgaagatgattagccttccttgaaataagtatttgtggatgggtgttaaattaaaatttccagaatacactgtccatctcacacactctgaaatctaatatatgaagtagtaatgaaaatgaagtagtaatttaaccagagttcatttatccttgaataaacctttttattttcacctcagaaaagtgagtgtactggcagttagtgtcactgctttgcacagtccccattaaaggaccctccagagagggacagtaactgtgcatgagaagccgctcccataagcctcctcagccagatgtcatgggtggaactggagctgtgtcggggccagcacagctgaactgtgacaatggcaggaggtggcatgtgcccagcacttccattaatctgagcctaggagttgaattctttggcaaggttggattctgaggtccttattatgttgaatgatggtgcaatactctcacctgcagtagaactgagttctgctgcagcttgtgtaaaagtgggcagtacacaagtacgtcccaaagcctgtgagcagtatacgtggatgctcacccatgagaaggagcacacacgcctcattctctgccctcacccactgctcacctagagcatcgctgagcgttagacaaagtgttacacagaatgattaaaactttcagacttctacctatgctctttagtcctgtaaattgggttgtattgatgtcaactctggtgccttagaagttagtagtttgggaacctatctgtaaaatcagatgttttttctttgtagagaaggatttctggtgcttttgcttactaagagaccgatattcttaagttgttttcttgttttaacagccttgagaaatgtttggttttggccagcagaattcttgtctacttttttctttcccaaaaagtgttttttaatttctctaccaaagaaaaaatgagcaggtttaggtttttacatgacttatatacattagataaaaggagctgtataatttagcaggaagggactatgggagaatactttactgtgagtggaaaatgttagcacatttgactggtttgccctggaatccactgcacctttacactgcaccatgaaacctacactccctggtatcatagcgcgtcatcacctcaacaagtcagtcgtctccattgatatttgtacaaaaggtatacatggggaacacgtgttcattcattaagtccatcttgcgtgcagctatatccctgattggttatttttcctttccttctgaggttctcatgtcattttcttcatcggatgtgactaaaatttttctggtgtcttctgccctctctttaattttgcctcttgaggggtagcagatgtgtcagtgcattttattacttgctgaaacattcaggcttacatttcttattagtttagtattttaaaagatttaattttctgaatgaggcatttgaattgtaccagcaatggacttttaaaaaattggatgtaaaaccattcagggtgatttttcttgtcagtggacagtgacgaacagagatttgaaatcccttacctccaataataagccattcagcctaaattcatttttatgaataaatctcttctttctcatggtaaatgtggcttgtgccactcaaacactagtgaaagggtatgtacaaccgcaacatcaggccaggacaccatttatttaaccaagtaatggaggagagtgaaacattttccaaggccttatttctttttcagaatgctttaagtgttgattatatgtgctgggtctctagagaagtttttatttgttacaatactgctgctttgagcaattttgtttctcttcattgtctgttagggaaatcaccagctttggcatcttaacaacaaacagtggatgggtaatttttatttctgatacgcatctttagagtcaaatatatcttttccctgtactcctcatgtacaaccaaagaacatacattatgaaaattgtattataatatctggaaacacaacattttcctctggcaggtgacttttgtacgaaatgaaaaaaaaaaaacctgtattttttttgttgttcttttgtgattaaggatatacatttagtagtctttgttattaaaggaacctgctgataagtacaagtgtgaccatctcattcaaatgtttgttgttatgatgcaaatggatattggtttcaatagaagctggatccttaatactgcattttctgaattctgttttaatatttgtgttaaagtagacatagctgaactcacatggaatcctggagttttgttatcagcagctttgcagtttgggaaacaaagaaaccaaagctgagtgttttaaagaatgaacatatctggaaatccttgctctcaaaacaaaacaatataatctatcaaaggtgttttactcagtgttctaatttttaaaaaattttatctgcatatttgcatcaaatatttatgtgtaaaatgtatgttttacctccttaaaatgcctaaaagttagttaatagttactttggtttaacctatacacaatgattaagtgcatttaatattggtaatttaatgaaaaccattccttgcccaatggatgtataaatttttgaaagaataagcagaattatataatatgaaatgctatgtaaagttttctatgtaaaaatattatgtataatactattaaaatatcccatgctttgatcaggtggtacatcaataaaattttaaaaagtaaaaaagttac

SEQ ID NO: 307734 - DNA, 4255 bp, Homo sapiens
ttatcatctaacatagatcagaaactgtttgccagcctcctcatcaagtgtgtggtccagttggaattgatacagaccattgacaacattgtgttctaccctgcgacgagcaaaaaggaggatgcagagcacatggttgccgcccagcaagacacgctggatgcagatatccacatagagacggaggatcagggcatgtataagtacatgtcttcccagcacctcttcaagctgttggactgtttgcaggaatcccattcattctcaaaggccttcaactccaattacgagcagcggactgtcctgtggcgagcaggttttaagggcaagtctaaacccaatcttctaaaacaagaaaccagcagcctggcctgttgtttgaggatcctgtttcgaatgtatgttgatgagaaccgcagggattcctgggaagaaatacagcagagacttttaactgtttgcagtgaagctcttgcctatttcatcactgtgaattctgagagccatcgggaggcctggacaagtctcttgttgttacttctaactaaaaccctcaaaataaatgatgaaaagttcaaagcacatgcttcaatgtactacccctacttgtgtgaaattatgcagtttgacctgatccctgagctccgagcagttctgcggaagttcttcctacggataggtgttgtgtataagatatggataccagaagagccatcacaggtaccagcagcactgtcaccagtgtggtagccctggctgcccaggccagtgctgcagctctgcagaatgttcagcatgccatttctgactggcacatctcgtgaagtttcatagaaacaaggagttggcatcttggatctcagaatggcctggaaacggatggcctctacgctgttccatcacagtctccaactaaggcttatggtatttcattaaactgttgcatacccagttagcacagtaggtggggagtctgcttcatttctatcattccatttttctgattaaactgtcaaatctgtcattgcatatgccatcgttttctagcaaaatcccatgattggctataaacgttttgtaagaagtcactctccttgaaaatactgaacatagctgtataggtttgtgattattagagaatatgttaataaaacttcttgtaacggctaactgccacctaaaatatgctgggttttctgttgtttgagtgtgttagagaaatttgaatgtttttgtcagttacgagtcagccgtaattagattagtttaaggacaggtcaggattagagaagagttgtttttgtgttttgttaatgtctgagtgatttttaaagtattttacaaaaagatattgaaaatttggttgaaggcagagtttagtaattaagttagaattaagagttttgcgaggttaaaaaaatgtgcctcgtggatctccctgttttagtaacatggagagaaaaagtctacacgaaaaagtgaacaatttaatgaagatgattagccttccttgaaataagtatttgtggatgggtgttaaattaaaatttccagaatacactgtccatctcacacactctgaaatctaatatatgaagtagtaatgaaaatgaagtagtaatttaaccagagttcatttatccttgaataaacctttttattttcacctcagaaaagtgagtgtactggcagttagtgtcactgctttgcacagtccccattaaaggaccctccagagagggacagtaactgtgcatgagaagccgctcccataagcctcctcagccagatgtcatgggtggaactggagctgtgtcggggccagcacagctgaactgtgacaatggcaggaggtggcatgtgcccagcacttccattaatctgagcctaggagttgaattctttggcaaggttggattctgaggtccttattatgttgaatgatggtgcaatactctcacctgcagtagaactgagttctgctgcagcttgtgtaaaagtgggcagtacacaagtacgtcccaaagcctgtgagcagtatacgtggatgctcacccatgagaaggagcacacacgcctcattctctgccctcacccactgctcacctagagcatcgctgagcgttagacaaagtgttacacagaatgattaaaactttcagacttctacctatgctctttagtcctgtaaattgggttgtattgatgtcaactctggtgccttagaagttagtagtttgggaacctatctgtaaaatcagatgttttttctttgtagagaaggatttctggtgcttttgcttactaagagaccgatattcttaagttgttttcttgttttaacagccttgagaaatgtttggttttggccagcagaattcttgtctacttttttctttcccaaaaagtgttttttaatttctctaccaaagaaaaaatgagcaggtttaggtttttacatgacttatatacattagataaaaggagctgtataatttagcaggaagggactatgggagaatactttactgtgagtggaaaatgttagcacatttgactggtttgccctggaatccactgcacctttacactgcaccatgaaacctacactccctggtatcatagcgcgtcatcacctcaacaagtcagtcgtctccattgatatttgtacaaaaggtatacatggggaacacgtgttcattcattaagtccatcttgcgtgcagctatatccctgattggttatttttcctttccttctgaggttctcatgtcattttcttcatcggatgtgactaaaatttttctggtgtcttctgccctctctttaattttgcctcttgaggggtagcagatgtgtcagtgcattttattacttgctgaaacattcaggcttacatttcttattagtttagtattttaaaagatttaattttctgaatgaggcatttgaattgtaccagcaatggacttttaaaaaattggatgtaaaaccattcagggtgatttttcttgtcagtggacagtgacgaacagagatttgaaatcccttacctccaataataagccattcagcctaaattcatttttatgaataaatctcttctttctcatggtaaatgtggcttgtgccactcaaacactagtgaaagggtatgtacaaccgcaacatcaggccaggacaccatttatttaaccaagtaatggaggagagtgaaacattttccaaggccttatttctttttcagaatgctttaagtgttgattatatgtgctgggtctctagagaagtttttatttgttacaatactgctgctttgagcaattttgtttctcttcattgtctgttagggaaatcaccagctttggcatcttaacaacaaacagtggatgggtaatttttatttctgatacgcatctttagagtcaaatatatcttttccctgtactcctcatgtacaaccaaagaacatacattatgaaaattgtattataatatctggaaacacaacattttcctctggcaggtgacttttgtacgaaatgaaaaaaaaaaaacctgtattttttttgttgttcttttgtgattaaggatatacatttagtagtctttgttattaaaggaacctgctgataagtacaagtgtgaccatctcattcaaatgtttgttgttatgatgcaaatggatattggtttcaatagaagctggatccttaatactgcattttctgaattctgttttaatatttgtgttaaagtagacatagctgaactcacatggaatcctggagttttgttatcagcagctttgcagtttgggaaacaaagaaaccaaagctgagtgttttaaagaatgaacatatctggaaatccttgctctcaaaacaaaacaatataatctatcaaaggtgttttactcagtgttctaatttttaaaaaattttatctgcatatttgcatcaaatatttatgtgtaaaatgtatgttttacctccttaaaatgcctaaaagttagttaatagttactttggtttaacctatacacaatgattaagtgcatttaatattggtaatttaatgaaaaccattccttgcccaatggatgtataaatttttgaaagaataagcagaattatataatatgaaatgctatgtaaagttttctatgtaaaaatattatgtataatactattaaaatatcccatgctttgatcaggtggtacatcaataaaattttaaaaagtaaaaaagttac

SEQ ID NO: 307735 - DNA, 606 bp, Homo sapiens
  misc_feature (38)..(38): n is a, c, g, or t
atagtacagtatacgaagtcgagccggtaccccagttntagaagtttcaatagaagctggatccttaatactgcattttctgaattctgttttaatatttgtgttaaagtagacatagctgaactcacatggaatcctggagttttgttatcagcagctttgcagtttgggaaacaaagaaaccaaagctgagtgttttaaagaatgaacatatctggaaatccttgctctcaaaacaaaacaatataatctatcaaaggtgttttactcagtgttctaatttttaaaaaattttatctgcatatttgcatcaaatatttatgtgtaaaatgtatgttttacctccttaaaatgcctaaaagttagttaatagttactttggtttaacctatacacaatgattaagtgcatttaatattggtaatttaatgaaaaccattccttgcccaatggatgtataaatttttgaaagaataagcagaattatataatatgaaatgctatgtaaagttttctatgtaaaaatattatgtataatactattaaaatatcccatgctttgatcaggtggtacatcaataaaattttaaaaagtaaaaaagttac

SEQ ID NO: 307736 - DNA, 4902 bp, Homo sapiens
atgcaggagagccagaccaagagcatgttcgtgtcccgggccctggagaagatcctagccgacaaggaggtgaagcggccccagcactcccagctgcgcagggcctgccaggtggcgctcgatgaaattaaagcagaaatagaaaagcagaggcttggcactgctgcaccaccaaaggcaaacttcattgaagctgacaagtattttcttccattcgagctagcttgccagtccaagtccccaagggtagtcagcacatcccttgactgcttgcagaaactcatcgcatacgggcacatcactggcaacgcccctgacagtggagcccctgggaagcggctgatcgacagaattgttgaaaccatttgcagttgttttcagggccctcagactgatgaaggggttcagttacaaataattaaggctcttctgactgcagtgacttccccacacattgaaattcatgagggtactatcctgcagacagtgagaacatgttacaatatctatttggccagcaaaaatctcatcaatcaaaccactgccaaggctacccttactcagatgctgaacgtcattttcacccgcatggaaaaccaagtgttgcaggaggccagagaactggaaaaaccaatccagtcaaaaccccagtcccctgtgatccaagctgcagcagtatccccaaagttcgttcgtttgaagcacagtcaggcacaaagcaaaccaacaactcccgaaaaaacagatttaaccaacggtgaacatgccaggagtgattctggaaaagtaagcacagaaaatggagacgcacccagagaaagaggctcatcactgtcagggactgatgacggagcccaggaggtggtgaaggacatcttggaagatgtagtcacatctgccattaaagaagcagcggaaaagcatggtctgacagaacctgagagagttctaggtgaactggagtgccaggaatgtgctattcccccaggagttgatgaaaactcacagaccaacgggatagccgatgacaggcagtccttgtcgtcagcagataatctggaatcggatgcacaaggacatcaagtggctgccaggttctcccacgttctgcagaaggatgccttccttgtgttccgctccctgtgcaagctgtccatgaaaccccttggtgaaggccctccagacccaaaatcccatgagctgcgttccaaggtggtttccctgcagctgctcctctctgtgttgcaaaatgctggccccgtattcaggactcacgagatgttcatcaatgcaatcaagcaatatctctgtgtggccttgtccaaaaacggcgtctcttcagtgcctgatgtctttgagctctctcttgccatttttcttactcttctttcaaactttaaaatgcacttgaaaatgcagatagaggtctttttcaaagagattttcctgaacattttagaaacatcaacaagttcttttgagcacaggtggatggtcattcagactctgacgaggatctgtgcagatgcccagtgtgttgtggatatttatgtcaactacgactgtgatttaaatgctgctaacatttttgagcgccttgtaaatgatttatccaaaattgctcagggaagaagtggacatgagctgggaatgacacctctgcaggagctcagcctgaggaagaaaggcctggagtgcctcgtgtccattctcaagtgcatggtggagtggagcaaagacctgtatgtgaatcccaaccaccagaccagcctcggtcaggagaggctcacggatcaggaaataggggatgggaaaggccttgacatggcaagacggtgtagtgtgacgtccatggagtccacagtgtcctcggggacccagacaactgttcaggatgaccctgagcaatttgaggtcatcaagcaacaaaaagaaatcattgaacacggcatcgagctgttcaacaagaaacccaagagggggatccagtttctccaggagcagggcatgctgggaacgtcagttgaagacatagcccaattcctgcaccaggaggagcgcctggattccacccaagtaggcgattttctgggagatagcgcaaggttcaacaaggaggtgatgtatgcctacgtggaccaacttgacttctgtgaaaaagaatttgtctcagccctgcggacattcctagaaggtttccgcctacctggagaagcccaaaagattgaccgattaatggagaagtttgccgcaagatacatagaatgcaaccaagggcaaactctgtttgctagtgctgacactgcttatgtcctagcgtattcaattattatgctgactacagacttgcacagtcctcaggtaaaaaataaaatgacgaaagagcagtatattaaaatgaatcggggtatcaatgatagtaaagatctgccagaagagtatctctcaagcatctatgaagagatagaaggcaagaaaattgcaatgaaagaaacaaaagagctaacgattgcaaccaaatctactaagcagaatgtagctagtgaaaagcagcggcggctgctgtacaacttagagatggagcaaatggctaaaacagccaaagctctgatggaggctgtgagccatgccaaagccccgtttaccagtgccactcacctggaccatgtccggccaatgttcaaactggtgtggacgccactattggcagcctacagcatcggactccagaactgtgatgacactgaagtggcctccttgtgtttggaaggcatccgatgtgcaatccgaatcgcctgcatctttggaatgcagctggaacgagatgcctatgttcaggctcttgctcgcttctccctactcacagccagctccagcatcacaaaaatgaagcagaaaaacatcgacaccattaagacgcttatcacagtggctcacaccgatggcaactaccttgggaattcctggcatgagatcttgaaatgcatcagccagctggagctcgctcagctgataggaaccggtgtgaagacgcgctacctgtctggatctgggcgtgaaagagaagggagcctgaagggccacacattggcaggagaagagttcatgggccttggcctcggtaatttggtgagtggcggagtggataaaagacagatggccagcttccaagaatcggttggtgagaccagctcgcagagtgtggttgtagctgtggacaggatttttactgggtctaccagactggatggaaatgcaatagttgactttgtccgctggctgtgtgctgtgtccatggatgaactggcttccccccaccatcctcgcatgttcagcttgcagaagattgtggagatatcatactacaacatgaatcggatccgactacagtggtctcgaatatggcatgtgattggagatcacttcaataaggttggctgcaaccctaatgaagatgtggctatctttgctgttgactcattaaggcaactctccatgaagtttcttgagaagggtgaattagccaacttccgtttccagaaagattttctgaggccctttgagcatattatgaagaaaaacaggtctcccaccatccgggacatggcgatccgctgcattgcccagatggtgaactcccaggcggccaacatccgctcaggttggaagaacatctttgccgtgttccaccaggcagcctctgatcatgatgggaacattgtggagctggccttccagaccacttgccacattgtcacaactattttccagcaccattttcctgcagccatcgattcctttcaggatgctgtgaagtgcttatcagagttcgcctgcaacgccgctttccctgacacgagcatggaagcgattcggctcatccgcttctgtggcaaatacgtctctgagaggcctcgggtgctacaagaatacacaagtgatgacatgaatgtagctcctggtgacagagtctgggtccgaggctggttccccatcttattcgaactctcctgcatcattaatagatgcaagttagatgtacgaacaaggggactcacagtcatgtttgagatcatgaagagctatggccacacctttgaaaagcactggtggcaggacctgttcagaatcgtgtttcggatttttgacaatatgaaactccctgagcaactgtcagagaaatctgagtggatgacaacaacctgcaatcacgcactttatgctatttgtgatgtttttacccagttttatgaagctttgaatgaagttcttctttctgatgtatttgcacaattgcagtggtgtgtcaaacaagataatgaacagttggcgcgatcaggtacaaattgcttagaaaacttagtaatatccaatggagagaaattcagtcctgaagtctgggatgaaacctgcaactgtatgttggatattttcaaaacaaccatcccacatgttttgctgacatggagacctgtaggaatggaggaagattcatcagaaaagcatttggatgtggatctggaccgccagtctttaagcagcatagataaaaatccctctgagaggggacagagccagctctctaacccaacagatgacagctggaagggtagaccatacgcaacctcctcatcaagtgtgtggtccagttggaattgatacagaccattgacaacattgtgttctaccctgcgacgagcaaaaaggaggatgcagagcacatggttgccgcccagcaagacacgctggatgcagatatccacatagagacggaggatcagggcatgtataagtacatgtcttcccagcacctcttcaagctgttgtaactggagctgttgtaatggagctgttgtaactgggctgttgtaactggagctgttaaccggagctgtttaactg

SEQ ID NO: 307737 - DNA, 1468 bp, Homo sapiens
atgcaggagagccagaccaagagcatgttcgtgtcccgggccctggagaagatcctagccgacaaggaggtgaagcggccccagcactcccagctgcgcagggcctgccaggtggcgctcgatgaaattaaagcagaaatagaaaagcagaggcttggcactgctgcaccaccaaaggcaaacttcattgaagctgacaagtattttcttccattcgagctagcttgccagtccaagtccccaagggtagtcagcacatcccttgactgcttgcagaaactcatcgcatacgggcacatcactggcaacgcccctgacagtggagcccctgggaagcggctgatcgacagaattgttgaaaccatttgcagttgttttcagggccctcagactgatgaaggggttcagttacaaataattaaggctcttctgactgcagtgacttccccacacattgaaattcatgagggtactatcctgcagacagtgagaacatgttacaatatctatttggccagcaaaaatctcatcaatcaaaccactgccaaggctacccttactcagatgctgaacgtcattttcacccgcatggaaaaccaagtgttgcaggaggccagagaactggaaaaaccaatccagtcaaaaccccagtcccctgtgatccaagctgcagcagtatccccaaagttcgttcgtttgaagcacagtcaggcacaaagcaaaccaacaactcccgaaaaaacagatttaaccaacggtgaacatgccaggagtgattctggaaaagtaagcacagaaaatggagacgcacccagagaaagaggctcatcactgtcaggtacgggctgatacggtatggctctttttccaagtgtgagagggaatcagcctgtgaggggcagaagaagtgtatgtcataacatctgaaggaaacctctgataacagcttatctctttctgggcctttccctttgcttttctcttagggaacacaaccagtgaggcatgatgtcaagtgtcccgttgtcagctgtgctgttttctctaaatagtactgggatgtatctagctgctacttcttcatgtcagcctcagtgcaacaggttcaggttgggacacttatctttcagtagttaattgattgggtgattagtcactcagtgtccacaggaggacaagggcttagattctcatgtctacactggatctccatgccttgcccagtgcctagcagtagccactcatagatatccatggaaggagccagaaggtagcaggtggatggacggatagacagatggacagatagctttgttttcttcttctggtgaccatgtacatcacttgtttttgttgggtttttaagtgagagactaacccacacctgattatattcttaaagtaaatgaaatgaaatactggattgagttgttataagatgatacttctgactgttcatatctctccc

SEQ ID NO: 307738 - DNA, 1480 bp, Homo sapiens
atgcaggagagccagaccaagagcatgttcgtgtcccgggccctggagaagatcctagccgacaaggaggtgaagcggccccagcactcccagctgcgcagggcctgccaggtggcgctcgatgaaattaaagcagaaatagaaaagcagaggcttggcactgctgcaccaccaaaggcaaacttcattgaagctgacaagtattttcttccattcgagctagcttgccagtccaagtccccaagggtagtcagcacatcccttgactgcttgcagaaactcatcgcatacgggcacatcactggcaacgcccctgacagtggagcccctgggaagcggctgatcgacagaattgttgaaaccatttgcagttgttttcagggccctcagactgatgaaggggttcagttacaaataattaaggctcttctgactgcagtgacttccccacacattgaaattcatgagggtactatcctgcagacagtgagaacatgttacaatatctatttggccagcaaaaatctcatcaatcaaaccactgccaaggctacccttactcagatgctgaacgtcattttcacccgcatggaaaaccaagtgttgcaggaggccagagaactggaaaaaccaatccagtcaaaaccccagtcccctgtgatccaagctgcagcagtatccccaaagttcgttcgtttgaagcacagtcaggcacaaagcaaaccaacaactcccgaaaaaacagatttaaccaacggtgaacatgccaggagtgattctggaaaagtaagcacagaaaatggagacgcacccagagaaagaggctcatcactgtcagggactgatgacggagcccaggaggtggtgaaggacatcttggaagatgtagtcacatctgccattaaagaagcagcggaaaagcatggtctgacagaacctgagagagttctaggtgaactggagtgccaggaatgtgctattcccccaggagttgatgaaaactcacagaccaacgggatagccgatgacaggcagtccttgtcgtcagcagataatctggaatcggatgcacaaggacatcaagtggctgccaggttctcccacgttctgcagaaggatgccttccttgtgttccgctccctgtgcaagctgtccatgaaaccccttggtgaaggccctccagacccaaagtaagcagacagcagttcttggccaccttcagtccaatgatccagcagcacatggtactgtgtttcacacttcccttgttccaagaagtttcagtgtcatgtctctttgtcagtgtaagtgcaggaacggttttacaacttttcagactcatgcagtctctagagtcctttcatatggaattgtctctgtatccccaccaaccaagattttgcccagttttgcttttcttggcatatgaatgctaaaaaagtctgtttattgaacacataaaaaacacatttttactagc

SEQ ID NO: 307739 - DNA, 719 bp, Homo sapiens
gtatttccacctggggacactcatccactggacttctgatgctttaatttgccacagctcagattaagacttctaacccctccttttagagttttaaaggattggcaataaaaggctaattctaacctagtcctgccccacctctccttttttagaggatgaccaacttaggctggtttgccaaggacttcctggttttagcactaaaagtctcatgtcccagaaaccccctaatctcgtcaaactgggacacttggttacgttacctacaagctgagtactgttaatcacaggacctaagatactggtgctgccaatttttgattgggtgctacggtaaatgtggatttaccttacactatacaattgtgtggcctcaaagtaagcatcctgcttgtctggcatcaaatgtaattttgtaagagtgacacaactttaagaggtgggtcaggcaattgttaaccccttccttgatgagaaaattgaggcttggatgggtggaatgaactgcctgagatttcaatttgctcagaagcaggcctaaaaacaacctcctgtcttccagcttcctagtacttccaacatgtgtttcctgagtgagatgtggccaccggagtctgtagttcactggggaaatttgttggcaaacatcttgtttgataagaaaacctaactgctatttgatcagaatttctgatacttgtatgttattttccaag

SEQ ID NO: 307740 - DNA, 480 bp, Homo sapiens
aggtgctattaattctttaaaattctactcattggtaaaggagcaaggccttctcaagaaacatactgtttgacattttttcttttagcactgttgtggtttttcattttctttgccagatcccatgagctgcgttccaaggtggtttccctgcagctgctcctctctgtgttgcaaaatgctggccccgtattcaggactcacgagatgttcatcaatgcaatcaagcaatatctctgtgtggccttgtccaaaaacggcgtctcttcagtgcctgatgtctttgagctctctcttgccatttttcttactcttctttcaaactttaaaatgcacttgaaaatgcagatagaggtacggattccaaagttttttcatttcattatttactattattattagtcattaattataatactcaatattgagaatgctgctaatattacactaagcattaggaaaatggttcatgaaaatgtt

SEQ ID NO: 307741 - DNA, 275 bp, Homo sapiens
tttaactcttcaaaaaaattttaataaaaattttaatactgtctgtagcatggcttcattaattaaaagcctagaaactcaccagttgctgtctccaactcacaatatacagtatttgagacctggttggcatcaaaatagcagtagaagtttaatgatagatactgctttattttacagataatgaacagttggcgcgatcaggtacaaattgcttagaaaacttagtaatatccaatggagagaaattcagtcctgaagtctgggatgaaacc

SEQ ID NO: 307742 - DNA, 348 bp, Homo sapiens
gatttttactgggtctaccagactggatggaaatgcaataggtatgtatttgacttacctgtgaaaactgcagaagcctcacgctgtgaccgtctgactgttcctaacgaggctttgcttgtgttgttgggtctggcctgtagttgactttgtccgctggctgtgtgctgtgtccatggatgaactggcttccccccaccatcctcgcatgttcagcttgcagaagattgtggagatatcatactacaacatgaatcggatccgactacagtggtctcgaatatggcatgtgattggagatcacttcaataaggtaactcttcaaatttaaaaaccattcctgttaaa

SEQ ID NO: 307743 - DNA, 511 bp, Homo sapiens
cagacttcccacctgagtcagctttgtttaagggtccttcctagaagtacccacaccacttctgctcatatctcactggctagaagtttatcacatggccatcctttatttaagggaggcagggaaatgttctttttattccacatggcagtgtgtccagctaacacgtagggttctattagtgttggagaaggggagagtggatatgaggtgacaatcagcagactctgaccaggtatagctgggtcagaaattgaaggtggaatttagaaaagctgccaggacagacatgaccttgctagcttatacgtgatggcatgttcatagtattctattattatttatctcaaataccagcttttgctatcctccagattttgaaataagcaacttgtgtcccatctctgcttgaaacaggttcaacaagaaacccaagagggggatccagtttctccaggagcagggcatgctgggaacgtcagttgaagacatagcccaattcctgcaccag

SEQ ID NO: 307744 - DNA, 202 bp, Homo sapiens
atcacaatgcccagagcattccatcttcttcattagctcttctatcctctgtcctgtcctctagcaagacacgctggatgcagatatccacatagagacggaggatcagggcatgtataagtacatgtcttcccagcacctcttcaagctgttggactgtttgcaggaatcccattcattctcaaaggccttcaactccaat

SEQ ID NO: 307745 - DNA, 936 bp, Homo sapiens
caccccctccccaggctgattggcgcttctgcggcggatcctcgggcgggcagccgggccggcgcgtcacgtggcccacggcgtccagggcgaccagccgcgggccgcagggcatggaccttcaggccgccggggcccaggcgcagggggccgcggagccgtctcggggcccgccgctgcctagcgcgcggggggcgccccccagcccggaggctggctttgctacagctgaccactccggtcaggagagagagactgagaaggctatggatcgactagcccgtggaacacagagcattcctaatgacagtcctgcccggggtgagggcacccattctgaagaggaaggctttgccatggatgaggaggactctgatggagaactgaatacctgggagctgtcagaagggacaaactgtccacccaaggaacagcctggcgatctttttaatgaggactgggactcggagttgaaagcagatcaagggaatccatatgatgctgacgacatccaggagagcatttctcaagagcttaaaccttgggtgtgctgtgccccacaaggagacatgatctatgaccccagctggcaccatccgcctccactgataccctattattccaagatggtctttgaaacaggacagtttgacgatgctgaagattgagtgtggagctttctgccttgtaggtgggcgggcctccacgtcaagatctcttttcctgtcttggaggtgaaaagtcatatctgagaaaatgtttgcagtgacccctagtctggggtacacagaccagtgttccttattgacagtgttcaataaggccccgtcattctcgccagtctgttgttgttcttaatgggctcctccttgaaatgtgtgtgtgtttgtgtcaagaggagttgtgttctttgtaaataaaggttaaaaagagaaa

SEQ ID NO: 307746 - DNA, 505 bp, Homo sapiens
actactactactactaaattctgcggccgctccgacgagttgaaagcagatcaagggaatccatatgatgctgacgacatccaggagagcatttctcaagagcttaaaccttgggtgtgctgtgccccacaaggagacatgatctatgaccccagctggcaccatccgcctccactgataccctattattccaagatggtctttgaaacaggacagtttgacgatgctgaagattgagtgtggagctttctgccttgtaggtgggcgggcctccacgtcaagatctcttttcctgtcttggaggtgaaaagtcatatctgagaaaatgtttgcagtgacccctagtctggggtacacagaccagtgttccttattgacagtgttcaataaggccccgtcattctcgccagtctgttgttgttcttaatgggctcctccttgaaatgtgtgtgtgtttgtgtcaagaggagttgtgttctttgtaaataaaggttaaaaagagaaa

SEQ ID NO: 307747 - DNA, 1235 bp, Homo sapiens
  misc_feature (910)..(910): n is a, c, g, or t
  misc_feature (1235)..(1235): n is a, c, g, or t
caccccctccccaggctgattggcgcttctgcggcggatcctcgggcgggcagccgggccggcgcgtcacgtggcccacggcgtccagggcgaccagccgcgggccgcagggcatggaccttcaggccgccggggcccaggcgcagggggccgcggagccgtctcggggcccgccgctgcctagcgcgcggggggcgccccccagcccggaggctggctttgctacagctgaccactccggtcaggagagagagactgagaaggctatggatcgactagcccgtggaacacagagcattcctaatgacagtcctgcccggggtgagggcacccattctgaagaggaaggctttgccatggatgaggaggactctgatggagaactgaatacctgggagctgtcagaagggacaaactgtccacccaaggaacagcctggcgatctttttaatgaggactgggactcggagttgaaagcagatcaagggaatccatatgatgctgacgacatccaggagagcatttctcaagagcttaaaccttgggtgtgctgtgccccacaaggagacatgatctatgaccccagctggcaccatccgcctccactgataccctattattccaagatggtctttgaaacaggacagtttgacgatgctgaagattgagtgtggagctttctgccttgtaggtgggcgggcctccacgtcaagatctcttttcctgtcttggaggtgaaaagtcatatctgagaaaatgtttgcagtgacccctagtctggggtacacagaccagtgttccttattgacagtgttcaataaggccccgtcattctcgccagtctgttgttgttcttaatgggctcctccttgaaatgtgtgtgtgtttgtgtcaagaggagtggggtctnggcaactacaaggggtaaaaggggagaaggcagaaaaaaagaatgtggggggtaattagtaggggggggaacaagaggtatgtaatgtgcatgtgtgaatgtgtttctgacacgattttttacaggggagaatagcgggcacaaaagggggggaattgaacgtaagagaaggactacggaagaagtatagtaggattagcgtattagtagcagtgtaggggaaataagatcagtgtgaagagagagagtacaagagatagctagtaagtgaagtgagtatacaaatggtaggtctagcatataagtaactacctattagtatagn

SEQ ID NO: 307748 - DNA, 412 bp, Homo sapiens
aacggccaggccgcggggccgcggggctgcggggcggggaaagccgagggcgtgggtgggcgctccgggtcagcagagacggctgtccgcccgctgggcgccgctgcggatttggtaaatgggaggtgacgctggtgaccgagagccggggcccgctgccaggagcctgggcgagggccaggctggctttgctacagctgaccactccggtcaggagagagagactgagaaaatgtttgcagtgacccctagtctggggtacacagaccagtgttccttattgacagtgttcaataaggccccgtcattctcgccagtctgttgttgttcttaatgggctcctccttgaaatgtgtgtgtgtttgtgtcaagaggagttgtgttctttgtaaataaaggttaaaaagagaaa

SEQ ID NO: 307749 - DNA, 997 bp, Homo sapiens
aaggacaaaaccaacgatttagggaccacaaggactcggaggatccacaaggttggacaaaaagccaggcttgaaaaccgacgcccagtaactataaccggtctaaagtacgagcctgggtggcgatttcggcaacgaagggcgtccagggcgaccagccgcgggccgcagggcatggaccttcaggccgccggggcccaggcgcagggggccgcggagccgtctcggggcccgccgctgcctagcgcgcggggggcgccccccagcccggaggctggctttgctacagctgaccactccggtcaggagagagagactgagaaggctatggatcgactagcccgtggaacacagagcattcctaatgacagtcctgcccggggtgagggcacccattctgaagaggaaggctttgccatggatgaggaggactctgatggagaactgaatacctgggagctgtcagaagggacaaactgtccacccaaggaacagcctggcgatctttttaatgaggactgggactcggagttgaaagcagatcaagggaatccatatgatgctgacgacatccaggagagcatttctcaagagcttaaaccttgggtgtgctgtgccccacaaggagacatgatctatgaccccagctggcaccatccgcctccactgataccctattattccaagatggtctttgaaacaggacagtttgacgatgctgaagattgagtgtggagctttctgccttgtaggtgggcgggcctccacgtcaagatctcttttcctgtcttggaggtgaaaagtcatatctgagaaaatgtttgcagtgacccctagtctggggtacacagaccagtgttccttattgacagtgttcaataaggccccgtcattctcgccagtctgttgttgttcttaatgggctcctccttgaaatgtgtgtgtgtttgtgtcaagaggagttgtgttctttgtaaataaaggttaaaaagagaaa

SEQ ID NO: 307750 - DNA, 1003 bp, Homo sapiens
caccccctccccaggctgattggcgcttctgcggcggatcctcgggcgggcagccgggccggcgcgtcacgtggcccacggcgtccagggcgaccagccgcgggccgcagggcatggaccttcaggccgccggggcccaggcgcagggggccgcggagccgtctcggggcccgccgctgcctagcgcgcggggggcgccccccagcccggaggctggctttgctacagctgaccactccggtcaggagagagagactgagaaggctatggatcgactagcccgtggaacacagagcattcctaatgacagtcctgcccggggtgagggcacccattctgaagaggaaggctttgccatggatgaggaggactctgatggagaactgaatacctgggagctgtcagaagggacaaactgtccacccaaggaacagcctggcgatctttttaatgaggactgggactcggagttgaaagcagatcaagggaatccatatgatgctgacgacatccaggagagcatttctcaagagcttaaaccttgggtgtgctgtgccccacaaggagacatgatctatgaccccagctggcaccatccgcctccactgataccctattattccaagatggtctttgaaacaggacagtttgacgatgctgaagattgagtgtggagctttctgccttgtaggtgggcgggcctccacgtcaagatctcttttcctgtcttggaggtgaaaagtcatatctgagaaaatgtttgcagtgacccctagtctggggtacacagaccagtgttccttattgacagtgttcaataaggccccgtcattctcgccagtctgttgttgttcttaatgggctcctccttgaaatgtgtgtgtgtttgtgtcaagaggagttgtgttctttgtaaataaaggttaaaaagagaaaaaaaaaagaaagaaaagaaaagagagaaaaaggagagaaggggagggagaagaaagaaaagaggaga

SEQ ID NO: 307751 - DNA, 980 bp, Homo sapiens
  misc_feature (938)..(938): n is a, c, g, or t
  misc_feature (943)..(943): n is a, c, g, or t
caccccctccccaggctgattggcgcttctgcggcggatcctcgggcgggcagccgggccggcgcgtcacgtggcccacggcgtccagggcgaccagccgcgggccgcagggcatggaccttcaggccgccggggcccaggcgcagggggccgcggagccgtctcggggcccgccgctgcctagcgcgcggggggcgccccccagcccggaggctggctttgctacagctgaccactccggtcaggagagagagactgagaaggctatggatcgactagcccgtggaacacagagcattcctaatgacagtcctgcccggggtgagggcacccattctgaagaggaaggctttgccatggatgaggaggactctgatggagaactgaatacctgggagctgtcagaagggacaaactgtccacccaaggaacagcctggcgatctttttaatgaggactgggactcggagttgaaagcagatcaagggaatccatatgatgctgacgacatccaggagagcatttctcaagagcttaaaccttgggtgtgctgtgccccacaaggagacatgatctatgaccccagctggcaccatccgcctccactgataccctattattccaagatggtctttgaaacaggacagtttgacgatgctgaagattgagtgtggagctttctgccttgtaggtgggcgggcctccacgtcaagatctcttttcctgtcttggaggtgaaaagtcatatctgagaaaatgtttgcagtgacccctagtctggggtacacagaccagtgttccttattgacagtgttcaataaggccccgtcattctcgccagtctgttgttgttcttaatgggctcctccttgaaatgtgtgtgtgtttgtgtcaagaggagttgtgttctttgtaaataaaggttaaaaagagaaacncacgnagaaacccaggctagaacaacacacaacacgggggcg

SEQ ID NO: 307752 - DNA, 971 bp, Homo sapiens
  misc_feature (938)..(938): n is a, c, g, or t
caccccctccccaggctgattggcgcttctgcggcggatcctcgggcgggcagccgggccggcgcgtcacgtggcccacggcgtccagggcgaccagccgcgggccgcagggcatggaccttcaggccgccggggcccaggcgcagggggccgcggagccgtctcggggcccgccgctgcctagcgcgcggggggcgccccccagcccggaggctggctttgctacagctgaccactccggtcaggagagagagactgagaaggctatggatcgactagcccgtggaacacagagcattcctaatgacagtcctgcccggggtgagggcacccattctgaagaggaaggctttgccatggatgaggaggactctgatggagaactgaatacctgggagctgtcagaagggacaaactgtccacccaaggaacagcctggcgatctttttaatgaggactgggactcggagttgaaagcagatcaagggaatccatatgatgctgacgacatccaggagagcatttctcaagagcttaaaccttgggtgtgctgtgccccacaaggagacatgatctatgaccccagctggcaccatccgcctccactgataccctattattccaagatggtctttgaaacaggacagtttgacgatgctgaagattgagtgtggagctttctgccttgtaggtgggcgggcctccacgtcaagatctcttttcctgtcttggaggtgaaaagtcatatctgagaaaatgtttgcagtgacccctagtctggggtacacagaccagtgttccttattgacagtgttcaataaggccccgtcattctcgccagtctgttgttgttcttaatgggctcctccttgaaatgtgtgtgtgtttgtgtcaagaggagttgtgttctttgtaaataaaggttaaaaagagaaaanacacaaaaactcggacatattccctttctttcc

SEQ ID NO: 307753 - DNA, 905 bp, Homo sapiens
aacggccaggccgcggggccgcggggctgcggggcggggaaagccgagggcgtgggtgggcgctccgggtcagcagagacggctgtccgcccgctgggcgccgctgcggatttggtaaatgggaggtgacgctggtgaccgagagccggggcccgctgccaggagcctgggcgagggccaggctggctttgctacagctgaccactccggtcaggagagagagactgagaaggctatggatcgactagcccgtggaacacagagcattcctaatgacagtcctgcccggggtgagggcacccattctgaagaggaaggctttgccatggatgaggaggactctgatggagaactgaatacctgggagctgtcagaagggacaaactgtccacccaaggaacagcctggcgatctttttaatgaggactgggactcggagttgaaagcagatcaagggaatccatatgatgctgacgacatccaggagagcatttctcaagagcttaaaccttgggtgtgctgtgccccacaaggagacatgatctatgaccccagctggcaccatccgcctccactgataccctattattccaagatggtctttgaaacaggacagtttgacgatgctgaagattgagtgtggagctttctgccttgtaggtgggcgggcctccacgtcaagatctcttttcctgtcttggaggtgaaaagtcatatctgagaaaatgtttgcagtgacccctagtctggggtacacagaccagtgttccttattgacagtgttcaataaggccccgtcattctcgccagtctgttgttgttcttaatgggctcctccttgaaatgtgtgtgtgtttgtgtcaagaggagttgtgttctttgtaaataaaggttaaaaagagaaa

SEQ ID NO: 307754 - DNA, 1083 bp, Homo sapiens
caccccctccccaggctgattggcgcttctgcggcggatcctcgggcgggcagccgggccggcgcgtcacgtggcccacggcgtccagggcgaccagccgcgggccgcagggcatggaccttcaggccgccggggcccaggcgcagggggccgcggagccgtctcggggcccgccgctgcctagcgcgcggggggcgccccccagcccggaggctggctttgctacagctgaccactccggtcaggagagagagactgagaaggctatggatcgactagccagtcctctctgctgcttagtggccttctctgcccagttgaacagtaacctcctttggaagccttgcttggagcttccttaagggaagtcctgaacttttcttatgttcaaatccatccttctaccgagagaaacagcttgaaacgcccgtggaacacagagcattcctaatgacagtcctgcccggggtgagggcacccattctgaagaggaaggctttgccatggatgaggaggactctgatggagaactgaatacctgggagctgtcagaagggacaaactgtccacccaaggaacagcctggcgatctttttaatgaggactgggactcggagttgaaagcagatcaagggaatccatatgatgctgacgacatccaggagagcatttctcaagagcttaaaccttgggtgtgctgtgccccacaaggagacatgatctatgaccccagctggcaccatccgcctccactgataccctattattccaagatggtctttgaaacaggacagtttgacgatgctgaagattgagtgtggagctttctgccttgtaggtgggcgggcctccacgtcaagatctcttttcctgtcttggaggtgaaaagtcatatctgagaaaatgtttgcagtgacccctagtctggggtacacagaccagtgttccttattgacagtgttcaataaggccccgtcattctcgccagtctgttgttgttcttaatgggctcctccttgaaatgtgtgtgtgtttgtgtcaagaggagttgtgttctttgtaaataaaggttaaaaagagaaa

SEQ ID NO: 307755 - DNA, 885 bp, Homo sapiens
caccccctccccaggctgattggcgcttctgcggcggatcctcgggcgggcagccgggccggcgcgtcacgtggcccacggcgtccagggcgaccagccgcgggccgcagggcatggaccttcaggccgccggggcccaggcgcagggggccgcggagccgtctcggggcccgccgctgcctagcgcgcggggggcgccccccagcccggaggctggctttgctacagctgaccactccggtcaggagagagagactgagaaggctatggatcgactagcccgtggaacacagagcattcctaatgacagtcctgcccggggtgagggcacccattctgaagaggaaggctttgccatggatgaggaggactctgatggagaactgaatacctgggagctgtcagaagggacaaactgtccacccaaggaacagcctggcgatctttttaatgaggactgggactcggagttgaaagcagatcaagggaatccatatgatgctgacgacatccaggagagcatttctcaagagcttaaaccttgggtgtgctgtgccccacaaggagacatgatctatgaccccagctggcaccatccgcctccactgataccctattattccaagatggtctttgaaacaggacagtttgacgatgctgaagattgagtgtggagctttctgccttgtaggtgggcgggcctccacgtcaagatctcttttcctgtcttggaggtgaaaagtcatatctgagaaaatgtttgcagtgacccctagtctggggtacacagaccagtgttgttcttaatgggctcctccttgaaatgtgtgtgtgtttgtgtcaagaggagttgtgttctttgtaaataaaggttaaaaagagaaa

SEQ ID NO: 307756 - DNA, 854 bp, Homo sapiens
aacggccaggccgcggggccgcggggctgcggggcggggaaagccgagggcgtgggtgggcgctccgggtcagcagagacggctgtccgcccgctgggcgccgctgcggatttggtaaatgggaggtgacgctggtgaccgagagccggggcccgctgccaggagcctgggcgagggccaggctggctttgctacagctgaccactccggtcaggagagagagactgagaaggctatggatcgactagcccgtggaacacagagcattcctaatgacagtcctgcccggggtgagggcacccattctgaagaggaaggctttgccatggatgaggaggactctgatggagaactgaatacctgggagctgtcagaagggacaaactgtccacccaaggaacagcctggcgatctttttaatgaggactgggactcggagttgaaagcagatcaagggaatccatatgatgctgacgacatccaggagagcatttctcaagagcttaaaccttgggtgtgctgtgccccacaaggagacatgatctatgaccccagctggcaccatccgcctccactgataccctattattccaagatggtctttgaaacaggacagtttgacgatgctgaagattgagtgtggagctttctgccttgtaggtgggcgggcctccacgtcaagatctcttttcctgtcttggaggtgaaaagtcatatctgagaaaatgtttgcagtgacccctagtctggggtacacagaccagtgttgttcttaatgggctcctccttgaaatgtgtgtgtgtttgtgtcaagaggagttgtgttctttgtaaataaaggttaaaaagagaaa

SEQ ID NO: 307757 - DNA, 327 bp, Homo sapiens
ctttgaaacaggacagtttgacgatgctgaagattgagtgtggagctttctgccttgtaggtgggcgggcctccacgtcaagatctcttttcctgtcttggaggtgaaaagtcatatctgagaaaatgtttgcagtgacccctagtctggggtacacagaccagtgttccttattgacagtgttcaataaggccccgtcattctcgccagtctgttgttgttcttaatgggctcctccttgaaatgtgtgtgtgtttgtgtcaagaggagttgtgttctttgtaaataaaggttaaaaagagaaagaaaccagtatgcttcgtctgc

SEQ ID NO: 307758 - DNA, 834 bp, Homo sapiens
  misc_feature (824)..(824): n is a, c, g, or t
gcaacttgggcttggcaggatgaagggggagaactgctccaagccgagctaatttttgtaatttttagtagaggtgggatttcaccatcttagccaggctggtctcaaactcctgacctcaggtgatccacccgcctcggcctcccaaagtgctgggatgacaggcgtgagccactgcacctggcctggtggttagtgttttcatagattcttccaggcttttcagtttaacgcatgtctgtgctttaatgaagaaatggggtcgtgctgtgtgtgcccagtgactgactgttagggaacatgtgtctgtgccttaatgaagaaatggggtcgtgctgtgtgtgcccagtgactgactgttagggaacatgtgtctgtgctttaatgaagaaatggggtcgtgctgtgtgtgcccagtgactgactgttagtcaggggtgttggccttactcatgtctggagtgcgtccctgcaggctcttggcctggtgagctctgggtacagctgtgcagtcgcctaccggcgccttctgtacctgcagtccacttagcttgcgtggctgtgtgtggtgacccacggctctccctctcctcccatcgccctcatgccccagagctgagccccacagccccttctcttgggtgcctgtgttcacatgaatgtgtaaacacgtgcgtgtctgtgtacaaagacaaggctttctttacgggttgacggccttaatggttcctgctcttcctgttacatagaggcccttcctatccattttttttttttctcagagtgatattgcatagatttcctcacatgccactcaataccangtcctctaga

SEQ ID NO: 307759 - DNA, 1510 bp, Homo sapiens
gaccacacggccgccggaggcacagtcgtgttcgcatctggtctaacagacccgcgagaacgaaggacgcttgcctttttccggtcggggaagggggaagaaggtaacttccggtgacggggttgcatcacttcctctcaagcttggcgtttgtttggtggggttacacgcgggttcaacatgcgtatcgaaaagtgttatttctgttcggggcccatctatcctggacacggcatgatgttcgtccgcaacgattgcaaggtgttcagattttgcaaatctaaatgtcataaaaactttaaaaagaagcgcaatcctcgcaaagttaggtggaccaaagcattccggaaagcagctggtaaagagcttacagtggataattcatttgaatttgaaaaacgtagaaatgaacctatcaaataccagcgagagctatggaataaaactattgatgcgatgaagagagttgaagaaatcaaacagaagcgccaagctaaatttataatgaacagattgaagaaaaataaagagctacagaaagttcaggatatcaaagaagtcaagcaaaacatccatcttatccgagcccctcttgcaggcaaagggaaacagttggaagagaaaatggtacagcagttacaagaggatgtggacatggaagatgctccttaaaaatctctgtaaccatttcttttatgtacatttgaaaatgccctttggatacttggaactgctaaattattttattttttacataaggtcacttaaatgaaaagcgattaaaagacatctttcctgcattgccatctacataatatcagatattacggatgttagattgcatctcagtgttaaatctttactgatagatgtacttaagtaaatcatgaaaattctacttgtaactatagaagtgaattgtggacgtaaaatggttgtgctatttggataatggcactaggcagcatttgtatagtaactaatggcaaaaattcatggctagtgatgtataaaataaaatattctttgcagtaaaatattccctttgttaatgttatagaaggggggatacaaaaaggaactaacaatttgtatggcagtgtcagatatttttattttagtatttcctgttttggtttatttgcatcttagaagagcataatgacattgtttgatgaagcctaattatgctggactgttttgacctggtttaacccttctgataggtagttgtggatgctggggatgagaactgaataatctttgcctggagtgacactacactctagaatttccactttggagaatactcagttccaacttgtgattcctgatagaacagactttacttttctagcccagcattgatctagaagcagaggaatcccagcgccttttaaaagttgttatgtggttttcttttaaaaagctcctgtttttggaaagtagaatttatgggtacaacgtatgttcattatttgtacataaaataaaaccatttaaaaagtaa

SEQ ID NO: 307760 - DNA, 1033 bp, Homo sapiens
gaccacacggccgccggaggcacagtcgtgttcgcatctggtctaacagacccgcgagaacgaaggacgcttgcctttttccggtcggggaagggggaagaaggtaacttccggtgacggggttgcatcacttcctctcaagcttggcgtttgtttggtggggttacacgcgggttcaacatgcgtatcgaaaagtgttatttctgttcggggcccatctatcctggacacggcatgatgttcgtccgcaacgattgcaaggtgttcagattttgcaaatctaaatgtcataaaaactttaaaaagaagcgcaatcctcgcaaagttaggtggaccaaagcattccggaaagcagctggtaaagagcttacagtggataattcatttgaatttgaaaaacgtagaaatgaacctatcaaataccagcgagagctatggaataaaactattgatgcgatgaagagagttgaagaaatcaaacagaagcgccaagctaaatttataatgaacagattgaagaaaaataaagagctacagaaagttcaggatatcaaagaagtcaagcaaaacatccatcttatccgagcccctcttgcaggcaaagggaaacagttggaagagaaaatggtacagcagttacaagaggatgtggacatggaagatgctccttaaaaatctctgtaaccatttcttttatgtacatttgaaaatgccctttggatacttggaactgctaaattattttattttttacataaggtcacttaaatgaaaagcgattaaaagacatctttcctgcattgccatctacataatatcagatattacggatgttagattgcatctcagtgttaaatctttactgatagatgtacttaagtaaatcatgaaaattctacttgtaactatagaagtgaattgtggacgtaaaatggttgtgctatttggataatggcactaggcagcatttgtatagtaactaatggcaaaaattcatggctagtgatgtataaaataaaatattctttgcagt

SEQ ID NO: 307761 - DNA, 574 bp, Homo sapiens
gcataatgacattgtttgatgaagcctaattatgctggactgttttgacctggtttaaccaaaacaggaaatactaaaataaaatattctttgcagtaaaatattccctttgttaatgttatagaaggggggatacaaaaaggaactaacaatttgtatggcagtgtcagatatttttattttagtatttcctgttttggtttatttgcatcttagaagagcataatgacattgtttgatgaagcctaattatgctggactgttttgacctggtttaacccttctgataggtagttgtggatgctggggatgagaactgaataatctttgcctggagtgacactacactctagaatttccactttggagaatactcagttccaacttgtgattcctgatagaacagactttacttttctagcccagcattgatctagaagcagaggaatcccagcgccttttaaaagttgttatgtggttttcttttaaaaagctcctgtttttggaaagtagaatttatgggtacaacgtatgttcattatttgtacataaaataaaaccatttaaaaagtaa

SEQ ID NO: 307762 - DNA, 347 bp, Homo sapiens
caaagacacattgtagcaggcaaatttattagttctgttggtatgctctaaaacaaatcatgttataaccaatagtgactgttgactggtaaccttataggagtggatgtggataaactaaaatcttgctgaggcatcattaaattccttgaaaatcagtcactgtatctgaagaacagactttacttttctagcccagcattgatctagaagcagaggaatcccagcgccttttaaaagttgttatgtggttttcttttaaaaagctcctgtttttggaaagtagaatttatgggtacaacgtatgttcattatttgtacataaaataaaaccatttaaaaagtaa

SEQ ID NO: 307763 - DNA, 1656 bp, Homo sapiens
gaccacacggccgccggaggcacagtcgtgttcgcatctggtctaacagacccgcgagaacgaaggacgcttgcctttttccggtcggggaagggggaagaaggtaacttccggtgacggggttgcatcacttcctctcaagcttggcgtttgtttggtggggttacacgcgggttcaacatgcgtatcgaaaagtgttatttctgttcggggcccatctatcctggacacggcatgatgttcgtccgcaacgattgcaaggtgttcagattttgcaaatctaaatgtcataaaaactttaaaaagaagcgcaatcctcgcaaagttaggtggaccaaagcattccggaaagcagctggtaaagagcttacagtggataattcatttgaatttgaaaaacgtagaaatgaacctatcaaataccagcgagagctatggaataaaactattgatgcgatgaagagagttgaagaaatcaaacagaagcgccaagctaaatttataatgaacagattgaagaaaaataaagagctacagaaagttcaggatatcaaagaagtcaagcaaaacatccatcttatccgagcccctcttgcaggcaaagggaaacagttggaagagaaaatggtacagcagttacaagaggatgtggacatggaagatgctccttaaaaatctctgtaaccatttcttttatgtacatttgaaaatgccctttggatacttggaactgctaaattattttattttttacataaggtcacttaaatgaaaagcgattaaaagacatctttcctgcattgccatctacataatatcagatattacggatgttagattgcatctcagtgttaaatctttactgatagatgtacttaagtaaatcatgaaaattctacttgtaactatagaagtgaattgtggacgtaaaatggttgtgctatttggataatggcactaggcagcatttgtatagtaactaatggcaaaaattcatggctagtgatgtataaaataaaatattctttgcagtaaaatattccctttgttaatgttatagaaggggggatacaaaaaggaactaacaatttgtatggcagtgtcagatatttttattttagtatttcctgttttggtttatttgcatcttagaagagcataatgacattgtttgatgaagcctaattatgctggactgttttgacctggtttaacccttctgataggtagttgtggatgctggggatgagaactgaataatctttgcctggagtgacactacactctagaatttccactttggagaatactcagttccaacttgtgattcctgatagaacagactttacttttctagcccagcattgatctagaagcagaggaatcccagcgccttttaaaagttgttatgtggttttcttttaaaaagctcctgtttttggaaagtagaatttatgggtacaacgtatgttcattatttgtacataaaataaaaccatttaaaaagtaaccacaacacaccacccccaccaaaaaacttttccggcgcgctctgccccgaaaaagcttcaaacccttcgttgggccgcggggccatgggtttgcacctggccctacgggttcccagggaaaccgggcacaaccgggtggtttccc

SEQ ID NO: 307764 - DNA, 1587 bp, Homo sapiens
gaccacacggccgccggaggcacagtcgtgttcgcatctggtctaacagacccgcgagaacgaaggacgcttgcctttttccggtcggggaagggggaagaaggtaacttccggtgacggggttgcatcacttcctctcaagcttggcgtttgtttggtggggttacacgcgggttcaacatgcgtatcgaaaagtgttatttctgttcggggcccatctatcctggacacggcatgatgttcgtccgcaacgattgcaaggtgttcagattttgcaaatctaaatgtcataaaaactttaaaaagaagcgcaatcctcgcaaagttaggtggaccaaagcattccggaaagcagctggtaaagagcttacagtggataattcatttgaatttgaaaaacgtagaaatgaacctatcaaataccagcgagagctatggaataaaactattgatgcgatgaagagagttgaagaaatcaaacagaagcgccaagctaaatttataatgaacagattgaagaaaaataaagagctacagaaagttcaggatatcaaagaagtcaagcaaaacatccatcttatccgagcccctcttgcaggcaaagggaaacagttggaagagaaaatggtacagcagttacaagaggatgtggacatggaagatgctccttaaaaatctctgtaaccatttcttttatgtacatttgaaaatgccctttggatacttggaactgctaaattattttattttttacataaggtcacttaaatgaaaagcgattaaaagacatctttcctgcattgccatctacataatatcagatattacggatgttagattgcatctcagtgttaaatctttactgatagatgtacttaagtaaatcatgaaaattctacttgtaactatagaagtgaattgtggacgtaaaatggttgtgctatttggataatggcactaggcagcatttgtatagtaactaatggcaaaaattcatggctagtgatgtataaaataaaatattctttgcagtaaaatattccctttgttaatgttatagaaggggggatacaaaaaggaactaacaatttgtatggcagtgtcagatatttttattttagtatttcctgttttggtttatttgcatcttagaagagcataatgacattgtttgatgaagcctaattatgctggactgttttgacctggtttaacccttctgataggtagttgtggatgctggggatgagaactgaataatctttgcctggagtgacactacactctagaatttccactttggagaatactcagttccaacttgtgattcctgatagaacagactttacttttctagcccagcattgatctagaagcagaggaatcccagcgccttttaaaagttgttatgtggttttcttttaaaaagctcctgtttttggaaagtagaatttatgggtacaacgtatgttcattatttgtacataaaataaaaccatttaaaaagtaataatgctgatatttattctttaaaggcactaaacaaagatatgaaatattgatgacctggaagaagaaatcttcctc

SEQ ID NO: 307765 - DNA, 1418 bp, Homo sapiens
aagcactggtatcaacgcagagtggccattacggccgggttcctctcaagcttggcgtttgtttggtggggttacacgcgggttcaacatgcgtatcgaaaagtgttatttctgttcggggcccatctatcctggacacggcatgatgttcgtccgcaacgattgcaaggtgttcagattttgcaaatctaaatgtcataaaaactttaaaaagaagcgcaatcctcgcaaagttaggtggaccaaagcattccggaaagcagctggtaaagagcttacagtggataattcatttgaatttgaaaaacgtagaaatgaacctatcaaataccagcgagagctatggaataaaactattgatgcgatgaagagagttgaagaaatcaaacagaagcgccaagctaaatttataatgaacagattgaagaaaaataaagagctacagaaagttcaggatatcaaagaagtcaagcaaaacatccatcttatccgagcccctcttgcaggcaaagggaaacagttggaagagaaaatggtacagcagttacaagaggatgtggacatggaagatgctccttaaaaatctctgtaaccatttcttttatgtacatttgaaaatgccctttggatacttggaactgctaaattattttattttttacataaggtcacttaaatgaaaagcgattaaaagacatctttcctgcattgccatctacataatatcagatattacggatgttagattgcatctcagtgttaaatctttactgatagatgtacttaagtaaatcatgaaaattctacttgtaactatagaagtgaattgtggacgtaaaatggttgtgctatttggataatggcactaggcagcatttgtatagtaactaatggcaaaaattcatggctagtgatgtataaaataaaatattctttgcagtaaaatattccctttgttaatgttatagaaggggggatacaaaaaggaactaacaatttgtatggcagtgtcagatatttttattttagtatttcctgttttggtttatttgcatcttagaagagcataatgacattgtttgatgaagcctaattatgctggactgttttgacctggtttaacccttctgataggtagttgtggatgctggggatgagaactgaataatctttgcctggagtgacactacactctagaatttccactttggagaatactcagttccaacttgtgattcctgatagaacagactttacttttctagcccagcattgatctagaagcagaggaatcccagcgccttttaaaagttgttatgtggttttcttttaaaaagctcctgtttttggaaagtagaatttatgggtacaacgtatgttcattatttgtacataaaataaaaccatttaaaaagtaa

SEQ ID NO: 307766 - DNA, 1357 bp, Homo sapiens
  misc_feature (1198)..(1198): n is a, c, g, or t
  misc_feature (1209)..(1209): n is a, c, g, or t
  misc_feature (1213)..(1213): n is a, c, g, or t
  misc_feature (1219)..(1219): n is a, c, g, or t
  misc_feature (1224)..(1225): n is a, c, g, or t
  misc_feature (1229)..(1229): n is a, c, g, or t
  misc_feature (1242)..(1242): n is a, c, g, or t
gaccacacggccgccggaggcacagtcgtgttcgcatctggtctaacagacccgcgagaacgaaggacgcttgcctttttccggtcggggaagggggaagaaggtaacttccggtgacggggttgcatcacttcctctcaagcttggcgtttgtttggtggggttacacgcgggttcaacatgcgtatcgaaaagtgttatttctgttcggggcccatctatcctggacacggcatgatgttcgtccgcaacgattgcaaggtgttcagattttgcaaatctaaatgtcataaaaactttaaaaagaagcgcaatcctcgcaaagttaggtggaccaaagcattccggaaagcagctggtaaagagcttacagtggataattcatttgaatttgaaaaacgtagaaatgaacctatcaaataccagcgagagctatggaataaaactattgatgcgatgaagagagttgaagaaatcaaacagaagcgccaagctaaatttataatgaacagattgaagaaaaataaagagctacagaaagttcaggatatcaaagaagtcaagcaaaacatccatcttatccgagcccctcttgcaggcaaagggaaacagttggaagagaaaatggtacagcagttacaagaggatgtggacatggaagatgctccttaaaaatctctgtaaccatttcttttatgtacatttgaaaatgccctttggatacttggaactgctaaattattttattttttacataaggtcacttaaatgaaaagcgattaaaagacatctttcctgcattgccatctacataatatcagatattacggatgttagattgcatctcagtgttaaatctttactgatagatgtacttaagtaaatcatgaaaattctacttgtaactatagaagtgaattgtggacgtaaaatggttgtgctatttggataatggcactaggcagcatttgtatagtaactaatggcaaaaattcatggctagtgatgtataaaataaaatattctttgcagtaaaatattccctttgttaatgttatagaaggggggatacaaaaaggaactaacaatttgtatggcagtgtcagatatttttattttagtatttcctgttttggtttatttgcatcttagaagagcataatgacattgtttgatgaagcctaattatgctggacgnccgttaccccnaagnatgtgncgggnngacngaaactgcggganacccaaacttggaaacctccctgtgccgtaaaacctttgccccgttcaagaaccgccaatatggttacccggaaagcggctttacaaaaaaaaacgcccgggggtagggcgacag

SEQ ID NO: 307767 - DNA, 1055 bp, Homo sapiens
  misc_feature (1004)..(1004): n is a, c, g, or t
  misc_feature (1008)..(1008): n is a, c, g, or t
  misc_feature (1026)..(1026): n is a, c, g, or t
gaccacacggccgccggaggcacagtcgtgttcgcatctggtctaacagacccgcgagaacgaaggacgcttgcctttttccggtcggggaagggggaagaaggtaacttccggtgacggggttgcatcacttcctctcaagcttggcgtttgtttggtggggttacacgcgggttcaacatgcgtatcgaaaagtgttatttctgttcggggcccatctatcctggacacggcatgatgttcgtccgcaacgattgcaaggtgttcagattttgcaaatctaaatgtcataaaaactttaaaaagaagcgcaatcctcgcaaagttaggtggaccaaagcattccggaaagcagctggtaaagagcttacagtggataattcatttgaatttgaaaaacgtagaaatgaacctatcaaataccagcgagagctatggaataaaactattgatgcgatgaagagagttgaagaaatcaaacagaagcgccaagctaaatttataatgaacagattgaagaaaaataaagagctacagaaagttcaggatatcaaagaagtcaagcaaaacatccatcttatccgagcccctcttgcaggcaaagggaaacagttggaagagaaaatggtacagcagttacaagaggatgtggacatggaagatgctccttaaaaatctctgtaaccatttcttttatgtacatttgaaaatgccctttggatacttggaactgctaaattattttattttttacataaggtcacttaaatgaaaagcgattaaaagacatctttcctgcattgccatctacataatatcagatattacggatgttagattgcatctcagtgttaaatctttactgatagatgtacttaagtaaatcatgaaaattctacttgtaactatagaagtgaatttggggcgaacgggggcatggaaggccagcgccttgttttacatggcaaaccggcgggttaaaaatttgggcgaaaaaaaaaaangggngggccaaaaaaagtgggngaaaaaagggcaagaggtccacgcggaag

SEQ ID NO: 307768 - DNA, 991 bp, Homo sapiens
gaccacacggccgccggaggcacagtcgtgttcgcatctggtctaacagacccgcgagaacgaaggacgcttgcctttttccggtcggggaagggggaagaaggtaacttccggtgacggggttgcatcacttcctctcaagcttggcgtttgtttggtggggttacacgcgggttcaacatgcgtatcgaaaagtgttatttctgttcggggcccatctatcctggacacggcatgatgttcgtccgcaacgattgcaaggtgttcagattttgcaaatctaaatgtcataaaaactttaaaaagaagcgcaatcctcgcaaagttaggtggaccaaagcattccggaaagcagctggtaaagagcttacagtggataattcatttgaatttgaaaaacgtagaaatgaacctatcaaataccagcgagagctatggaataaaactattgatgcgatgaagagagttgaagaaatcaaacagaagcgccaagctaaatttataatgaacagattgaagaaaaataaagagctacagaaagttcaggatatcaaagaagtcaagcaaaacatccatcttatccgagcccctcttgcaggcaaagggaaacagttggaagagaaaatggtacagcagttacaagaggatgtggacatggaagatgctccttaaaaatctctgtaaccatttcttttatgtacatttgaaaatgccctttggatacttggaactgctaaattattttattttttacataaggtcacttaaatgaaaagcgattaaaagacatctttcctgcattgccatctacataatatcagatattacggatgttagattgcatctcagtgttaaatctttactgatagatgtacttaagtaaatcatgaaaattctacttgtaactatagaagtgaattgatgtgctaattggtatggactagcagcttgtattactatggaaatcggtgtgttttaataaattttgcgg

SEQ ID NO: 307769 - DNA, 1456 bp, Homo sapiens
gaccacacggccgccggaggcacagtcgtgttcgcatctggtctaacagacccgcgagaacgaaggacgcttgcctttttccggtcggggaagggggaagaaggtaacttccggtgacggggttgcatcacttcctctcaagcttggcgtttgtttggtggggttacacgcgggttcaacatgcgtatcgaaaagtgttatttctgttcggggcccatctatcctggacacggcatgatgttcgtccgcaacgattgcaaggtgttcagattttgcaaatctaaatgtcataaaaactttaaaaagaagcgcaatcctcgcaaagttaggtggaccaaagcattccggaaagcagctggtaaagagcttacagtggataattcatttgaatttgaaaaacgtagaaatgaacctatcaaataccagcgagagctatggaataaaactattgatgcgatgaagagagttgaagaaatcaaacagaagcgccaagctaaatttataatgaacagattgaagaaaaataaagagctacagaaagttcaggatatcaaagaagtcaagcaaaacatccatcttatccgagcccctcttgcaggcaaagggaaacagttggaagagaaaatggtacagcagttacaagaggatgtggacatggaagatgctccttaaaaatctctgtaaccatttcttttatgtacatttgaaaatgccctttggatacttggaactgctaaattattttattttttacataaggtcacttaaatgaaaggatgttagattgcatctcagtgttaaatctttactgatagatgtacttaagtaaatcatgaaaattctacttgtaactatagaagtgaattgtggacgtaaaatggttgtgctatttggataatggcactaggcagcatttgtatagtaactaatggcaaaaattcatggctagtgatgtataaaataaaatattctttgcagtaaaatattccctttgttaatgttatagaaggggggatacaaaaaggaactaacaatttgtatggcagtgtcagatatttttattttagtatttcctgttttggtttatttgcatcttagaagagcataatgacattgtttgatgaagcctaattatgctggactgttttgacctggtttaacccttctgataggtagttgtggatgctggggatgagaactgaataatctttgcctggagtgacactacactctagaatttccactttggagaatactcagttccaacttgtgattcctgatagaacagactttacttttctagcccagcattgatctagaagcagaggaatcccagcgccttttaaaagttgttatgtggttttcttttaaaaagctcctgtttttggaaagtagaatttatgggtacaacgtatgttcattatttgtacataaaataaaaccatttaaaaagtaa

SEQ ID NO: 307770 - DNA, 799 bp, Homo sapiens
gaccacacggccgccggaggcacagtcgtgttcgcatctggtctaacagacccgcgagaacgaaggacgcttgcctttttccggtcggggaagggggaagaaggtaacttccggtgacggggttgcatcacttcctctcaagcttggcgtttgtttggtggggttacacgcgggttcaacatgcgtatcgaaaagtgttatttctgttcggggcccatctatcctggacacggcatgatgttcgtccgcaacgattgcaaggtgttcagattttgcaaatctaaatgtcataaaaactttaaaaagaagcgcaatcctcgcaaagttaggtggaccaaagcattccggaaagcagctggtaaagagcttacagtggataattcatttgaatttgaaaaacgtagaaatgaacctatcaaataccagcgagagctatggaataaaactattgatgcgatgaagagagttgaagaaatcaaacagaagcgccaagctaaatttataatgaacagattgaagaaaaataaagagctacagaaagttcaggatatcaaagaagtcaagcaaaacatccatcttatccgagcccctcttgcaggcaaagggaaacagttggaagagaaaatggtacagcagttacaagaggatgtggacatggaagatgctccttaaaaatctctgtaaccatttcttttatgtacatttgaaaatgccctttggatacttggaactgctaaattattttattttttacataaggtcacttaaatgaaaagcgattaaaagacatctttcctgc

SEQ ID NO: 307771 - DNA, 1492 bp, Homo sapiens
  misc_feature (11)..(11): n is a, c, g, or t
  misc_feature (23)..(23): n is a, c, g, or t
  misc_feature (75)..(75): n is a, c, g, or t
  misc_feature (88)..(88): n is a, c, g, or t
  misc_feature (94)..(94): n is a, c, g, or t
ctgctcttttntctcctcccttntttacacccatcccctcccccagaacaagcgcagagagagagaaatttgatnaccctttggaatncaccgngagggtgttggatctagaactagcggatcctccgggctgcaggaattcggcacgagcgcgggttcaacatgcgtatcgaaaagtgttatttctgttcggggcccatctatcctggacacggcatgatgttcgtccgcaacgattgcaaggtgttcagattttgcaaatctaaatgtcataaaaactttaaaaagaagcgcaatcctcgcaaagttaggtggaccaaagcattccggaaagcagctggtaaagagcttacagtggataattcatttgaatttgaaaaacgtagaaatgaacctatcaaataccagcgagagctatggaataaaactattgatgcgatgaagagagttgaagaaatcaaacagaagcgccaagctaaatttataatgaacagattgaagaaaaataaagagctacagaaagttcaggatatcaaagaagtcaagcaaaacatccatcttatccgagcccctcttgcaggcaaagggaaacagttggaagagaaaatggtacagcagttacaagaggatgtggacatggaagatgctccttaaaaatctctgtaaccatttcttttatgtacatttgaaaatgccctttggatacttggaactgctaaattattttattttttacataaggtcacttaaatgaaaagcgattaaaagacatctttcctgcattgccatctacataatatcagatattacggatgttagattgcatctcagtgttaaatctttactgatagatgtacttaagtaaatcatgaaaattctacttgtaactatagaagtgaattgtggacgtaaaatggttgtgctatttggataatggcactaggcagcatttgtatagtaactaatggcaaaaattcatggctagtgatgtataaaataaaatattctttgcagtaaaatattccctttgttaatgttatagaaggggggatacaaaaaggaactaacaatttgtatggcagtgtcagatatttttattttagtatttcctgttttggtttatttgcatcttagaagagcataatgacattgtttgatgaagcctaattatgctggactgttttgacctggtttaacccttctgataggtagttgtggatgctggggatgagaactgaataatctttgcctggagtgacactacactctagaatttccactttggagaatactcagttccaacttgtgattcctgatagaacagactttacttttctagcccagcattgatctagaagcagaggaatcccagcgccttttaaaagttgttatgtggttttcttttaaaaagctcctgtttttggaaagtagaatttatgggtacaacgtatgttcattatttgtacataaaataaaaccatttaaaaagtaa

SEQ ID NO: 307772 - DNA, 1441 bp, Homo sapiens
gaccacacggccgccggaggcacagtcgtgttcgcatctggtctaacagacccgcgagaacgaaggacgcttgcctttttccggtcggggaagggggaagaaggtaacttccggtgacggggttgcatcacttcctctcaagcttggcgtttgtttggtggggttacacgcgggttcaacatgcgtatcgaaaagtgttatttctgttcggggcccatctatcctggacacggcatgatgttcgtccgcaacgattgcaaggtgttcagattttgcaaatctaaatgtcataaaaactttaaaaagaagcgcaatcctcgcaaagttaggtggaccaaagcattccggaaagcagctggtaaagagcttacagtggataattcatttgaatttgaaaaacgtagaaatgaacctatcaaataccagcgagagctatggaataaaactattgatgcgatgaagagagttgaagaaatcaaacagaagcgccaagctaaatttataatgaacagattgaagaaaaataaagagctacagaaagttcaggatatcaaagaagtcaagcaaaacatccatcttatccgagcccctcttgcaggcaaagggaaacagttggaagagaaaatggtacagcagttacaagaggatgtggacatggaagatgctccttaaaaatctctgtaaccatttcttttatgtacatttgaaaatgccctttggatacttggaactgctaaattattttattttttacataaggtcacttaaatgaaaaataaaataatttagccctcacccttgctgggggcatatctctcatacccacctgctgaatcttctcttcacttgctgagaaagtcagaggaggggatccagtagccctttccacatactgtggctacagcacccagcactgtgctgttgttgtctgactgtggctatctctgtcccatcaccctgagcctcaagatggaagacattgtctgcttgaactctgggcttggtgcagagtaggtatttggtaaatgttgaatagatcaaccaattcctacagcccactgggtgccaagctcagaggggaaaaaaagatagccagagagagacctggcctcaaaaaggtgtgaacaagactgaaaaggaggtccgttcagctccgctgccctgtccctgcttggttctggaagtttttacaatatattccttgtaggttcttcactcactcactcaacaaatacccgttgggaagagtctttaactggggcttcaatgtgttggcctgcagtcatgtttcggttagtcaccagggtttattctatttaagaattcgaatgctttgggtaggatgccacccaggtcccaatgtttccggtgccccaaaaaaaacaattgcgttgttagcccataaaaggttacatgggccaacccaaacggggaaatctac

SEQ ID NO: 307773 - DNA, 1368 bp, Homo sapiens
  misc_feature (16)..(16): n is a, c, g, or t
  misc_feature (43)..(43): n is a, c, g, or t
ccacccctctctcctnccctttccttctacctcttgccacctncctccccatgtgttatttctgttcggggcccatctatcctggacacggcatgatgttcgtccgcaacgattgcaaggtgttcagattttgcaaatctaaatgtcataaaaactttaaaaagaagcgcaatcctcgcaaagttaggtggaccaaagcattccggaaagcagctggtaaagagcttacagtggataattcatttgaatttgaaaaacgtagaaatgaacctatcaaataccagcgagagctatggaataaaactattgatgcgatgaagagagttgaagaaatcaaacagaagcgccaagctaaatttataatgaacagattgaagaaaaataaagagctacagaaagttcaggatatcaaagaagtcaagcaaaacatccatcttatccgagcccctcttgcaggcaaagggaaacagttggaagagaaaatggtacagcagttacaagaggatgtggacatggaagatgctccttaaaaatctctgtaaccatttcttttatgtacatttgaaaatgccctttggatacttggaactgctaaattattttattttttacataaggtcacttaaatgaaaagcgattaaaagacatctttcctgcattgccatctacataatatcagatattacggatgttagattgcatctcagtgttaaatctttactgatagatgtacttaagtaaatcatgaaaattctacttgtaactatagaagtgaattgtggacgtaaaatggttgtgctatttggataatggcactaggcagcatttgtatagtaactaatggcaaaaattcatggctagtgatgtataaaataaaatattctttgcagtaaaatattccctttgttaatgttatagaaggggggatacaaaaaggaactaacaatttgtatggcagtgtcagatatttttattttagtatttcctgttttggtttatttgcatcttagaagagcataatgacattgtttgatgaagcctaattatgctggactgttttgacctggtttaacccttctgataggtagttgtggatgctggggatgagaactgaataatctttgcctggagtgacactacactctagaatttccactttggagaatactcagttccaacttgtgattcctgatagaacagactttacttttctagcccagcattgatctagaagcagaggaatcccagcgccttttaaaagttgttatgtggttttcttttaaaaagctcctgtttttggaaagtagaatttatgggtacaacgtatgttcattatttgtacataaaataaaaccatttaaaaagtaa

SEQ ID NO: 307774 - DNA, 1352 bp, Homo sapiens
gaccacacggccgccggaggcacagtcgtgttcgcatctggtctaacagacccgcgagaacgaaggacgcttgcctttttccggtcggggaagggggaagaaggtgttcagattttgcaaatctaaatgtcataaaaactttaaaaagaagcgcaatcctcgcaaagttaggtggaccaaagcattccggaaagcagctggtaaagagcttacagtggataattcatttgaatttgaaaaacgtagaaatgaacctatcaaataccagcgagagctatggaataaaactattgatgcgatgaagagagttgaagaaatcaaacagaagcgccaagctaaatttataatgaacagattgaagaaaaataaagagctacagaaagttcaggatatcaaagaagtcaagcaaaacatccatcttatccgagcccctcttgcaggcaaagggaaacagttggaagagaaaatggtacagcagttacaagaggatgtggacatggaagatgctccttaaaaatctctgtaaccatttcttttatgtacatttgaaaatgccctttggatacttggaactgctaaattattttattttttacataaggtcacttaaatgaaaagcgattaaaagacatctttcctgcattgccatctacataatatcagatattacggatgttagattgcatctcagtgttaaatctttactgatagatgtacttaagtaaatcatgaaaattctacttgtaactatagaagtgaattgtggacgtaaaatggttgtgctatttggataatggcactaggcagcatttgtatagtaactaatggcaaaaattcatggctagtgatgtataaaataaaatattctttgcagtaaaatattccctttgttaatgttatagaaggggggatacaaaaaggaactaacaatttgtatggcagtgtcagatatttttattttagtatttcctgttttggtttatttgcatcttagaagagcataatgacattgtttgatgaagcctaattatgctggactgttttgacctggtttaacccttctgataggtagttgtggatgctggggatgagaactgaataatctttgcctggagtgacactacactctagaatttccactttggagaatactcagttccaacttgtgattcctgatagaacagactttacttttctagcccagcattgatctagaagcagaggaatcccagcgccttttaaaagttgttatgtggttttcttttaaaaagctcctgtttttggaaagtagaatttatgggtacaacgtatgttcattatttgtacataaaataaaaccatttaaaaagtaa

SEQ ID NO: 307775 - DNA, 1402 bp, Homo sapiens
ggcttgtcgaatttggtgtcagagggcaggcgggtagatgcagtattcctgcgatgtcctatctgaaaggttgtcatagctaagtccgggtcccactctatgctgcaatccgcatgctgtacggccgcaccgatagcatggatgttcagagtgtggcaactctgtagttgtcttaataaactatatgcagttaaaaagaagcgcaatcctcgcaaagttaggtggaccaaagcattccggaaagcagctggtaaagagcttacagtggataattcatttgaatttgaaaaacgtagaaatgaacctatcaaataccagcgagagctatggaataaaactattgatgcgatgaagagagttgaagaaatcaaacagaagcgccaagctaaatttataatgaacagattgaagaaaaataaagagctacagaaagttcaggatatcaaagaagtcaagcaaaacatccatcttatccgagcccctcttgcaggcaaagggaaacagttggaagagaaaatggtacagcagttacaagaggatgtggacatggaagatgctccttaaaaatctctgtaaccatttcttttatgtacatttgaaaatgccctttggatacttggaactgctaaattattttattttttacataaggtcacttaaatgaaaagcgattaaaagacatctttcctgcattgccatctacataatatcagatattacggatgttagattgcatctcagtgttaaatctttactgatagatgtacttaagtaaatcatgaaaattctacttgtaactatagaagtgaattgtggacgtaaaatggttgtgctatttggataatggcactaggcagcatttgtatagtaactaatggcaaaaattcatggctagtgatgtataaaataaaatattctttgcagtaaaatattccctttgttaatgttatagaaggggggatacaaaaaggaactaacaatttgtatggcagtgtcagatatttttattttagtatttcctgttttggtttatttgcatcttagaagagcataatgacattgtttgatgaagcctaattatgctggactgttttgacctggtttaacccttctgataggtagttgtggatgctggggatgagaactgaataatctttgcctggagtgacactacactctagaatttccactttggagaatactcagttccaacttgtgattcctgatagaacagactttacttttctagcccagcattgatctagaagcagaggaatcccagcgccttttaaaagttgttatgtggttttcttttaaaaagctcctgtttttggaaagtagaatttatgggtacaacgtatgttcattatttgtacataaaataaaaccatttaaaaagtaa

SEQ ID NO: 307776 - DNA, 1381 bp, Homo sapiens
aagcactggtatcaacgcagagtggccattacggccgggttcctctcaagcttggcgtttgtttggtggggttacacgcgggttcaacatgcgtatcgaaaagtgttatttctgttcggggcccatctatcctggacacggcatgatgttcgtccgcaacgattgcaagttaaaaagaagcgcaatcctcgcaaagttaggtggaccaaagcattccggaaagcagctggtaaagagcttacagtggataattcatttgaatttgaaaaacgtagaaatgaacctatcaaataccagcgagagctatggaataaaactattgatgcgatgaagagagttgaagaaatcaaacagaagcgccaagctaaatttataatgaacagattgaagaaaaataaagagctacagaaagttcaggatatcaaagaagtcaagcaaaacatccatcttatccgagcccctcttgcaggcaaagggaaacagttggaagagaaaatggtacagcagttacaagaggatgtggacatggaagatgctccttaaaaatctctgtaaccatttcttttatgtacatttgaaaatgccctttggatacttggaactgctaaattattttattttttacataaggtcacttaaatgaaaagcgattaaaagacatctttcctgcattgccatctacataatatcagatattacggatgttagattgcatctcagtgttaaatctttactgatagatgtacttaagtaaatcatgaaaattctacttgtaactatagaagtgaattgtggacgtaaaatggttgtgctatttggataatggcactaggcagcatttgtatagtaactaatggcaaaaattcatggctagtgatgtataaaataaaatattctttgcagtaaaatattccctttgttaatgttatagaaggggggatacaaaaaggaactaacaatttgtatggcagtgtcagatatttttattttagtatttcctgttttggtttatttgcatcttagaagagcataatgacattgtttgatgaagcctaattatgctggactgttttgacctggtttaacccttctgataggtagttgtggatgctggggatgagaactgaataatctttgcctggagtgacactacactctagaatttccactttggagaatactcagttccaacttgtgattcctgatagaacagactttacttttctagcccagcattgatctagaagcagaggaatcccagcgccttttaaaagttgttatgtggttttcttttaaaaagctcctgtttttggaaagtagaatttatgggtacaacgtatgttcattatttgtacataaaataaaaccatttaaaaagtaa

SEQ ID NO: 307777 - DNA, 1445 bp, Homo sapiens
  misc_feature (207)..(207): n is a, c, g, or t
acgtggcgtaaacaattcctctgaagctctggcggtcagtatgtaggtgataactggccgtattcagcttatgcttatcgatccatgtgtctatgtactagttcggtgtgccctactcttatcactgtgacacgaggcctggagtgtgtcgatccgagacgtacttgcacaggtgctccgaaaagtgtatggccatgatcgtacaantgatctagtaatctaactctatacaggagatcgcgcgaagtactcggcaaatcttaggtggaccaaagcattccggaaagcagctggtaaagagcttacagtggataattcatttgaatttgaaaaacgtagaaatgaacctatcaaataccagcgagagctatggaataaaactattgatgcgatgaagagagttgaagaaatcaaacagaagcgccaagctaaatttataatgaacagattgaagaaaaataaagagctacagaaagttcaggatatcaaagaagtcaagcaaaacatccatcttatccgagcccctcttgcaggcaaagggaaacagttggaagagaaaatggtacagcagttacaagaggatgtggacatggaagatgctccttaaaaatctctgtaaccatttcttttatgtacatttgaaaatgccctttggatacttggaactgctaaattattttattttttacataaggtcacttaaatgaaaagcgattaaaagacatctttcctgcattgccatctacataatatcagatattacggatgttagattgcatctcagtgttaaatctttactgatagatgtacttaagtaaatcatgaaaattctacttgtaactatagaagtgaattgtggacgtaaaatggttgtgctatttggataatggcactaggcagcatttgtatagtaactaatggcaaaaattcatggctagtgatgtataaaataaaatattctttgcagtaaaatattccctttgttaatgttatagaaggggggatacaaaaaggaactaacaatttgtatggcagtgtcagatatttttattttagtatttcctgttttggtttatttgcatcttagaagagcataatgacattgtttgatgaagcctaattatgctggactgttttgacctggtttaacccttctgataggtagttgtggatgctggggatgagaactgaataatctttgcctggagtgacactacactctagaatttccactttggagaatactcagttccaacttgtgattcctgatagaacagactttacttttctagcccagcattgatctagaagcagaggaatcccagcgccttttaaaagttgttatgtggttttcttttaaaaagctcctgtttttggaaagtagaatttatgggtacaacgtatgttcattatttgtacataaaataaaaccatttaaaaagtaa

SEQ ID NO: 307778 - DNA, 1435 bp, Homo sapiens
aagtttcctagcatgatgctgtgtggggcgcggtcccagtcggtattcgtgaactgtggtactctagacatgtgtccatattgagattccgtggctcctgtacttatgctggttggatgctctaggcactagattcagatacagcgcccggagtggcaaaggctgatgcgtacttgatgcaaatcctagatggtacgtctgagcgttctattacatgaaagtcgtatctccttcggagtgctaagcggtaggctcgatgtcattatggggacacgccgcctgtgtaaagagcttacagtggataattcatttgaatttgaaaaacgtagaaatgaacctatcaaataccagcgagagctatggaataaaactattgatgcgatgaagagagttgaagaaatcaaacagaagcgccaagctaaatttataatgaacagattgaagaaaaataaagagctacagaaagttcaggatatcaaagaagtcaagcaaaacatccatcttatccgagcccctcttgcaggcaaagggaaacagttggaagagaaaatggtacagcagttacaagaggatgtggacatggaagatgctccttaaaaatctctgtaaccatttcttttatgtacatttgaaaatgccctttggatacttggaactgctaaattattttattttttacataaggtcacttaaatgaaaagcgattaaaagacatctttcctgcattgccatctacataatatcagatattacggatgttagattgcatctcagtgttaaatctttactgatagatgtacttaagtaaatcatgaaaattctacttgtaactatagaagtgaattgtggacgtaaaatggttgtgctatttggataatggcactaggcagcatttgtatagtaactaatggcaaaaattcatggctagtgatgtataaaataaaatattctttgcagtaaaatattccctttgttaatgttatagaaggggggatacaaaaaggaactaacaatttgtatggcagtgtcagatatttttattttagtatttcctgttttggtttatttgcatcttagaagagcataatgacattgtttgatgaagcctaattatgctggactgttttgacctggtttaacccttctgataggtagttgtggatgctggggatgagaactgaataatctttgcctggagtgacactacactctagaatttccactttggagaatactcagttccaacttgtgattcctgatagaacagactttacttttctagcccagcattgatctagaagcagaggaatcccagcgccttttaaaagttgttatgtggttttcttttaaaaagctcctgtttttggaaagtagaatttatgggtacaacgtatgttcattatttgtacataaaataaaaccatttaaaaagtaa

SEQ ID NO: 307779 - DNA, 1382 bp, Homo sapiens
gttaacatgggtggggtgagcggcgggatcaaatgcttatcgaggacgtgtatgttgttaggggaccatgtatctgggagacgggtgatgttcgtcagtaacagattgcaagggtgtccagcagttgggcacaagtcattaaatgtcaagtatagaaagctttagaagagatgaatgcagctaggtcttcgccaagtggggtggaccagagcttgccgtaaagtagcgggtagacgaggttacaggggataattcatttgaatttgaaaaacgtagaaatgaacctatcaaataccagcgagagctatggaataaaactattgatgcgatgaagagagttgaagaaatcaaacagaagcgccaagctaaatttataatgaacagattgaagaaaaataaagagctacagaaagttcaggatatcaaagaagtcaagcaaaacatccatcttatccgagcccctcttgcaggcaaagggaaacagttggaagagaaaatggtacagcagttacaagaggatgtggacatggaagatgctccttaaaaatctctgtaaccatttcttttatgtacatttgaaaatgccctttggatacttggaactgctaaattattttattttttacataaggtcacttaaatgaaaagcgattaaaagacatctttcctgcattgccatctacataatatcagatattacggatgttagattgcatctcagtgttaaatctttactgatagatgtacttaagtaaatcatgaaaattctacttgtaactatagaagtgaattgtggacgtaaaatggttgtgctatttggataatggcactaggcagcatttgtatagtaactaatggcaaaaattcatggctagtgatgtataaaataaaatattctttgcagtaaaatattccctttgttaatgttatagaaggggggatacaaaaaggaactaacaatttgtatggcagtgtcagatatttttattttagtatttcctgttttggtttatttgcatcttagaagagcataatgacattgtttgatgaagcctaattatgctggactgttttgacctggtttaacccttctgataggtagttgtggatgctggggatgagaactgaataatctttgcctggagtgacactacactctagaatttccactttggagaatactcagttccaacttgtgattcctgatagaacagactttacttttctagcccagcattgatctagaagcagaggaatcccagcgccttttaaaagttgttatgtggttttcttttaaaaagctcctgtttttggaaagtagaatttatgggtacaacgtatgttcattatttgtacataaaataaaaccatttaaaaagtaa

SEQ ID NO: 307780 - DNA, 1442 bp, Homo sapiens
aagacttcctactacacatctcgtggtgcgcgcggtgccgagttacgtacgtgatacatggatcactatactcgtaaccgttgtgatatctgttcgagtgacccagtcgtattgctgttactacaggcaatgatagttaggtcccggaagggataggaaggggtgtctcgaagataatatgcagaatgtaagattgtgatagatacaatctattaggaatacgtaatgcagacagtgattcgcaaagagtatagtgtgagtactcaaaagcaattgcggagaagctgctggtaaagagcttacagtggataattcatttgaatttgaaaaacgtagaaatgaacctatcaaataccagcgagagctatggaataaaactattgatgcgatgaagagagttgaagaaatcaaacagaagcgccaagctaaatttataatgaacagattgaagaaaaataaagagctacagaaagttcaggatatcaaagaagtcaagcaaaacatccatcttatccgagcccctcttgcaggcaaagggaaacagttggaagagaaaatggtacagcagttacaagaggatgtggacatggaagatgctccttaaaaatctctgtaaccatttcttttatgtacatttgaaaatgccctttggatacttggaactgctaaattattttattttttacataaggtcacttaaatgaaaagcgattaaaagacatctttcctgcattgccatctacataatatcagatattacggatgttagattgcatctcagtgttaaatctttactgatagatgtacttaagtaaatcatgaaaattctacttgtaactatagaagtgaattgtggacgtaaaatggttgtgctatttggataatggcactaggcagcatttgtatagtaactaatggcaaaaattcatggctagtgatgtataaaataaaatattctttgcagtaaaatattccctttgttaatgttatagaaggggggatacaaaaaggaactaacaatttgtatggcagtgtcagatatttttattttagtatttcctgttttggtttatttgcatcttagaagagcataatgacattgtttgatgaagcctaattatgctggactgttttgacctggtttaacccttctgataggtagttgtggatgctggggatgagaactgaataatctttgcctggagtgacactacactctagaatttccactttggagaatactcagttccaacttgtgattcctgatagaacagactttacttttctagcccagcattgatctagaagcagaggaatcccagcgccttttaaaagttgttatgtggttttcttttaaaaagctcctgtttttggaaagtagaatttatgggtacaacgtatgttcattatttgtacataaaataaaaccatttaaaaagtaa

SEQ ID NO: 307781 - DNA, 1437 bp, Homo sapiens
gaccacacggccgccggaggcacagtcgtgttcgcatctggtctaacagacccgcgagaacgaaggacgcttgcctttttccggtcggggaagggggaagaaggtaacttccggtgacggggttgcatcacttcctctcaagcttggcgtttgtttggtggggttacacgcgggttcaacatgcgtatcgaaaagtgttatttctgttcggggcccatctatcctggacacggcatgatgttcgtccgcaacgattgcaaggtgttcagattttgcaaatctaaatgtcataaaaactttaaaaagaagcgcaatcctcgcaaagttaggtggaccaaagcattccggaaagcagctggtaaagagcttacagtgttgatgcgatgaagagagttgaagaaatcaaacagaagcgccaagctaaatttataatgaacagattgaagaaaaataaagagctacagaaagttcaggatatcaaagaagtcaagcaaaacatccatcttatccgagcccctcttgcaggcaaagggaaacagttggaagagaaaatggtacagcagttacaagaggatgtggacatggaagatgctccttaaaaatctctgtaaccatttcttttatgtacatttgaaaatgccctttggatacttggaactgctaaattattttattttttacataaggtcacttaaatgaaaagcgattaaaagacatctttcctgcattgccatctacataatatcagatattacggatgttagattgcatctcagtgttaaatctttactgatagatgtacttaagtaaatcatgaaaattctacttgtaactatagaagtgaattgtggacgtaaaatggttgtgctatttggataatggcactaggcagcatttgtatagtaactaatggcaaaaattcatggctagtgatgtataaaataaaatattctttgcagtaaaatattccctttgttaatgttatagaaggggggatacaaaaaggaactaacaatttgtatggcagtgtcagatatttttattttagtatttcctgttttggtttatttgcatcttagaagagcataatgacattgtttgatgaagcctaattatgctggactgttttgacctggtttaacccttctgataggtagttgtggatgctggggatgagaactgaataatctttgcctggagtgacactacactctagaatttccactttggagaatactcagttccaacttgtgattcctgatagaacagactttacttttctagcccagcattgatctagaagcagaggaatcccagcgccttttaaaagttgttatgtggttttcttttaaaaagctcctgtttttggaaagtagaatttatgggtacaacgtatgttcattatttgtacataaaataaaaccatttaaaaagtaa

SEQ ID NO: 307782 - DNA, 1380 bp, Homo sapiens
  misc_feature (169)..(169): n is a, c, g, or t
ctattaccagttcgttgtgccgcgtgtgctcgagataggtaattgatgctatggttcagtagctgttgcctagggtaggtactcctgtgtcggtgactacgttgctggtcattctcacctatttaaaagaacgcccggtgcgtcacacagagtgattgctgagaccaanaatgccatactgggaagattcctgagtgtctattaggatgcgtattcctagtcgagaactagagtatgctctcatatgacgtatgcgtacagatactgtaagattatgaccctgatcatgataccagcgagagctatggaataaaactattgatgcgatgaagagagttgaagaaatcaaacagaagcgccaagctaaatttataatgaacagattgaagaaaaataaagagctacagaaagttcaggatatcaaagaagtcaagcaaaacatccatcttatccgagcccctcttgcaggcaaagggaaacagttggaagagaaaatggtacagcagttacaagaggatgtggacatggaagatgctccttaaaaatctctgtaaccatttcttttatgtacatttgaaaatgccctttggatacttggaactgctaaattattttattttttacataaggtcacttaaatgaaaagcgattaaaagacatctttcctgcattgccatctacataatatcagatattacggatgttagattgcatctcagtgttaaatctttactgatagatgtacttaagtaaatcatgaaaattctacttgtaactatagaagtgaattgtggacgtaaaatggttgtgctatttggataatggcactaggcagcatttgtatagtaactaatggcaaaaattcatggctagtgatgtataaaataaaatattctttgcagtaaaatattccctttgttaatgttatagaaggggggatacaaaaaggaactaacaatttgtatggcagtgtcagatatttttattttagtatttcctgttttggtttatttgcatcttagaagagcataatgacattgtttgatgaagcctaattatgctggactgttttgacctggtttaacccttctgataggtagttgtggatgctggggatgagaactgaataatctttgcctggagtgacactacactctagaatttccactttggagaatactcagttccaacttgtgattcctgatagaacagactttacttttctagcccagcattgatctagaagcagaggaatcccagcgccttttaaaagttgttatgtggttttcttttaaaaagctcctgtttttggaaagtagaatttatgggtacaacgtatgttcattatttgtacataaaataaaaccatttaaaaagtaa

SEQ ID NO: 307783 - DNA, 1125 bp, Homo sapiens
aaacttgatacaatataataccagcgcgagctatggattagtactattcgcttcgacatagatggttgctaagatcatcctggaagtgcacaaagtgctgtatactgaacagtttgaagagcactgaggagctcgagaccgtgcctcgagagatatcccagatagtcatgcagagagatactcaatctggattcgatcaccctcttgcacggcgacgggcaacgctgtcggatgacaccctggtacgacagttacaagaggatgtggacatggaagatgctccttaaaaatctctgtaaccatttcttttatgtacatttgaaaatgccctttggatacttggaactgctaaattattttattttttacataaggtcacttaaatgaaaagcgattaaaagacatctttcctgcattgccatctacataatatcagatattacggatgttagattgcatctcagtgttaaatctttactgatagatgtacttaagtaaatcatgaaaattctacttgtaactatagaagtgaattgtggacgtaaaatggttgtgctatttggataatggcactaggcagcatttgtatagtaactaatggcaaaaattcatggctagtgatgtataaaataaaatattctttgcagtaaaatattccctttgttaatgttatagaaggggggatacaaaaaggaactaacaatttgtatggcagtgtcagatatttttattttagtatttcctgttttggtttatttgcatcttagaagagcataatgacattgtttgatgaagcctaattatgctggactgttttgacctggtttaacccttctgataggtagttgtggatgctggggatgagaactgaataatctttgcctggagtgacactacactctagaatttccactttggagaatactcagttccaacttgtgattcctgatagaacagactttacttttctagcccagcattgatctagaagcagaggaatcccagcgccttttaaaagttgttatgtggttttcttttaaaaagctcctgtttttggaaagtagaatttatgggtacaacgtatgttcattatttgtacataaaataaaaccatttaaaaagtaa

SEQ ID NO: 307784 - DNA, 924 bp, Homo sapiens
  misc_feature (602)..(602): n is a, c, g, or t
  misc_feature (618)..(618): n is a, c, g, or t
gaccacacggccgccggaggcacagtcgtgttcgcatctggtctaacagacccgcgagaacgaaggacgcttgcctttttccggtcggggaagggggaagaaggtaacttccggtgacggggttgcatcacttcctctcaagcttggcgtttgtttggtggggttacacgcgggttcaacatgcgtatcgaaaagtgttatttctgttcggggcccatctatcctggacacggcatgatgttcgtccgcaacgattgcaaggtgttcagattttgcaaatctaaatgtcataaaaactttaaaaagaagcgcaatcctcgcaaagttaggtggaccaaagcattccggaaagcagctggtaaagagcttacagtggataattcatttgaatttgaaaaacgtagaaatgaacctatcaaataccagcgagagctatggaataaaactattgatgcgatgaagagagttgaagaaatcaaacagaagcgccaagctaaatttataatgaacagcacagggggcatgcaagcaaacaatcaaagcagctcaagcaaagtcaggcatcttccaaagcacagtcaagccaaaaaacaattccccanaatttctttaattccngaaagccccccccctttcccttttggcccagcgccaaaagggggggaaccaccaccaccacaaaaggaggggtttctttgtgcgggggggggggacaacaacacaccaaggcggagcaacaacaccaagggggggactacactagacatacgaaaccaacttcgtgttggggggggggttcttatcacaccacccccaacatagtcgggccccacaacaaagggggtgtttcttctcacaacacccccaaaatataatgtcggcggaacgcaccggggggggggacaaccatctttttggggcggc

SEQ ID NO: 307785 - DNA, 634 bp, Homo sapiens
  misc_feature (604)..(604): n is a, c, g, or t
gaccacacggccgccggaggcacagtcgtgttcgcatctggtctaacagacccgcgagaacgaaggacgcttgcctttttccggtcggggaagggggaagaaggtaacttccggtgacggggttgcatcacttcctctcaagcttggcgtttgtttggtggggttacacgcgggttcaacatgcgtatcgaaaagtgttatttctgttcggggcccatctatcctggacacggcatgatgttcgtccgcaacgattgcaaggtgttcagattttgcaaatctaaatgtcataaaaactttaaaaagaagcgcaatcctcgcaaagttaggtggaccaaagcattccggaaagcagctggtaaagagcttacagtggataattcatttgaatttgaaaaacgtagaaatgaacctatcaaataccagcgagagctatggaataaaactatttttatgcgctggagaggggtggtggagatcaaacaaagcgcccgctttaattttttatgtccacattaggagaaaaaggagtcacaagagtgcggttttaaagaggggagagaaaaaaccctttttccccgccccttttcagggaaagggaaanaagggagggaaattggacactctcccaggg

SEQ ID NO: 307786 - DNA, 2536 bp, Homo sapiens
  misc_feature (3)..(3): n is a, c, g, or t
  misc_feature (13)..(13): n is a, c, g, or t
  misc_feature (23)..(23): n is a, c, g, or t
  misc_feature (29)..(29): n is a, c, g, or t
  misc_feature (76)..(76): n is a, c, g, or t
  misc_feature (80)..(80): n is a, c, g, or t
  misc_feature (104)..(104): n is a, c, g, or t
  misc_feature (900)..(900): n is a, c, g, or t
tancccactgatncccccccggngggatnacaggtcccaacgcttggccaccctggttaagaggccccccttccancgancaaacggccacccccggagccttnctgagggcagctctgggctttcccagctccgaagtcaatactgagatcccagatgtgtccagagacatcctgaagaggctcgggggtggaggagccttagtgtgtccacaaagggactcctgaaactgactgagagccagtggatttgccagcagtctgagcttctaccgagtcttcccccacctcaatccctgttgctatggagactaccaatggaacggagacctggtatgagagcctgcatgccgtgctgaaggctctaaatgccactcttcacagcaatttgctctgccggccagggccagggctggggccagacaaccagactgaagagaggcgggccagcctacctggccgtgatgacaactcctacatgtacattctctttgtcatgtttctatttgctgtaactgtgggcagcctcatcctgggatacacccgctcccgcaaagtggacaagcgtagtgacccctatcatgtgtatatcaagaaccgtgtgtctatgatctaacacgagagggctgggacggtggaagaccaagacacctggggattgcgtctggggcctccagaactctgctgtggactgcatcaggtctcagtgtccctatctgtaagatcaacaagaaacacggttaagggaggtcgtcactggggtgggagaagaggggctggtagaccgaagccttgtgcataaggattttttcccaggaaaagatagactttataaacagtgggagcccatgaacaaacatataaaagtagcaacagataatgaccaataactggttcagtngctggagtattaggggcctggggattggagaacggagaagaagttgtagcagagggaaatgagacaggaagatgctctggggacacattttttatgtgttatcttcagccatgagaagcagtgatgactatcccatatcacagatatgatttaccaccaccaccctgcccccgctcccgtgaagaaagcagggcaagtgctgtgctgcccatttgggcctgcatagtgccatgattggaacccaggaactctggtctccttgcctagtgcttttcaaaactctgtgctacacaggagtggatccaggcctgaaggtcatacaattctggggactctctttaagaaaaagaattctaaaatatcttacttttgcaaacattatgaaaatatactgccacattaatatgttgctagggcccctgctaggaccttaagaaggagctcatgtgagtcaggaccctgaatgttaggcctcgttagctctatggttcatatgcttcttgaaccaagtcacagggcacttcccagccacattgccaggcaacaggactaaactacctccaaagcaagcagtcttttcagttttgactgagtgatgtgagaaacttcttttcttttcttttcttttttttttttgaggcagtctccctatgtcacccaggctgtgttgcagtgagccaagatcacaccactgcactccagcctgggtgacagagcaaggctctgtctcaaaagaaaaacaaaaacaaaaacaaaaaagactgatatcgcacctaaattattattatattaaaagaagcagagtatgagagacaggtacatggtccagtaggaagagaagcagccctgattctaccacttaaggtgatgtatgatcttaggctggacacttctctccctcatccgttttcctcttcaacataatgaaatagacttgaaagtctctaaggctctatcagttctgacattctaggcttcatatacattaagttgagccatatgtaatcactgtgtttgtaggttagaaacagctgagtatcgtagtttcatatatggttccagctaatacatgcaatgtggctggtgaacacttctgaattcagaaactatcccagatctcagctagaaccatccactgttctgtttgtccagtttcaacttaagggatctccatgcggtccctggaagtacccattgaaacctgcgtatttgtgtatagcagaactctgaaataatattctgatagcagttatctctgaggaattgggttataggtgattttccctttccgcatgataaatttatgtaatatttgactgacttgaccgtaagtatgttacttgtataataaaaggaaaaaaggtacttctattttgaaaaaataaaaataaaagcctttgggttcttgaatggaggatcatggaacacatttgctgccatatgcagttatgttgatgctctgcaaacctgtgctgagccctgttgctcaagcccttcctcatctcttcttgagggagaaggtggagacttccttaaggagatgtgacatatgggaagacaacagattcagaaatttacgtggataggactttagacaccacccagcccaaacttccaaataaaatatggaacgcaa

SEQ ID NO: 307787 - DNA, 2686 bp, Homo sapiens
  misc_feature (1050)..(1050): n is a, c, g, or t
tcacccagtgaagacactgtaagtctggaggtaggggacagcaatcagaggccctttggtcactgcacagttcctttaactgcaaccctaggctggcctgacccagctgctgcaggaaggggaggggccatgggagggggtcagagcccacagcaggactgttgcataatccttggggcctggccttgggcaatccaccctggttctgaagtttgtgctttgtgtctggttccttccttttctgccttctctcctgctttctagctctgggctttcccagctccgaagtcaatactgagatcccagatgtgtccagagacatcctgaagaggctcgggggtggaggagccttagtgtgtccacaaagggactcctgaaactgactgagagccagtggatttgccagcagtctgagcttctaccgagtcttcccccacctcaatccctgttgctatggagactaccaatggaacggagacctggtatgagagcctgcatgccgtgctgaaggctctaaatgccactcttcacagcaatttgctctgccggccagggccagggctggggccagacaaccagactgaagagaggcgggccagcctacctggccgtgatgacaactcctacatgtacattctctttgtcatgtttctatttgctgtaactgtgggcagcctcatcctgggatacacccgctcccgcaaagtggacaagcgtagtgacccctatcatgtgtatatcaagaaccgtgtgtctatgatctaacacgagagggctgggacggtggaagaccaagacacctggggattgcgtctggggcctccagaactctgctgtggactgcatcaggtctcagtgtccctatctgtaagatcaacaagaaacacggttaagggaggtcgtcactggggtgggagaagaggggctggtagaccgaagccttgtgcataaggattttttcccaggaaaagatagactttataaacagtgggagcccatgaacaaacatataaaagtagcaacagataatgaccaataactggttcagtngctggagtattaggggcctggggattggagaacggagaagaagttgtagcagagggaaatgagacaggaagatgctctggggacacattttttatgtgttatcttcagccatgagaagcagtgatgactatcccatatcacagatatgatttaccaccaccaccctgcccccgctcccgtgaagaaagcagggcaagtgctgtgctgcccatttgggcctgcatagtgccatgattggaacccaggaactctggtctccttgcctagtgcttttcaaaactctgtgctacacaggagtggatccaggcctgaaggtcatacaattctggggactctctttaagaaaaagaattctaaaatatcttacttttgcaaacattatgaaaatatactgccacattaatatgttgctagggcccctgctaggaccttaagaaggagctcatgtgagtcaggaccctgaatgttaggcctcgttagctctatggttcatatgcttcttgaaccaagtcacagggcacttcccagccacattgccaggcaacaggactaaactacctccaaagcaagcagtcttttcagttttgactgagtgatgtgagaaacttcttttcttttcttttcttttttttttttgaggcagtctccctatgtcacccaggctgtgttgcagtgagccaagatcacaccactgcactccagcctgggtgacagagcaaggctctgtctcaaaagaaaaacaaaaacaaaaacaaaaaagactgatatcgcacctaaattattattatattaaaagaagcagagtatgagagacaggtacatggtccagtaggaagagaagcagccctgattctaccacttaaggtgatgtatgatcttaggctggacacttctctccctcatccgttttcctcttcaacataatgaaatagacttgaaagtctctaaggctctatcagttctgacattctaggcttcatatacattaagttgagccatatgtaatcactgtgtttgtaggttagaaacagctgagtatcgtagtttcatatatggttccagctaatacatgcaatgtggctggtgaacacttctgaattcagaaactatcccagatctcagctagaaccatccactgttctgtttgtccagtttcaacttaagggatctccatgcggtccctggaagtacccattgaaacctgcgtatttgtgtatagcagaactctgaaataatattctgatagcagttatctctgaggaattgggttataggtgattttccctttccgcatgataaatttatgtaatatttgactgacttgaccgtaagtatgttacttgtataataaaaggaaaaaaggtacttctattttgaaaaaataaaaataaaagcctttgggttcttgaatggaggatcatggaacacatttgctgccatatgcagttatgttgatgctctgcaaacctgtgctgagccctgttgctcaagcccttcctcatctcttcttgagggagaaggtggagacttccttaaggagatgtgacatatgggaagacaacagattcagaaatttacgtggataggactttagacaccacccagcccaaacttccaaataaaatatggaacgcaa

SEQ ID NO: 307788 - DNA, 2308 bp, Homo sapiens
  misc_feature (1050)..(1050): n is a, c, g, or t
tcacccagtgaagacactgtaagtctggaggtaggggacagcaatcagaggccctttggtcactgcacagttcctttaactgcaaccctaggctggcctgacccagctgctgcaggaaggggaggggccatgggagggggtcagagcccacagcaggactgttgcataatccttggggcctggccttgggcaatccaccctggttctgaagtttgtgctttgtgtctggttccttccttttctgccttctctcctgctttctagctctgggctttcccagctccgaagtcaatactgagatcccagatgtgtccagagacatcctgaagaggctcgggggtggaggagccttagtgtgtccacaaagggactcctgaaactgactgagagccagtggatttgccagcagtctgagcttctaccgagtcttcccccacctcaatccctgttgctatggagactaccaatggaacggagacctggtatgagagcctgcatgccgtgctgaaggctctaaatgccactcttcacagcaatttgctctgccggccagggccagggctggggccagacaaccagactgaagagaggcgggccagcctacctggccgtgatgacaactcctacatgtacattctctttgtcatgtttctatttgctgtaactgtgggcagcctcatcctgggatacacccgctcccgcaaagtggacaagcgtagtgacccctatcatgtgtatatcaagaaccgtgtgtctatgatctaacacgagagggctgggacggtggaagaccaagacacctggggattgcgtctggggcctccagaactctgctgtggactgcatcaggtctcagtgtccctatctgtaagatcaacaagaaacacggttaagggaggtcgtcactggggtgggagaagaggggctggtagaccgaagccttgtgcataaggattttttcccaggaaaagatagactttataaacagtgggagcccatgaacaaacatataaaagtagcaacagataatgaccaataactggttcagtngctggagtattaggggcctggggattggagaacggagaagaagttgtagcagagggaaatgagacaggaagatgctctggggacacattttttatgtgttatcttcagccatgagaagcagtgatgactatcccatatcacagatatgatttaccaccaccaccctgcccccgctcccgtgaagaaagcagggcaagtgctgtgctgcccatttgggcctgcatagtgccatgattggaacccaggaactctggtctccttgcctagtgcttttcaaaactctgtgctacacaggagtggatccaggcctgaaggtcatacaattctgggtgacagagcaaggctctgtctcaaaagaaaaacaaaaacaaaaacaaaaaagactgatatcgcacctaaattattattatattaaaagaagcagagtatgagagacaggtacatggtccagtaggaagagaagcagccctgattctaccacttaaggtgatgtatgatcttaggctggacacttctctccctcatccgttttcctcttcaacataatgaaatagacttgaaagtctctaaggctctatcagttctgacattctaggcttcatatacattaagttgagccatatgtaatcactgtgtttgtaggttagaaacagctgagtatcgtagtttcatatatggttccagctaatacatgcaatgtggctggtgaacacttctgaattcagaaactatcccagatctcagctagaaccatccactgttctgtttgtccagtttcaacttaagggatctccatgcggtccctggaagtacccattgaaacctgcgtatttgtgtatagcagaactctgaaataatattctgatagcagttatctctgaggaattgggttataggtgattttccctttccgcatgataaatttatgtaatatttgactgacttgaccgtaagtatgttacttgtataataaaaggaaaaaaggtacttctattttgaaaaaataaaaataaaagcctttgggttcttgaatggaggatcatggaacacatttgctgccatatgcagttatgttgatgctctgcaaacctgtgctgagccctgttgctcaagcccttcctcatctcttcttgagggagaaggtggagacttccttaaggagatgtgacatatgggaagacaacagattcagaaatttacgtggataggactttagacaccacccagcccaaacttccaaataaaatatggaacgcaa

SEQ ID NO: 307789 - DNA, 2682 bp, Homo sapiens
  misc_feature (1046)..(1046): n is a, c, g, or t
tttataaagaaaaagaagtttaatggactcacagttccacacggctgggtaggcctcacaatcacggcagaaggcgaaggaggagcaaaggcacatcttaaacagtggcaggcaagagagcaggtgcaggggaactgccctttctaaaccatcagatctcgtgagacttattcactatcatgagaacagcatgggaaaaacccacccccatgattcagttacctcctactgggtccctcccatgacacatggggattatgggagctatgattccagatgagatttgggtggggacacagccaaaccatatcagccatgatgctaagattttacctgggatctgaagggaggaggtcatttgagctgcaggtgacagagccatcccctctctcttttcttttgccaccagagcttctaccgagtcttcccccacctcaatccctgttgctatggagactaccaatggaacggagacctggtatgagagcctgcatgccgtgctgaaggctctaaatgccactcttcacagcaatttgctctgccggccagggccagggctggggccagacaaccagactgaagagaggcgggccagcctacctggccgtgatgacaactcctacatgtacattctctttgtcatgtttctatttgctgtaactgtgggcagcctcatcctgggatacacccgctcccgcaaagtggacaagcgtagtgacccctatcatgtgtatatcaagaaccgtgtgtctatgatctaacacgagagggctgggacggtggaagaccaagacacctggggattgcgtctggggcctccagaactctgctgtggactgcatcaggtctcagtgtccctatctgtaagatcaacaagaaacacggttaagggaggtcgtcactggggtgggagaagaggggctggtagaccgaagccttgtgcataaggattttttcccaggaaaagatagactttataaacagtgggagcccatgaacaaacatataaaagtagcaacagataatgaccaataactggttcagtngctggagtattaggggcctggggattggagaacggagaagaagttgtagcagagggaaatgagacaggaagatgctctggggacacattttttatgtgttatcttcagccatgagaagcagtgatgactatcccatatcacagatatgatttaccaccaccaccctgcccccgctcccgtgaagaaagcagggcaagtgctgtgctgcccatttgggcctgcatagtgccatgattggaacccaggaactctggtctccttgcctagtgcttttcaaaactctgtgctacacaggagtggatccaggcctgaaggtcatacaattctggggactctctttaagaaaaagaattctaaaatatcttacttttgcaaacattatgaaaatatactgccacattaatatgttgctagggcccctgctaggaccttaagaaggagctcatgtgagtcaggaccctgaatgttaggcctcgttagctctatggttcatatgcttcttgaaccaagtcacagggcacttcccagccacattgccaggcaacaggactaaactacctccaaagcaagcagtcttttcagttttgactgagtgatgtgagaaacttcttttcttttcttttcttttttttttttgaggcagtctccctatgtcacccaggctgtgttgcagtgagccaagatcacaccactgcactccagcctgggtgacagagcaaggctctgtctcaaaagaaaaacaaaaacaaaaacaaaaaagactgatatcgcacctaaattattattatattaaaagaagcagagtatgagagacaggtacatggtccagtaggaagagaagcagccctgattctaccacttaaggtgatgtatgatcttaggctggacacttctctccctcatccgttttcctcttcaacataatgaaatagacttgaaagtctctaaggctctatcagttctgacattctaggcttcatatacattaagttgagccatatgtaatcactgtgtttgtaggttagaaacagctgagtatcgtagtttcatatatggttccagctaatacatgcaatgtggctggtgaacacttctgaattcagaaactatcccagatctcagctagaaccatccactgttctgtttgtccagtttcaacttaagggatctccatgcggtccctggaagtacccattgaaacctgcgtatttgtgtatagcagaactctgaaataatattctgatagcagttatctctgaggaattgggttataggtgattttccctttccgcatgataaatttatgtaatatttgactgacttgaccgtaagtatgttacttgtataataaaaggaaaaaaggtacttctattttgaaaaaataaaaataaaagcctttgggttcttgaatggaggatcatggaacacatttgctgccatatgcagttatgttgatgctctgcaaacctgtgctgagccctgttgctcaagcccttcctcatctcttcttgagggagaaggtggagacttccttaaggagatgtgacatatgggaagacaacagattcagaaatttacgtggataggactttagacaccacccagcccaaacttccaaataaaatatggaacgcaa

SEQ ID NO: 307790 - DNA, 3905 bp, Homo sapiens
cccaaacccagccactcacacatggcgggctcagcagccaccggccccgcccctcctcgtcgccgcagtcgcaactgcgtctgcggccacagggcggacagccacgcctctgcggagggcgaccggaagtgctcacgtcttcaccttccccgccacgccaccgtcctttcaggcccagcgtgcagcaggaaggaggactcttttgccgcggactcaagccggaagccgccttcctagtggagacgcgagtgggggaggagcagtccgaggggaacgtgggttgaacgttgcaactagggtggagatcaagctggaacaggagttccgatcgacccggtaccaagaaggggagtgcccgcggcagggttcattgaaaaaatccttagtgatattgacatgtctcaagtgacataaattagccaatgactcggaatgatggattctccgaagattggaaatggtttgccagtgattggaccagggactgatatagggatatcttcactccacatggtggggtatttgggaaaaaattttgattcagctaaagttccatcagatgagtattgccctgcttgtagagagaagggaaagttaaaagccttaaagacttaccgaattagttttcaagaatctatctttttgtgtgaggatctgcagtgcatctatcctttgggctctaaatcacttaataacctaatttctcctgatttggaagaatgtcacactccacataagcctcagaaaaggaagagcttagaaagcagctataaggattcacttcttttagcaaattccaaaaagactagaaattatattgctattgacggtggaaaagttttgaacagcaaacataatggagaagtatatgacgaaacctcgtcaaacttacctgatagtagtggtcaacagaatccaattaggacagctgattccttggagcggaatgagattttggaagctgatactgttgacatggctactacaaaagatcctgctacagttgatgtctctggaactggcagaccttcccctcaaaatgaaggatgtacatctaaactggaaatgccactggagagcaaatgtacatcatttccccaggctttatgtgtccagtggaaaaatgcttatgctctctgttggttagactgtatcctgtcagctttggtgcactcggaagagttaaagaacaccgtgactggactgtgctcgaaggaggaatctatattctggcggttgcttacaaaatataatcaagcaaatacacttctatataccagtcaattgagtggtgttaaagatggagattgtaaaaaacttacctcagaaatatttgcagagatagagacctgtctgaatgaagttagagatgaaatttttattagccttcagccccagcttagatgcacattaggtgatatggaaagccctgtgtttgcatttcccctgctcttaaaactagaaacccacattgaaaagctcttcctatattctttttcttgggactttgaatgttcgcagtgtggacaccaatatcaaaacaggcatatgaagagtctggtcacctttacaaatgtcatccctgagtggcacccacttaatgctgcccattttggtccatgtaacaattgcaacagtaaatcacaaataagaaaaatggtattagaaaaagtatctcccatattcatgttgcactttgtagaaggcttaccacagaatgacttgcagcactatgcatttcattttgaaggctgtctttatcagataacttctgtaattcagtatcgagcaaataatcattttataacatggattttagatgctgatggaagttggctggaatgtgatgacttaaaaggcccatgttctgaaaggcacaagaaatttgaagttcctgcttcagagatacatattgttatttgggaaagaaaaatatcccaagtgacagataaagaagctgcctgccttccacttaaaaagactaatgaccaacacgctctcagtaatgagaaaccagtatctttaacatcgtgttctgtgggtgatgctgcctcagctgaaacagcctcagtaactcaccctaaagatatatcagttgcccctcgtactctttcacaggacacagctgtaactcatggagatcatttactttcaggtccaaaaggtttggttgacaatattttacctctgacacttgaagaaactatccagaaaacagcctcagtttcacagttaaattctgaagctttcctgttagaaaataaacctgtagcagaaaatacaggaattctcaaaaccaatactttgctatcacaagaatcactaatggcttcttcagtatcagctccatgtaatgaaaagcttattcaagaccaatttgtggacataagttttccatcccaagttgtaaatacaaacatgcagtcagtacagctgaatacagaagatactgtaaatactaaatctgtgaataatactgatgctactggtcttatacagggagtgaagtcagtagaaattgagaaggacgctcagttaaaacaattccttacaccaaaaactgaacaattaaaaccagaacgtgtcacatctcaggtatctaatttgaagaaaaaagaaactacagcagattctcaaaccacaacatctaagtcattacagaatcagtctctgaaagaaaatcagaagaagccatttgtgggaagttgggttaaaggcttaataagcaggggtgcttcttttatgccactctgtgtttcagctcataatagaaacactataactgatttacaaccttcagttaaaggggtaaataattttggtggctttaaaactaaaggtataaaccagaaggccagccacgtatccaagaaagctcgtaagagtgcaagtaagcctcctcccatcagtaagccaccagcaggccctccatcgtctaatggcacagctgcccacccacatgctcatgctgcttcagaagttttggaaaagtctggaagcacctcatgtggagctcaactcaaccacagttcttatgggaatggtatttcttcagcaaaccatgaagacttggtggaaggtcagattcataaacttcgtctaaaacttcgtaaaaagctaaaggcagaaaagaagaaattagctgctcttatgtcttccccgcaaagcagaacagttcgaagtgaaaatctagaacaggtgccccaggatgggtctccaaatgattgtgaatcaatagaggacttgttaaatgagctaccatatccaattgatattgccagtgagtctgcatgcaccactgttcctggtgtttccctgtacagtagtcaaactcatgaagaaattttagcggaattattgtctcctacacctgtttcaacagagctgtcagaaaatggggaaggtgactttaggtatttgggaatgggagatagtcatatcccaccaccagtaccaagtgaattcaatgatgtttcccagaacacacatctgagacaggaccataattattgtagccccaccaagaaaaatccatgtgaagttcagccagactctctgacaaataatgcctgcgttagaacattaaacttggagagtccgatgaagactgatattttcgatgagtttttttcctcctcagcattaaatgctttagcaaatgacacattagacctacctcatttcgatgaatatctgtttgagaattattgaattaatgcttgttaacttttttcatataatatttattattattagaagaacttacaatgtgttcaggtagtgtttatacactggacttgtgtaattacttgtgtaataaccatgaacaaaatgcaaggtttaacctttggttctgcccatgaagcatgtaatctttcttacacattaaaatcactgaatgtgtt

SEQ ID NO: 307791 - DNA, 935 bp, Homo sapiens
cccaaacccagccactcacacatggcgggctcagcagccaccggccccgcccctcctcgtcgccgcagtcgcaactgcgtctgcggccacagggcggacagccacgcctctgcggagggcgaccggaagtgctcacgtcttcaccttccccgccacgccaccgtcctttcaggcccagcgtgcagcaggaaggaggactcttttgccgcggactcaagccggaagccgccttcctagtggagacgcgagtgggggaggagcagtccgaggggaacgtgggttgaacgttgcaactagggtggagatcaagctggaacaggagttccgatcgacccggtaccaagaaggggagtgcccgcggcagtaattcgccaaaatgacgaacacaaagggaaagaggagaggcacccgatatatgttctctaggccttttagaaaacatggagttgttcctttggccacatatatgcgaatctataagaaaggtgatattgtagacatcaagggaatgggtactgttcaaagaaggaatgccccacaagtgttaccatggcaaaacgtggaagagtctacaatgttacccagcatgctgttggcattgttgtaaacaaacaagttaagggcaagattcttgccaagagaattaagtgtgcgtattgagcacattaagcactctaagagccgagatagcttcctgaaacgtgtgaaggaaacatgatcagaaaaagaaagaagccaaagagaaaggtacctgggttcaactaaagcgccagcctgctccacccagagaagcacactttcgtgagaaccaatgggaaggagcctgagctgctggaacctattccctatgaattcatggcataataggtgttagaacaaacaaatttaaaggacctctgggctacaaaaaaaaatgaagctctcaaagaagactg

SEQ ID NO: 307792 - DNA, 4158 bp, Homo sapiens
cccaaacccagccactcacacatggcgggctcagcagccaccggccccgcccctcctcgtcgccgcagtcgcaactgcgtctgcggccacagggcggacagccacgcctctgcggagggcgaccggaagtgctcacgtcttcaccttccccgccacgccaccgtcctttcaggcccagcgtgcagcaggaaggaggactcttttgccgcggactcaagccggaagccgccttcctagtggagacgcgagtgggggaggagcagtccgaggggaacgtgggttgaacgttgcaactagggtggagatcaagctggaacaggagttccgatcgacccggtaccaagaaggggagtgcccgcggcagggttcattgaaaaaatccttagtgatattgacatgtctcaagtgacataaattagccaatgactcggaatgatggattctccgaagattggaaatggtttgccagtgattggaccagggactgatatagggatatcttcactccacatggtggggtatttgggaaaaaattttgattcagctaaagttccatcagatgagtattgccctgcttgtagagagaagggaaagttaaaagccttaaagacttaccgaattagttttcaagaatctatctttttgtgtgaggatctgcagtgcatctatcctttgggctctaaatcacttaataacctaatttctcctgatttggaagaatgtcacactccacataagcctcagaaaaggaagagcttagaaagcagctataaggattcacttcttttagcaaattccaaaaagactagaaattatattgctattgacggtggaaaagttttgaacagcaaacataatggagaagtatatgacgaaacctcgtcaaacttacctgatagtagtggtcaacagaatccaattaggacagctgattccttggagcggaatgagattttggaagctgatactgttgacatggctactacaaaagatcctgctacagttgatgtctctggaactggcagaccttcccctcaaaatgaaggatgtacatctaaactggaaatgccactggagagcaaatgtacatcatttccccaggctttatgtgtccagtggaaaaatgcttatgctctctgttggttagactgtatcctgtcagctttggtgcactcggaagagttaaagaacaccgtgactggactgtgctcgaaggaggaatctatattctggcggttgcttacaaaatataatcaagcaaatacacttctatataccagtcaattgagtggtgttaaagatggagattgtaaaaaacttacctcagaaatatttgcagagatagagacctgtctgaatgaagttagagatgaaatttttattagccttcagccccagcttagatgcacattaggtgatatggaaagccctgtgtttgcatttcccctgctcttaaaactagaaacccacattgaaaagctcttcctatattctttttcttgggactttgaatgttcgcagtgtggacaccaatatcaaaacaggcatatgaagagtctggtcacctttacaaatgtcatccctgagtggcacccacttaatgctgcccattttggtccatgtaacaattgcaacagtaaatcacaaataagaaaaatggtattagaaaaagtatctcccatattcatgttgcactttgtagaaggcttaccacagaatgacttgcagcactatgcatttcattttgaaggctgtctttatcagataacttctgtaattcagtatcgagcaaataatcattttataacatggattttagatgctgatggaagttggctggaatgtgatgacttaaaaggcccatgttctgaaaggcacaagaaatttgaagttcctgcttcagagatacatattgttatttgggaaagaaaaatatcccaagtgacagataaagaagctgcctgccttccacttaaaaagactaatgaccaacacgctctcagtaatgagaaaccagtatctttaacatcgtgttctgtgggtgatgctgcctcagctgaaacagcctcagtaactcaccctaaagatatatcagttgcccctcgtactctttcacaggacacagctgtaactcatggagatcatttactttcaggtccaaaaggtttggttgacaatattttacctctgacacttgaagaaactatccagaaaacagcctcagtttcacagttaaattctgaagctttcctgttagaaaataaacctgtagcagaaaatacaggaattctcaaaaccaatactttgctatcacaagaatcactaatggcttcttcagtatcagctccatgtaatgaaaagcttattcaagaccaatttgtggacataagttttccatcccaagttgtaaatacaaacatgcagtcagtacagctgaatacagaagatactgtaaatactaaatctgtgaataatactgatgctactggtcttatacagggagtgaagtcagtagaaattgagaaggacgctcagttaaaacaattccttacaccaaaaactgaacaattaaaaccagaacgtgtcacatctcaggtatctaatttgaagaaaaaagaaactacagcagattctcaaaccacaacatctaagtcattacagaatcagtctctgaaagaaaatcagaagaagccatttgtgggaagttgggttaaaggcttaataagcaggggtgcttcttttatgccactctgtgtttcagctcataatagaaacactataactgatttacaaccttcagttaaaggggtaaataattttggtggctttaaaactaaaggtataaaccagaaggccagccacgtatccaagaaagctcgtaagagtgcaagtaagcctcctcccatcagtaagccaccagcaggccctccatcgtctaatggcacagctgcccacccacatgctcatgctgcttcagaagttttggaaaagtctggaagcacctcatgtggagctcaactcaaccacagttcttatgggaatggtatttcttcagcaaaccatgaagacttggtggaaggtcagattcataaacttcgtctaaaacttcgtaaaaagctaaaggcagaaaagaagaaattagctgctcttatgtcttccccgcaaagcagaacagttcgaagtgaaaatctagaacaggtgccccaggatgggtctccaaatgattgtgaatcaatagaggacttgttaaatgagctaccatatccaattgatattgccagtgagtctgcatgcaccactgttcctggtgtttccctgtacagtagtcaaactcatgaagaaattttagcggaattattgtctcctacacctgtttcaacagagctgtcagaaaatggggaaggtgactttaggtatttgggaatgggagatagtcatatcccaccaccagtaccaagtgaattcaatgatgtttcccagaacacacatctgagacaggaccataattattgtagccccaccaagaaaaatccatgtgaagttcagccagactctctgacaaataatgcctgcgttagaacattaaacttggagagtccgatgaagactgatattttcgatgagtttttttcctcctcagcattaaatgctttagcaaatgacacattagacctacctcatttcgatgaatatctgtttgagaattattgaattaatgcttgttaacttttttcatataatatttattattattagaagaacttacaatgtgttcaggtagtgtttatacactggacttgtgtaattacttgtgtaataaccatgaacaaaatgcaaggtttaacctttggttctgcccatgaagcatgtaatctttcttacacattaaaatcactgaatgtgttctcctttttggtttcattttgttcttgtgagagtatgaggatttcaaaatgttaaagatgaaaagtggcgtctagtttctgacagtttgtacagttggatgcattacatttttagatttgaagttttggttatgttagtgttatgagtgatctttgtggtggttttcttcccctggaaacctgttgctcgtggcgctttgcccacggtgcccgagttcttgtcctgtgtccagatatgcagacaaatgaaggg

SEQ ID NO: 307793 - DNA, 3887 bp, Homo sapiens
cccaaacccagccactcacacatggcgggctcagcagccaccggccccgcccctcctcgtcgccgcagtcgcaactgcgtctgcggccacagggcggacagccacgcctctgcggagggcgaccggaagtgctcacgtcttcaccttccccgccacgccaccgtcctttcaggcccagcgtgcagcaggaaggaggactcttttgccgcggactcaagccggaagccgccttcctagtggagacgcgagtgggggaggagcagtccgaggggaacgtgggttgaacgttgcaactagggtggagatcaagctggaacaggagttccgatcgacccggtaccaagaaggggagtgcccgcggcagggttcattgaaaaaatccttagtgatattgacatgtctcaagtgacataaattagccaatgactcggaatgatggattctccgaagattggaaatggtttgccagtgattggaccagggactgatatagggatatcttcactccacatgaattttgattcagctaaagttccatcagatgagtattgccctgcttgtagagagaagggaaagttaaaagccttaaagacttaccgaattagttttcaagaatctatctttttgtgtgaggatctgcagtgcatctatcctttgggctctaaatcacttaataacctaatttctcctgatttggaagaatgtcacactccacataagcctcagaaaaggaagagcttagaaagcagctataaggattcacttcttttagcaaattccaaaaagactagaaattatattgctattgacggtggaaaagttttgaacagcaaacataatggagaagtatatgacgaaacctcgtcaaacttacctgatagtagtggtcaacagaatccaattaggacagctgattccttggagcggaatgagattttggaagctgatactgttgacatggctactacaaaagatcctgctacagttgatgtctctggaactggcagaccttcccctcaaaatgaaggatgtacatctaaactggaaatgccactggagagcaaatgtacatcatttccccaggctttatgtgtccagtggaaaaatgcttatgctctctgttggttagactgtatcctgtcagctttggtgcactcggaagagttaaagaacaccgtgactggactgtgctcgaaggaggaatctatattctggcggttgcttacaaaatataatcaagcaaatacacttctatataccagtcaattgagtggtgttaaagatggagattgtaaaaaacttacctcagaaatatttgcagagatagagacctgtctgaatgaagttagagatgaaatttttattagccttcagccccagcttagatgcacattaggtgatatggaaagccctgtgtttgcatttcccctgctcttaaaactagaaacccacattgaaaagctcttcctatattctttttcttgggactttgaatgttcgcagtgtggacaccaatatcaaaacaggcatatgaagagtctggtcacctttacaaatgtcatccctgagtggcacccacttaatgctgcccattttggtccatgtaacaattgcaacagtaaatcacaaataagaaaaatggtattagaaaaagtatctcccatattcatgttgcactttgtagaaggcttaccacagaatgacttgcagcactatgcatttcattttgaaggctgtctttatcagataacttctgtaattcagtatcgagcaaataatcattttataacatggattttagatgctgatggaagttggctggaatgtgatgacttaaaaggcccatgttctgaaaggcacaagaaatttgaagttcctgcttcagagatacatattgttatttgggaaagaaaaatatcccaagtgacagataaagaagctgcctgccttccacttaaaaagactaatgaccaacacgctctcagtaatgagaaaccagtatctttaacatcgtgttctgtgggtgatgctgcctcagctgaaacagcctcagtaactcaccctaaagatatatcagttgcccctcgtactctttcacaggacacagctgtaactcatggagatcatttactttcaggtccaaaaggtttggttgacaatattttacctctgacacttgaagaaactatccagaaaacagcctcagtttcacagttaaattctgaagctttcctgttagaaaataaacctgtagcagaaaatacaggaattctcaaaaccaatactttgctatcacaagaatcactaatggcttcttcagtatcagctccatgtaatgaaaagcttattcaagaccaatttgtggacataagttttccatcccaagttgtaaatacaaacatgcagtcagtacagctgaatacagaagatactgtaaatactaaatctgtgaataatactgatgctactggtcttatacagggagtgaagtcagtagaaattgagaaggacgctcagttaaaacaattccttacaccaaaaactgaacaattaaaaccagaacgtgtcacatctcaggtatctaatttgaagaaaaaagaaactacagcagattctcaaaccacaacatctaagtcattacagaatcagtctctgaaagaaaatcagaagaagccatttgtgggaagttgggttaaaggcttaataagcaggggtgcttcttttatgccactctgtgtttcagctcataatagaaacactataactgatttacaaccttcagttaaaggggtaaataattttggtggctttaaaactaaaggtataaaccagaaggccagccacgtatccaagaaagctcgtaagagtgcaagtaagcctcctcccatcagtaagccaccagcaggccctccatcgtctaatggcacagctgcccacccacatgctcatgctgcttcagaagttttggaaaagtctggaagcacctcatgtggagctcaactcaaccacagttcttatgggaatggtatttcttcagcaaaccatgaagacttggtggaaggtcagattcataaacttcgtctaaaacttcgtaaaaagctaaaggcagaaaagaagaaattagctgctcttatgtcttccccgcaaagcagaacagttcgaagtgaaaatctagaacaggtgccccaggatgggtctccaaatgattgtgaatcaatagaggacttgttaaatgagctaccatatccaattgatattgccagtgagtctgcatgcaccactgttcctggtgtttccctgtacagtagtcaaactcatgaagaaattttagcggaattattgtctcctacacctgtttcaacagagctgtcagaaaatggggaaggtgactttaggtatttgggaatgggagatagtcatatcccaccaccagtaccaagtgaattcaatgatgtttcccagaacacacatctgagacaggaccataattattgtagccccaccaagaaaaatccatgtgaagttcagccagactctctgacaaataatgcctgcgttagaacattaaacttggagagtccgatgaagactgatattttcgatgagtttttttcctcctcagcattaaatgctttagcaaatgacacattagacctacctcatttcgatgaatatctgtttgagaattattgaattaatgcttgttaacttttttcatataatatttattattattagaagaacttacaatgtgttcaggtagtgtttatacactggacttgtgtaattacttgtgtaataaccatgaacaaaatgcaaggtttaacctttggttctgcccatgaagcatgtaatctttcttacacattaaaatcactgaatgtgtt

SEQ ID NO: 307794 - DNA, 3738 bp, Homo sapiens
cccaaacccagccactcacacatggcgggctcagcagccaccggccccgcccctcctcgtcgccgcagtcgcaactgcgtctgcggccacagggcggacagccacgcctctgcggagggcgaccggaagtgctcacgtcttcaccttccccgccacgccaccgtcctttcaggcccagcgtgcagcaggaaggaggactcttttgccgcggactcaagccggaagccgccttcctagtggagacgcgagtgggggaggagcagtccgaggggaacgtgggttgaacgttgcaactagggtggagatcaagctggaacaggagttccgatcgacccggtaccaagaaggggagtgcccgcggcagaattttgattcagctaaagttccatcagatgagtattgccctgcttgtagagagaagggaaagttaaaagccttaaagacttaccgaattagttttcaagaatctatctttttgtgtgaggatctgcagtgcatctatcctttgggctctaaatcacttaataacctaatttctcctgatttggaagaatgtcacactccacataagcctcagaaaaggaagagcttagaaagcagctataaggattcacttcttttagcaaattccaaaaagactagaaattatattgctattgacggtggaaaagttttgaacagcaaacataatggagaagtatatgacgaaacctcgtcaaacttacctgatagtagtggtcaacagaatccaattaggacagctgattccttggagcggaatgagattttggaagctgatactgttgacatggctactacaaaagatcctgctacagttgatgtctctggaactggcagaccttcccctcaaaatgaaggatgtacatctaaactggaaatgccactggagagcaaatgtacatcatttccccaggctttatgtgtccagtggaaaaatgcttatgctctctgttggttagactgtatcctgtcagctttggtgcactcggaagagttaaagaacaccgtgactggactgtgctcgaaggaggaatctatattctggcggttgcttacaaaatataatcaagcaaatacacttctatataccagtcaattgagtggtgttaaagatggagattgtaaaaaacttacctcagaaatatttgcagagatagagacctgtctgaatgaagttagagatgaaatttttattagccttcagccccagcttagatgcacattaggtgatatggaaagccctgtgtttgcatttcccctgctcttaaaactagaaacccacattgaaaagctcttcctatattctttttcttgggactttgaatgttcgcagtgtggacaccaatatcaaaacaggcatatgaagagtctggtcacctttacaaatgtcatccctgagtggcacccacttaatgctgcccattttggtccatgtaacaattgcaacagtaaatcacaaataagaaaaatggtattagaaaaagtatctcccatattcatgttgcactttgtagaaggcttaccacagaatgacttgcagcactatgcatttcattttgaaggctgtctttatcagataacttctgtaattcagtatcgagcaaataatcattttataacatggattttagatgctgatggaagttggctggaatgtgatgacttaaaaggcccatgttctgaaaggcacaagaaatttgaagttcctgcttcagagatacatattgttatttgggaaagaaaaatatcccaagtgacagataaagaagctgcctgccttccacttaaaaagactaatgaccaacacgctctcagtaatgagaaaccagtatctttaacatcgtgttctgtgggtgatgctgcctcagctgaaacagcctcagtaactcaccctaaagatatatcagttgcccctcgtactctttcacaggacacagctgtaactcatggagatcatttactttcaggtccaaaaggtttggttgacaatattttacctctgacacttgaagaaactatccagaaaacagcctcagtttcacagttaaattctgaagctttcctgttagaaaataaacctgtagcagaaaatacaggaattctcaaaaccaatactttgctatcacaagaatcactaatggcttcttcagtatcagctccatgtaatgaaaagcttattcaagaccaatttgtggacataagttttccatcccaagttgtaaatacaaacatgcagtcagtacagctgaatacagaagatactgtaaatactaaatctgtgaataatactgatgctactggtcttatacagggagtgaagtcagtagaaattgagaaggacgctcagttaaaacaattccttacaccaaaaactgaacaattaaaaccagaacgtgtcacatctcaggtatctaatttgaagaaaaaagaaactacagcagattctcaaaccacaacatctaagtcattacagaatcagtctctgaaagaaaatcagaagaagccatttgtgggaagttgggttaaaggcttaataagcaggggtgcttcttttatgccactctgtgtttcagctcataatagaaacactataactgatttacaaccttcagttaaaggggtaaataattttggtggctttaaaactaaaggtataaaccagaaggccagccacgtatccaagaaagctcgtaagagtgcaagtaagcctcctcccatcagtaagccaccagcaggccctccatcgtctaatggcacagctgcccacccacatgctcatgctgcttcagaagttttggaaaagtctggaagcacctcatgtggagctcaactcaaccacagttcttatgggaatggtatttcttcagcaaaccatgaagacttggtggaaggtcagattcataaacttcgtctaaaacttcgtaaaaagctaaaggcagaaaagaagaaattagctgctcttatgtcttccccgcaaagcagaacagttcgaagtgaaaatctagaacaggtgccccaggatgggtctccaaatgattgtgaatcaatagaggacttgttaaatgagctaccatatccaattgatattgccagtgagtctgcatgcaccactgttcctggtgtttccctgtacagtagtcaaactcatgaagaaattttagcggaattattgtctcctacacctgtttcaacagagctgtcagaaaatggggaaggtgactttaggtatttgggaatgggagatagtcatatcccaccaccagtaccaagtgaattcaatgatgtttcccagaacacacatctgagacaggaccataattattgtagccccaccaagaaaaatccatgtgaagttcagccagactctctgacaaataatgcctgcgttagaacattaaacttggagagtccgatgaagactgatattttcgatgagtttttttcctcctcagcattaaatgctttagcaaatgacacattagacctacctcatttcgatgaatatctgtttgagaattattgaattaatgcttgttaacttttttcatataatatttattattattagaagaacttacaatgtgttcaggtagtgtttatacactggacttgtgtaattacttgtgtaataaccatgaacaaaatgcaaggtttaacctttggttctgcccatgaagcatgtaatctttcttacacattaaaatcactgaatgtgtt

SEQ ID NO: 307795 - DNA, 2808 bp, Homo sapiens
accaagatggctgctaagtgaaccacaggcaggagtgtagacagcatggacacattagacgaagggaagattcacgttgccagtggaacacagcaggacagcaagagagttcatgatgctactcagaatggcatgaaatttaaagcttataaattgtttctggaattttccgcttaatattttcagaccacggttgagttcagatggagattgtaaaaaacttacctcagaaatatttgcagagatagagacctgtctgaatgaagttagagatgaaatttttattagccttcagccccagcttagatgcacattaggtgatatggaaagccctgtgtttgcatttcccctgctcttaaaactagaaacccacattgaaaagctcttcctatattctttttcttgggactttgaatgttcgcagtgtggacaccaatatcaaaacaggcatatgaagagtctggtcacctttacaaatgtcatccctgagtggcacccacttaatgctgcccattttggtccatgtaacaattgcaacagtaaatcacaaataagaaaaatggtattagaaaaagtatctcccatattcatgttgcactttgtagaaggcttaccacagaatgacttgcagcactatgcatttcattttgaaggctgtctttatcagataacttctgtaattcagtatcgagcaaataatcattttataacatggattttagatgctgatggaagttggctggaatgtgatgacttaaaaggcccatgttctgaaaggcacaagaaatttgaagttcctgcttcagagatacatattgttatttgggaaagaaaaatatcccaagtgacagataaagaagctgcctgccttccacttaaaaagactaatgaccaacacgctctcagtaatgagaaaccagtatctttaacatcgtgttctgtgggtgatgctgcctcagctgaaacagcctcagtaactcaccctaaagatatatcagttgcccctcgtactctttcacaggacacagctgtaactcatggagatcatttactttcaggtccaaaaggtttggttgacaatattttacctctgacacttgaagaaactatccagaaaacagcctcagtttcacagttaaattctgaagctttcctgttagaaaataaacctgtagcagaaaatacaggaattctcaaaaccaatactttgctatcacaagaatcactaatggcttcttcagtatcagctccatgtaatgaaaagcttattcaagaccaatttgtggacataagttttccatcccaagttgtaaatacaaacatgcagtcagtacagctgaatacagaagatactgtaaatactaaatctgtgaataatactgatgctactggtcttatacagggagtgaagtcagtagaaattgagaaggacgctcagttaaaacaattccttacaccaaaaactgaacaattaaaaccagaacgtgtcacatctcaggtatctaatttgaagaaaaaagaaactacagcagattctcaaaccacaacatctaagtcattacagaatcagtctctgaaagaaaatcagaagaagccatttgtgggaagttgggttaaaggcttaataagcaggggtgcttcttttatgccactctgtgtttcagctcataatagaaacactataactgatttacaaccttcagttaaaggggtaaataattttggtggctttaaaactaaaggtataaaccagaaggccagccacgtatccaagaaagctcgtaagagtgcaagtaagcctcctcccatcagtaagccaccagcaggccctccatcgtctaatggcacagctgcccacccacatgctcatgctgcttcagaagttttggaaaagtctggaagcacctcatgtggagctcaactcaaccacagttcttatgggaatggtatttcttcagcaaaccatgaagacttggtggaaggtcagattcataaacttcgtctaaaacttcgtaaaaagctaaaggcagaaaagaagaaattagctgctcttatgtcttccccgcaaagcagaacagttcgaagtgaaaatctagaacaggtgccccaggatgggtctccaaatgattgtgaatcaatagaggacttgttaaatgagctaccatatccaattgatattgccagtgagtctgcatgcaccactgttcctggtgtttccctgtacagtagtcaaactcatgaagaaattttagcggaattattgtctcctacacctgtttcaacagagctgtcagaaaatggggaaggtgactttaggtatttgggaatgggagatagtcatatcccaccaccagtaccaagtgaattcaatgatgtttcccagaacacacatctgagacaggaccataattattgtagccccaccaagaaaaatccatgtgaagttcagccagactctctgacaaataatgcctgcgttagaacattaaacttggagagtccgatgaagactgatattttcgatgagtttttttcctcctcagcattaaatgctttagcaaatgacacattagacctacctcatttcgatgaatatctgtttgagaattattgaattaatgcttgttaacttttttcatataatatttattattattagaagaacttacaatgtgttcaggtagtgtttatacactggacttgtgtaattacttgtgtaataaccatgaacaaaatgcaaggtttaacctttggttctgcccatgaagcatgtaatctttcttacacattaaaatcactgaatgtgtt

SEQ ID NO: 307796 - DNA, 529 bp, Homo sapiens
caatgactcggaatgatggattctccgaagattggaaatggtttgccagtgattggaccagggactgatatagggatatcttcactccacatggtggggtatttgggaaaagttagtgaacttattttttgcctgagtgcaaagttttttttttttctctatttttgagacttaaattcaattttgatgttaccagttaacttctaaaaaattgtgtcttccacggaaatcttacagtaatggcgaaagattgttttaatgtgtttacctttctgtgttttattgatacatgaaagtggaaataaaacatagaccttatgatttactgttctttgaaaatatggtacataaattctcccgggtaattgatgttacttttttccttgcaaataaaattgatactattcttaacacataaaatttaatatttaaaactataacataattctttttggaataatagctgtatttaaaggcttatatgcatttcttttgtttgccatgtttaaaataccttgtcaggatactt

SEQ ID NO: 307797 - DNA, 2728 bp, Homo sapiens
ctcccacaaggcagcgcgccggctcggacgcggccggctaccgagccctttgtgagggctgtgagctgcgcctgacggtggcaccatgagcagctcaggtggggcgcccggggcgtccgccagctctgcgccgcccgcgcaggaagagggcatgacgtggtggtaccgctggctgtgtcgcctgtctggggtgctgggggcagtctcttgcgcgatctctggcctcttcaactgcatcaccatccaccctctgaacatcgcggccggcgtgtggatgatcatgaatgccttcatcttgttgctgtgtgaggcgcccttctgctgccagttcatcgagtttgcaaacacagtggcggagaaggtggaccggctgcgctcctggcagaaggctgtcttctactgcgggatggcggtcgttcccatcgtcatcagcctgaccctgaccacgctgctgggcaacgccatcgcctttgctacgggggtgctgtacggactctctgctctgggcaaaaagggcgatgcgatctcctatgccaggatccagcagcagaggcagcaggcggatgaggagaagctcgcggagaccctggagggggagctgtgaagggctgggcgcccctccctccctgtcccctcttctggctctgtgtgggtccaagtgaggcctggactgtccacgctgaggcacagcctggagaggggcctttgcacgtgtccctacacctggagtcctctgctcctttctccagactggcttaagccaggagccactggctgctggtgtgagggtctgggctgctggacttgaggcagagcctgcagcagctgtgtggacactacccagccctactcctctgctgggtgggtctgcagatctcacaccacagacagggctgcctgtgacctgctgtgacctgggagcagcttcccctggagatgctggtcctggcttgaggggaggggcaagtgggaccctgccacctgggcactgagcagagggacctcccccagctctcttagcaggtggagccccagggcctgggacagcctgccgctgccagcaacctcccactgctgcctagggtgcagcgcccactgtcaccctgccttctgaagaagcccacagggctcctaaggtgcaccccggtacctggaactgcagccttggcagtgactggacagctgggtgggggatgctccctgctggccctgggaaccttggacaggccacctcaaggcccctcggctgcccctcctccctgggcctgctggggcccctaggttctgcccatcaccccccgcccctgctggccttggtgctaaggaagtggggagagcaggctctccctggcaccgagggtgcccaccctctccctggtgtggccccgtcaacatcagccacagcccagccccattagtgggttagcgggtctgacctcagccccactcaggtgctcctgctggcctgcccaagccctgccctcagggagcttctgccttttaagaactgggcagaggccacagtcacctccccacacagagctgtccccactgccctgggtgccaggctgtccggagccaggcctacccagggaggatgcagagagctggtgcccaggatgtgcacccccatattccctctgccctgtggcctcagcccgctggcctctctgaccgtgaggctggctctcagccatcgggcaggtgcctggtcgggcctggcttagcccaggtggggcttggcagaagcgggcgggtgtggaagatattccatctggggccaaccccaggctgggcctgcgctgagcttctggagcgcaggtactgggtcttgctaagtgaactgtttcccaggaacacctctcgggcccatctgcgtctgaggctgggagtggcatctgaggccgggagtggcatctgaggccaggagtggcaggctggtgggctgggcgtggggttttctgggccctgcccagtactgccctggggacttggtgggctcctgggtcagcagcatcccacccctgggagtctggccagctgagccccagggtggcaggggcattatagcctggtggacatgtgccttcagggttcctccggggccaccttcctcaggccagtgctgggttcaaagggctgtgtgtgtgtgtgtgtgtgtgtgtgtatgtatatgtgtgtgggtgcacacatctgtcccatgtatgcagtgagacctgtctacctcccacaaggagcaagggctctgcccgccctctgctcattcctacccaggtagtgggaccccgggcccccttctgcctggcttgcctgcttctgccctttccagaggggtctcactgacagccagagacagcaggagaagggttggctgtggatcaaggaaggctgcccctgtaccctgtggggaaatggtgggtgcatggctggatgcagaggtggaaggccctgggccacaggcgagagtgggcgtgtcacctgtcccaggttcccagcaagtctgcagctgtgcagtcctggggtccctgaccctgtcgcccagggggcgtgctgtccagcaggggccctgccttgcaaggaacgtctcttccggcggctgggccgctcctgcctggtctgggctgtgtgtggcgccctttcctccttgtttgttcctctgtgttctgtgtgcgtcttaagcaataaagcgtggccgtggctcgcgtgcctgccctctgctcccttctgc

SEQ ID NO: 307798 - DNA, 811 bp, Homo sapiens
ctcccacaaggcagcgcgccggctcggacgcggccggctaccgagccctttgtgagggctgtgagctgcgcctgacggtggcaccatgagcagctcaggtggggcgcccggggcgtccgccagctctgcgccgcccgcgcaggaagagggcatgacgtggtggtaccgctggctgtgtcgcctgtctggggtgctgggggcagtctcttgcgcgatctctggcctcttcaactgcatcaccatccaccctctgaacatcgcggccggcgtgtggatgatcatgaatgccttcatcttgttgctgtgtgaggcgcccttctgctgccagttcatcgagtttgcaaacacagtggcggagaaggtggaccggctgcgctcctggcagaaggctgtcttctactgcgggtgaggggttgctgggcagggtcccgtgacacagttccccaaaaccccactgacaaaataggacccaaaagtcaggtgagggtgggcagtgtattcagttcctctctgtggaagtgtaaactgggattgcctttgtgcacagtgatttgctcatagctgccaaaacgtgccccagtggttctgcgcccaggaactcagctgtcgctgtgccgtagtcactggaaggttcagaggtatatgagcatgtgtggcagcatccgtgcagtggagagaaagtgggaagcgtctggaattttggtccgtccactgggagttgttaaccagatgatagtaggtctgtaggacatgtttctctgcagcctttccgaagagtgggttcatctagatgtcctgacgtgaaggggga

SEQ ID NO: 307799 - DNA, 2852 bp, Homo sapiens
ctcccacaaggcagcgcgccggctcggacgcggccggctaccgagccctttgtgagggctgtgagctgcgcctgacggtggcaccatgagcagctcaggtggggcgcccggggcgtccgccagctctgcgccgcccgcgcaggaagagggcatgacgtggtggtaccgctggctgtgtcgcctgtctggggtgctgggggcagtctcttgcgcgatctctggcctcttcaactgcatcaccatccaccctctgaacatcgcggccggcgtgtggatgatgaggaggataaagggaagcagaagcccaggggcttccctctaggagtgttcagttcagctggggagatgggtgtgcaggagcagctggggagtgctggagtcttcagcagaggctctccgagggcatgaatgccttcatcttgttgctgtgtgaggcgcccttctgctgccagttcatcgagtttgcaaacacagtggcggagaaggtggaccggctgcgctcctggcagaaggctgtcttctactgcgggatggcggtcgttcccatcgtcatcagcctgaccctgaccacgctgctgggcaacgccatcgcctttgctacgggggtgctgtacggactctctgctctgggcaaaaagggcgatgcgatctcctatgccaggatccagcagcagaggcagcaggcggatgaggagaagctcgcggagaccctggagggggagctgtgaagggctgggcgcccctccctccctgtcccctcttctggctctgtgtgggtccaagtgaggcctggactgtccacgctgaggcacagcctggagaggggcctttgcacgtgtccctacacctggagtcctctgctcctttctccagactggcttaagccaggagccactggctgctggtgtgagggtctgggctgctggacttgaggcagagcctgcagcagctgtgtggacactacccagccctactcctctgctgggtgggtctgcagatctcacaccacagacagggctgcctgtgacctgctgtgacctgggagcagcttcccctggagatgctggtcctggcttgaggggaggggcaagtgggaccctgccacctgggcactgagcagagggacctcccccagctctcttagcaggtggagccccagggcctgggacagcctgccgctgccagcaacctcccactgctgcctagggtgcagcgcccactgtcaccctgccttctgaagaagcccacagggctcctaaggtgcaccccggtacctggaactgcagccttggcagtgactggacagctgggtgggggatgctccctgctggccctgggaaccttggacaggccacctcaaggcccctcggctgcccctcctccctgggcctgctggggcccctaggttctgcccatcaccccccgcccctgctggccttggtgctaaggaagtggggagagcaggctctccctggcaccgagggtgcccaccctctccctggtgtggccccgtcaacatcagccacagcccagccccattagtgggttagcgggtctgacctcagccccactcaggtgctcctgctggcctgcccaagccctgccctcagggagcttctgccttttaagaactgggcagaggccacagtcacctccccacacagagctgtccccactgccctgggtgccaggctgtccggagccaggcctacccagggaggatgcagagagctggtgcccaggatgtgcacccccatattccctctgccctgtggcctcagcccgctggcctctctgaccgtgaggctggctctcagccatcgggcaggtgcctggtcgggcctggcttagcccaggtggggcttggcagaagcgggcgggtgtggaagatattccatctggggccaaccccaggctgggcctgcgctgagcttctggagcgcaggtactgggtcttgctaagtgaactgtttcccaggaacacctctcgggcccatctgcgtctgaggctgggagtggcatctgaggccgggagtggcatctgaggccaggagtggcaggctggtgggctgggcgtggggttttctgggccctgcccagtactgccctggggacttggtgggctcctgggtcagcagcatcccacccctgggagtctggccagctgagccccagggtggcaggggcattatagcctggtggacatgtgccttcagggttcctccggggccaccttcctcaggccagtgctgggttcaaagggctgtgtgtgtgtgtgtgtgtgtgtgtgtatgtatatgtgtgtgggtgcacacatctgtcccatgtatgcagtgagacctgtctacctcccacaaggagcaagggctctgcccgccctctgctcattcctacccaggtagtgggaccccgggcccccttctgcctggcttgcctgcttctgccctttccagaggggtctcactgacagccagagacagcaggagaagggttggctgtggatcaaggaaggctgcccctgtaccctgtggggaaatggtgggtgcatggctggatgcagaggtggaaggccctgggccacaggcgagagtgggcgtgtcacctgtcccaggttcccagcaagtctgcagctgtgcagtcctggggtccctgaccctgtcgcccagggggcgtgctgtccagcaggggccctgccttgcaaggaacgtctcttccggcggctgggccgctcctgcctggtctgggctgtgtgtggcgccctttcctccttgtttgttcctctgtgttctgtgtgcgtcttaagcaataaagcgtggccgtggctcgcgtgcctgccctctgctcccttctgc

SEQ ID NO: 307800 - DNA, 2602 bp, Homo sapiens
ctcccacaaggcagcgcgccggctcggacgcggccggctaccgagccctttgtgagggctgtgagctgcgcctgacggtggcaccatgagcagctcaggtggggcgcccggggcgtccgccagctctgcgccgcccgcgcaggaagagggcatgacgtggtggtaccgctggctgtgtcgcctgtctggggtgctgggggcagtctcttgcgcgatctctggcctcttcaactgcatcaccatccaccctctgaacatcgcggccggcgtgtggatgatgatggcggtcgttcccatcgtcatcagcctgaccctgaccacgctgctgggcaacgccatcgcctttgctacgggggtgctgtacggactctctgctctgggcaaaaagggcgatgcgatctcctatgccaggatccagcagcagaggcagcaggcggatgaggagaagctcgcggagaccctggagggggagctgtgaagggctgggcgcccctccctccctgtcccctcttctggctctgtgtgggtccaagtgaggcctggactgtccacgctgaggcacagcctggagaggggcctttgcacgtgtccctacacctggagtcctctgctcctttctccagactggcttaagccaggagccactggctgctggtgtgagggtctgggctgctggacttgaggcagagcctgcagcagctgtgtggacactacccagccctactcctctgctgggtgggtctgcagatctcacaccacagacagggctgcctgtgacctgctgtgacctgggagcagcttcccctggagatgctggtcctggcttgaggggaggggcaagtgggaccctgccacctgggcactgagcagagggacctcccccagctctcttagcaggtggagccccagggcctgggacagcctgccgctgccagcaacctcccactgctgcctagggtgcagcgcccactgtcaccctgccttctgaagaagcccacagggctcctaaggtgcaccccggtacctggaactgcagccttggcagtgactggacagctgggtgggggatgctccctgctggccctgggaaccttggacaggccacctcaaggcccctcggctgcccctcctccctgggcctgctggggcccctaggttctgcccatcaccccccgcccctgctggccttggtgctaaggaagtggggagagcaggctctccctggcaccgagggtgcccaccctctccctggtgtggccccgtcaacatcagccacagcccagccccattagtgggttagcgggtctgacctcagccccactcaggtgctcctgctggcctgcccaagccctgccctcagggagcttctgccttttaagaactgggcagaggccacagtcacctccccacacagagctgtccccactgccctgggtgccaggctgtccggagccaggcctacccagggaggatgcagagagctggtgcccaggatgtgcacccccatattccctctgccctgtggcctcagcccgctggcctctctgaccgtgaggctggctctcagccatcgggcaggtgcctggtcgggcctggcttagcccaggtggggcttggcagaagcgggcgggtgtggaagatattccatctggggccaaccccaggctgggcctgcgctgagcttctggagcgcaggtactgggtcttgctaagtgaactgtttcccaggaacacctctcgggcccatctgcgtctgaggctgggagtggcatctgaggccgggagtggcatctgaggccaggagtggcaggctggtgggctgggcgtggggttttctgggccctgcccagtactgccctggggacttggtgggctcctgggtcagcagcatcccacccctgggagtctggccagctgagccccagggtggcaggggcattatagcctggtggacatgtgccttcagggttcctccggggccaccttcctcaggccagtgctgggttcaaagggctgtgtgtgtgtgtgtgtgtgtgtgtgtatgtatatgtgtgtgggtgcacacatctgtcccatgtatgcagtgagacctgtctacctcccacaaggagcaagggctctgcccgccctctgctcattcctacccaggtagtgggaccccgggcccccttctgcctggcttgcctgcttctgccctttccagaggggtctcactgacagccagagacagcaggagaagggttggctgtggatcaaggaaggctgcccctgtaccctgtggggaaatggtgggtgcatggctggatgcagaggtggaaggccctgggccacaggcgagagtgggcgtgtcacctgtcccaggttcccagcaagtctgcagctgtgcagtcctggggtccctgaccctgtcgcccagggggcgtgctgtccagcaggggccctgccttgcaaggaacgtctcttccggcggctgggccgctcctgcctggtctgggctgtgtgtggcgccctttcctccttgtttgttcctctgtgttctgtgtgcgtcttaagcaataaagcgtggccgtggctcgcgtgcctgccctctgctcccttctgc

SEQ ID NO: 307801 - DNA, 2571 bp, Homo sapiens
gctggaggccaaatgctgactgcagcaggaagcacagccgagctgtcagcttgcgcgatctctggcctcttcaactgcatcaccatccaccctctgaacatcgcggccggcgtgtggatgatcatgaatgccttcatcttgttgctgtgtgaggcgcccttctgctgccagttcatcgagtttgcaaacacagtggcggagaaggtggaccggctgcgctcctggcagaaggctgtcttctactgcgggatggcggtcgttcccatcgtcatcagcctgaccctgaccacgctgctgggcaacgccatcgcctttgctacgggggtgctgtacggactctctgctctgggcaaaaagggcgatgcgatctcctatgccaggatccagcagcagaggcagcaggcggatgaggagaagctcgcggagaccctggagggggagctgtgaagggctgggcgcccctccctccctgtcccctcttctggctctgtgtgggtccaagtgaggcctggactgtccacgctgaggcacagcctggagaggggcctttgcacgtgtccctacacctggagtcctctgctcctttctccagactggcttaagccaggagccactggctgctggtgtgagggtctgggctgctggacttgaggcagagcctgcagcagctgtgtggacactacccagccctactcctctgctgggtgggtctgcagatctcacaccacagacagggctgcctgtgacctgctgtgacctgggagcagcttcccctggagatgctggtcctggcttgaggggaggggcaagtgggaccctgccacctgggcactgagcagagggacctcccccagctctcttagcaggtggagccccagggcctgggacagcctgccgctgccagcaacctcccactgctgcctagggtgcagcgcccactgtcaccctgccttctgaagaagcccacagggctcctaaggtgcaccccggtacctggaactgcagccttggcagtgactggacagctgggtgggggatgctccctgctggccctgggaaccttggacaggccacctcaaggcccctcggctgcccctcctccctgggcctgctggggcccctaggttctgcccatcaccccccgcccctgctggccttggtgctaaggaagtggggagagcaggctctccctggcaccgagggtgcccaccctctccctggtgtggccccgtcaacatcagccacagcccagccccattagtgggttagcgggtctgacctcagccccactcaggtgctcctgctggcctgcccaagccctgccctcagggagcttctgccttttaagaactgggcagaggccacagtcacctccccacacagagctgtccccactgccctgggtgccaggctgtccggagccaggcctacccagggaggatgcagagagctggtgcccaggatgtgcacccccatattccctctgccctgtggcctcagcccgctggcctctctgaccgtgaggctggctctcagccatcgggcaggtgcctggtcgggcctggcttagcccaggtggggcttggcagaagcgggcgggtgtggaagatattccatctggggccaaccccaggctgggcctgcgctgagcttctggagcgcaggtactgggtcttgctaagtgaactgtttcccaggaacacctctcgggcccatctgcgtctgaggctgggagtggcatctgaggccgggagtggcatctgaggccaggagtggcaggctggtgggctgggcgtggggttttctgggccctgcccagtactgccctggggacttggtgggctcctgggtcagcagcatcccacccctgggagtctggccagctgagccccagggtggcaggggcattatagcctggtggacatgtgccttcagggttcctccggggccaccttcctcaggccagtgctgggttcaaagggctgtgtgtgtgtgtgtgtgtgtgtgtgtatgtatatgtgtgtgggtgcacacatctgtcccatgtatgcagtgagacctgtctacctcccacaaggagcaagggctctgcccgccctctgctcattcctacccaggtagtgggaccccgggcccccttctgcctggcttgcctgcttctgccctttccagaggggtctcactgacagccagagacagcaggagaagggttggctgtggatcaaggaaggctgcccctgtaccctgtggggaaatggtgggtgcatggctggatgcagaggtggaaggccctgggccacaggcgagagtgggcgtgtcacctgtcccaggttcccagcaagtctgcagctgtgcagtcctggggtccctgaccctgtcgcccagggggcgtgctgtccagcaggggccctgccttgcaaggaacgtctcttccggcggctgggccgctcctgcctggtctgggctgtgtgtggcgccctttcctccttgtttgttcctctgtgttctgtgtgcgtcttaagcaataaagcgtggccgtggctcgcgtgcctgccctctgctcccttctgc

SEQ ID NO: 307802 - DNA, 1282 bp, Homo sapiens
ctcccacaaggcagcgcgccggctcggacgcggccggctaccgagccctttgtgagggctgtgagctgcgcctgacggtggcaccatgagcagctcaggtggggcgcccggggcgtccgccagctctgcgccgcccgcgcaggaagagggcatgacgtggtggtaccgctggctgtgtcgcctgtctggggtgctgggggcagtctcttgcgcgatctctggcctcttcaactgcatcaccatccaccctctgaacatcgcggccggcgtgtggatgatcatgaatgccttcatcttgttgctgtgtgaggcgcccttctgctgccagttcatcgagtttgcaaacacagtggcggagaaggtggaccggctgcgctcctggcagaaggctgtcttctactgcgggatggcggtcgttcccatcgtcatcagcctgaccctgaccacgctgctgggcaacgccatcgcctttgctacgggggtgctgtacggactctctgctctgggcaaaaagggcgatgcgatctcctatgccaggatccagcagcagaggcagcaggcggatgaggagaagctcgcggagaccctggagggggagctgtgaagggctgggcgcccctccctccctgtcccctcttctggctctgtgtgggtccaagtgaggcctggactgtccacgctgaggcacagcctggagaggggcctttgcacgtgtccctacacctggagtcctctgctcctttctccagactggcttaagccaggagccactggctgctggtgtgagggtctgggctgctggacttgaggcagagcctgcagcagctgtgtggacactacccagccctactcctctgctgggtgggtctgcagatctcacaccacagacagggctgcctgtgacctgctgtgacctgggagcagcttcccctggagatgctggtcctggcttgaggggaggggcaagtgggaccctgccacaacctcccactgctgcctagggtgcagcgcccactgtcaccctgccttctgaagaagcccacagggctcctaaggtgcaccccggtacctggaactgcagccttggcagtgactggacagctgggtgggggatgctcccctgccttgcaaggaacgtctcttccggcggctgggccgctcctgcctggtctgggctgtgtgtggcgccctttcctccttgtttgttcctctgtgttctgtgtgcgtcttaagcaataaagcgtggccgtggctcgcgtgcctgccctctgctcccttctgc

SEQ ID NO: 307803 - DNA, 368 bp, Homo sapiens
tgatgaaggactttctgaagctgtgtctcagttgatttttggggatccttcctgtgccctgggtgtctaggaaggatgctgggccgagtctgggaagcggggaaggatgtggtggctgtggggccggagtgcccccttgacctctgctttccccccaggatggcggtcgttcccatcgtcatcagcctgaccctgaccacgctgctgggcaacgccatcgcctttgctacgggggtgctgtacggactctctgctctgggcaaaaagtgcgtctgccaggcccagcccctgggcagggccttcctccctccgccccccgaagtccttcagtgaggaggatctgagagtggccccttttagctagtgga

SEQ ID NO: 307804 - DNA, 2351 bp, Homo sapiens
atccctagccccgccccggcgccccgggccgcggccgcctccgcgtccgcgtcgtcgtctgtgctcccggcgctgacgtgtctgggcggtcggcttccactccttcaggcgtcggcagccactagtcgtggcgagaggggcggggtggccggggctggcgctccacttggcccccgctcccggcccgccccgccgccgcggcccccggatgagggtatatattcggagcgagcgcgggacgccgatgagtggccgcgcggaaggagctggagacggtcgtagctgcggtcgcgccgagaaaggtttacaggtacatacattacacccctatttctacaaagcttggctattagagcattatgaacattaatgacctcaaactcacgttgtccaaagctgggcaagagcacctactacgtttctggaatgagcttgaagaagcccaacaggtagaactttatgcagagctccaggccatgaactttgaggagctgaacttctttttccaaaaggccattgaaggttttaaccagtcttctcaccaaaagaatgtggatgcacgaatggaacctgtgcctcgagaggtattaggcagtgctacaagggatcaagatcagctccaggcctgggaaagtgaaggacttttccagatttctcagaataaagtagcagttcttcttctagctggtgggcaggggacaagactcggcgttgcatatcctaaggggatgtatgatgttggtttgccatcccgtaagacactttttcagattcaagcagagcgtatcctgaagctacagcaggttgctgaaaaatattatggcaacaaatgcattattccatggtatataatgaccagtggcagaacaatggaatctacaaaggagttcttcaccaagcacaagtactttggtttaaaaaaagagaatgtaatcttttttcagcaaggaatgctccccgccatgagttttgatgggaaaattattttggaagagaagaacaaagtttctatggctccagatgggaatggtggtctttatcgggcacttgcagcccagaatattgtggaggatatggagcaaagaggcatttggagcattcatgtctattgtgttgacaacatattagtaaaagtggcagacccacggttcattggattttgcattcagaaaggagcagactgtggagcaaaggtggtagagaaaacgaaccctacagaaccagttggagtggtttgccgagtggatggagtttaccaggtggtagaatatagtgagatttccctggcaacagctcaaaaacgaagctcagacggacgactgctgttcaatgcggggaacattgccaaccatttcttcactgtaccatttctgagagatgttgtcaatgtttatgaacctcagttgcagcaccatgtggctcaaaagaagattccttatgtggatacccaaggacagttaattaagccagacaaacccaatggaataaagatggaaaaatttgtctttgacatcttccagtttgcaaagaagtttgtggtatatgaagtattgcgagaagatgagttttccccactaaagaatgctgatagtcagaatgggaaagacaaccctactactgcaaggcatgctttgatgtcccttcatcattgctgggtcctcaatgcagggggccatttcatagatgaaaatggctctcgccttccagcaattccccgcttgaaggatgccaatgatgtaccaatccaatgtgaaatctctcctcttatctcctatgctggagaaggattagaaagttatgtggcagataaagaattccatgcacctctaatcatcgatgagaatggagttcatgagctggtgaaaaatggtatttgaaccagataccaagttttgtttgccacgataggaatagcttttatttttgatagaccaactgtgaacctacaagacgtcttggacaactgaagtttaaatatccacagggttttattttgcttgttgaactcttagagctattgcaaacttcccaagatccagatgactgaatttcagatagcatttttatgattcccaactcattgaaggtcttatttatataattttttccaagccaaggagaccattggccatccaggaaatttcgtacagctgaaatataggcaggatgttcaacatcagtttacttgcagctggaagcatttgtttttgaagttgtacatagtaataatatgtcattgtacatgttgaaaggtttctatggtactaaaagtttgttttattttatcaaacattaagcttttttaagaaaataattgggcagtgaaataaatgtatcttcttgtctctgga

SEQ ID NO: 307805 - DNA, 2402 bp, Homo sapiens
atccctagccccgccccggcgccccgggccgcggccgcctccgcgtccgcgtcgtcgtctgtgctcccggcgctgacgtgtctgggcggtcggcttccactccttcaggcgtcggcagccactagtcgtggcgagaggggcggggtggccggggctggcgctccacttggcccccgctcccggcccgccccgccgccgcggcccccggatgagggtatatattcggagcgagcgcgggacgccgatgagtggccgcgcggaaggagctggagacggtcgtagctgcggtcgcgccgagaaaggtttacaggtacatacattacacccctatttctacaaagcttggctattagagcattatgaacattaatgacctcaaactcacgttgtccaaagctgggcaagagcacctactacgtttctggaatgagcttgaagaagcccaacaggtagaactttatgcagagctccaggccatgaactttgaggagctgaacttctttttccaaaaggccattgaaggttttaaccagtcttctcaccaaaagaatgtggatgcacgaatggaacctgtgcctcgagaggtattaggcagtgctacaagggatcaagatcagctccaggcctgggaaagtgaaggacttttccagatttctcagaataaagtagcagttcttcttctagctggtgggcaggggacaagactcggcgttgcatatcctaaggggatgtatgatgttggtttgccatcccgtaagacactttttcagattcaagcagagcgtatcctgaagctacagcaggttgctgaaaaatattatggcaacaaatgcattattccatggtatataatgaccagtggcagaacaatggaatctacaaaggagttcttcaccaagcacaagtactttggtttaaaaaaagagaatgtaatcttttttcagcaaggaatgctccccgccatgagttttgatgggaaaattattttggaagagaagaacaaagtttctatggctccagatgggaatggtggtctttatcgggcacttgcagcccagaatattgtggaggatatggagcaaagaggcatttggagcattcatgtctattgtgttgacaacatattagtaaaagtggcagacccacggttcattggattttgcattcagaaaggagcagactgtggagcaaaggtggtagagaaaacgaaccctacagaaccagttggagtggtttgccgagtggatggagtttaccaggtggtagaatatagtgagatttccctggcaacagctcaaaaacgaagctcagacggacgactgctgttcaatgcggggaacattgccaaccatttcttcactgtaccatttctgagagatgttgtcaatgtttatgaacctcagttgcagcaccatgtggctcaaaagaagattccttatgtggatacccaaggacagttaattaagccagacaaacccaatggaataaagatggaaaaatttgtctttgacatcttccagtttgcaaagaagtttgtggtatatgaagtattgcgagaagatgagttttccccactaaagaatgctgatagtcagaatgggaaagacaaccctactactgcaaggcatgctttgatgtcccttcatcattgctgggtcctcaatgcagggggccatttcatagatgaaaatggctctcgccttccagcaattccccgcagtgctacaaatgggaagtcagagaccatcacagctgatgtcaatcacaacttgaaggatgccaatgatgtaccaatccaatgtgaaatctctcctcttatctcctatgctggagaaggattagaaagttatgtggcagataaagaattccatgcacctctaatcatcgatgagaatggagttcatgagctggtgaaaaatggtatttgaaccagataccaagttttgtttgccacgataggaatagcttttatttttgatagaccaactgtgaacctacaagacgtcttggacaactgaagtttaaatatccacagggttttattttgcttgttgaactcttagagctattgcaaacttcccaagatccagatgactgaatttcagatagcatttttatgattcccaactcattgaaggtcttatttatataattttttccaagccaaggagaccattggccatccaggaaatttcgtacagctgaaatataggcaggatgttcaacatcagtttacttgcagctggaagcatttgtttttgaagttgtacatagtaataatatgtcattgtacatgttgaaaggtttctatggtactaaaagtttgttttattttatcaaacattaagcttttttaagaaaataattgggcagtgaaataaatgtatcttcttgtctctgga

SEQ ID NO: 307806 - DNA, 2164 bp, Homo sapiens
atccctagccccgccccggcgccccgggccgcggccgcctccgcgtccgcgtcgtcgtctgtgctcccggcgctgacgtgtctgggcggtcgtagctgcggtcgcgccgagaaaggtttacaggtacatacattacacccctatttctacaaagcttggctattagagcattatgaacattaatgacctcaaactcacgttgtccaaagctgggcaagagcacctactacgtttctggaatgagcttgaagaagcccaacaggtagaactttatgcagagctccaggccatgaactttgaggagctgaacttctttttccaaaaggccattgaaggttttaaccagtcttctcaccaaaagaatgtggatgcacgaatggaacctgtgcctcgagaggtattaggcagtgctacaagggatcaagatcagctccaggcctgggaaagtgaaggacttttccagatttctcagaataaagtagcagttcttcttctagctggtgggcaggggacaagactcggcgttgcatatcctaaggggatgtatgatgttggtttgccatcccgtaagacactttttcagattcaagcagagcgtatcctgaagctacagcaggttgctgaaaaatattatggcaacaaatgcattattccatggtatataatgaccagtggcagaacaatggaatctacaaaggagttcttcaccaagcacaagtactttggtttaaaaaaagagaatgtaatcttttttcagcaaggaatgctccccgccatgagttttgatgggaaaattattttggaagagaagaacaaagtttctatggctccagatgggaatggtggtctttatcgggcacttgcagcccagaatattgtggaggatatggagcaaagaggcatttggagcattcatgtctattgtgttgacaacatattagtaaaagtggcagacccacggttcattggattttgcattcagaaaggagcagactgtggagcaaaggtggtagagaaaacgaaccctacagaaccagttggagtggtttgccgagtggatggagtttaccaggtggtagaatatagtgagatttccctggcaacagctcaaaaacgaagctcagacggacgactgctgttcaatgcggggaacattgccaaccatttcttcactgtaccatttctgagagatgttgtcaatgtttatgaacctcagttgcagcaccatgtggctcaaaagaagattccttatgtggatacccaaggacagttaattaagccagacaaacccaatggaataaagatggaaaaatttgtctttgacatcttccagtttgcaaagaagtttgtggtatatgaagtattgcgagaagatgagttttccccactaaagaatgctgatagtcagaatgggaaagacaaccctactactgcaaggcatgctttgatgtcccttcatcattgctgggtcctcaatgcagggggccatttcatagatgaaaatggctctcgccttccagcaattccccgcttgaaggatgccaatgatgtaccaatccaatgtgaaatctctcctcttatctcctatgctggagaaggattagaaagttatgtggcagataaagaattccatgcacctctaatcatcgatgagaatggagttcatgagctggtgaaaaatggtatttgaaccagataccaagttttgtttgccacgataggaatagcttttatttttgatagaccaactgtgaacctacaagacgtcttggacaactgaagtttaaatatccacagggttttattttgcttgttgaactcttagagctattgcaaacttcccaagatccagatgactgaatttcagatagcatttttatgattcccaactcattgaaggtcttatttatataattttttccaagccaaggagaccattggccatccaggaaatttcgtacagctgaaatataggcaggatgttcaacatcagtttacttgcagctggaagcatttgtttttgaagttgtacatagtaataatatgtcattgtacatgttgaaaggtttctatggtactaaaagtttgttttattttatcaaacattaagcttttttaagaaaataattgggcagtgaaataaatgtatcttcttgtctctgga

SEQ ID NO: 307807 - DNA, 2272 bp, Homo sapiens
atccctagccccgccccggcgccccgggccgcggccgcctccgcgtccgcgtcgtcgtctgtgctcccggcgctgacgtgtctgggcggtcggcttccactccttcaggcgtcggcagccactagtcgtggcgagaggggcggggtggccggggctggcgctccacttggcccccgctcccggcccgccccgccgccgcggcccccggatgagggtatatattcggagcgagcgcgggacgccgatgagtggccgcgcggaaggagctggagacggtcgtagctgcggtcgcgccgagaaaggtttacaggtacatacattacacccctatttctacaaagcttggctattagagcattatgaacattaatgacctcaaactcacgttgtccaaagctgggcaagagcacctactacgtttctggaatgagcttgaagaagcccaacaggtagaactttatgcagagctccaggccatgaactttgaggagctgaacttctttttccaaaaggccattgaaggttttaaccagtcttctcaccaaaagaatgtggatgcacgaatggaacctgtgcctcgagaggtattaggcagtgctacaagggatcaagatcagctccaggcctgggaaagtgaaggacttttccagatttctcagaataaagtagcagttcttcttctagctggtgggcaggggacaagactcggcgttgcatatcctaaggggatgtatgatgttggtttgccatcccgtaagacactttttcagattcaagcagagcgtatcctgaagctacagcaggttgctgaaaaatattatggcaacaaatgcattattccatggtatataatgaccagtggcagaacaatggaatctacaaaggagttcttcaccaagcacaagtactttggtttaaaaaaagagaatgtaatcttttttcagcaaggaatgctccccgccatgagttttgatgggaaaattattttggaagagaagaacaaagtttctatggctccagatgggaatggtggtctttatcgggcacttgcagcccagaatattgtggaggatatggagcaaagaggcatttggagcattcatgtctattgtgttgacaacatattagtaaaagtggcagacccacggttcattggattttgcattcagaaaggagcagactgtggagcaaaggtggtagagaaaacgaaccctacagaaccagttggagtggtttgccgagtggatggagtttaccaggtggtagaatatagtgagatttccctggcaacagctcaaaaacgaagctcagacggacgactgctgttcaatgcggggaacattgccaaccatttcttcactgtaccatttctgagagatgttgtcaatgtttatgaacctcagttgcagcaccatgtggctcaaaagaagattccttatgtggatacccaaggacagttaattaagccagacaaacccaatggaataaagatggaaaaatttgtctttgacatcttccagtttgcaaagaagtttgtggtatatgaagtattgcgagaagatgagttttccccactaaagaatgctgatagtcagaatgggaaagacaaccctactactgcaaggcatgctttgatgtcccttcatcattgctgggtcctcaatgcagggggccatttcatagatgaaaatggctctcgccttccagcaattccccgcttgaaggatgccaatgatgtaccaatccaatgtgaaatctctcctcttatctcctatgctggagaaggattagaaagttatgtggcagataaagaattccatgcacctctaatcatcgatgagaatggagttcatgagctggtgaaaaatggtatttgaaccagataccaagttttgtttgccacgataggaatagcttttatttttgatagaccaactgtgaacctacaagacgtcttggacaactgaagtttaaatatccacagggttttattttgcttgttgaactcttagagctattgcaaacttcccaagatccagatgactgaatttcagatagcatttttatgattcccaactcattgaaggtcttatttatataattttttccaagccaaggagaccattggccatccaggaaatttcgtacagctgaaatataggcaggatgttcaacatcagtttacttgcagctggaagcatttgtttttgaagttgtacatagtaataatatgtcattgtacatgcttacgttcaagtgtcggtcctctagg

SEQ ID NO: 307808 - DNA, 2037 bp, Homo sapiens
tgatccccctggacgtgggagttgtccaaagctgggcaagagcacctactacgtttctggaatgagcttgaagaagcccaacaggtagaactttatgcagagctccaggccatgaactttgaggagctgaacttctttttccaaaaggccattgaaggttttaaccagtcttctcaccaaaagaatgtggatgcacgaatggaacctgtgcctcgagaggtattaggcagtgctacaagggatcaagatcagctccaggcctgggaaagtgaaggacttttccagatttctcagaataaagtagcagttcttcttctagctggtgggcaggggacaagactcggcgttgcatatcctaaggggatgtatgatgttggtttgccatcccgtaagacactttttcagattcaagcagagcgtatcctgaagctacagcaggttgctgaaaaatattatggcaacaaatgcattattccatggtatataatgaccagtggcagaacaatggaatctacaaaggagttcttcaccaagcacaagtactttggtttaaaaaaagagaatgtaatcttttttcagcaaggaatgctccccgccatgagttttgatgggaaaattattttggaagagaagaacaaagtttctatggctccagatgggaatggtggtctttatcgggcacttgcagcccagaatattgtggaggatatggagcaaagaggcatttggagcattcatgtctattgtgttgacaacatattagtaaaagtggcagacccacggttcattggattttgcattcagaaaggagcagactgtggagcaaaggtggtagagaaaacgaaccctacagaaccagttggagtggtttgccgagtggatggagtttaccaggtggtagaatatagtgagatttccctggcaacagctcaaaaacgaagctcagacggacgactgctgttcaatgcggggaacattgccaaccatttcttcactgtaccatttctgagagatgttgtcaatgtttatgaacctcagttgcagcaccatgtggctcaaaagaagattccttatgtggatacccaaggacagttaattaagccagacaaacccaatggaataaagatggaaaaatttgtctttgacatcttccagtttgcaaagaagtttgtggtatatgaagtattgcgagaagatgagttttccccactaaagaatgctgatagtcagaatgggaaagacaaccctactactgcaaggcatgctttgatgtcccttcatcattgctgggtcctcaatgcagggggccatttcatagatgaaaatggctctcgccttccagcaattccccgcagtgctacaaatgggaagtcagagaccatcacagctgatgtcaatcacaacttgaaggatgccaatgatgtaccaatccaatgtgaaatctctcctcttatctcctatgctggagaaggattagaaagttatgtggcagataaagaattccatgcacctctaatcatcgatgagaatggagttcatgagctggtgaaaaatggtatttgaaccagataccaagttttgtttgccacgataggaatagcttttatttttgatagaccaactgtgaacctacaagacgtcttggacaactgaagtttaaatatccacagggttttattttgcttgttgaactcttagagctattgcaaacttcccaagatccagatgactgaatttcagatagcatttttatgattcccaactcattgaaggtcttatttatataattttttccaagccaaggagaccattggccatccaggaaatttcgtacagctgaaatataggcaggatgttcaacatcagtttacttgcagctggaagcatttgtttttgaagttgtacatagtaataatatgtcattgtacatgttgaaaggtttctatggtactaaaagtttgttttattttatcaaacattaagcttttttaagaaaataattgggcagtgaaataaatgtatcttcttgtctctgga

SEQ ID NO: 307809 - DNA, 2019 bp, Homo sapiens
atccctagccccgccccggcgccccgggccgcggccgcctccgcgtccgcgtcgtcgtctgtgctcccggcgctgacgtgtctgggcggtcggcttccactccttcaggcgtcggcagccactagtcgtggcgagaggggcggggtggccggggctggcgctccacttggcccccgctcccggcccgccccgccgccgcggcccccggatgagggtatatattcggagcgagcgcgggacgccgatgagtggccgcgcggaaggagctggagacggtcgtagctgcggtcgcgccgagaaaggtttacaggtacatacattacacccctatttctacaaagcttggctattagagcattatgaacattaatgacctcaaactcacgttgtccaaagctgggcaagagcacctactacgtttctggaatgagcttgaagaagcccaacaggtagaactttatgcagagctccaggccatgaactttgaggagctgaacttctttttccaaaaggccattgaaggttttaaccagtcttctcaccaaaagaatgtggatgcacgaatggaacctgtgcctcgagaggtattaggcagtgctacaagggatcaagatcagctccaggcctgggaaagtgaaggacttttccagatttctcagaataaagtagcagttcttcttctagctggtgggcaggggacaagactcggcgttgcatatcctaaggggatgtatgatgttggtttgccatcccgtaagacactttttcagattcaagcagagcgtatcctgaagctacagcaggttgctgaaaaatattatggcaacaaatgcattattccatggtatataatgaccagtggcagaacaatggaatctacaaaggagttcttcaccaagcacaagtactttggtttaaaaaaagagaatgtaatcttttttcagcaaggaatgctccccgccatgagttttgatgggaaaattattttggaagagaagaacaaagtttctatggctccagatgggaatggtggtctttatcgggcacttgcagcccagaatattgtggaggatatggagcaaagaggcatttggagcattcatgtctattgtgttgacaacatattagtaaaagtggcagacccacggttcattggattttgcattcagaaaggagcagactgtggagcaaaggtggtagagaaaacgaaccctacagaaccagttggagtggtttgccgagtggatggagtttaccaggtggtagaatatagtgagatttccctggcaacagctcaaaaacgaagctcagacggacgactgctgttcaatgcggggaacattgccaaccatttcttcactgtaccatttctgagagatgttgtcaatgtttatgaacctcagttgcagcaccatgtggctcaaaagaagattccttatgtggatacccaaggacagttaattaagccagacaaacccaatggaataaagatggaaaaatttgtctttgacatcttccagtttgcaaagaagtttgtggtatatgaagtattgcgagaagatgagttttccccactaaagaatgctgatagtcagaatgggaaagacaaccctactactgcaaggcatgctttgatgtcccttcatcattgctgggtcctcaatgcagggggccatttcatagatgaaaatggctctcgccttccagcaattccccgcttgaaggatgccaatgatgtaccaatccaatgtgaaatctctcctcttatctcctatgctggagaaggattagaaagttatgtggcagataaagaattccatgcacctctaatcatcgatgagaatggagttcatgagctggtgaaaaatggtatttgaaccagataccaagttttgtttgccacgataggaatagcttttatttttgatagaccaactgtgaacctatcctatcagggtttctttttaactccttgatctctttattgtttgttctgtatgtgttgtacggagtacgcga

SEQ ID NO: 307810 - DNA, 1633 bp, Homo sapiens
  misc_feature (18)..(18): n is a, c, g, or t
  misc_feature (22)..(23): n is a, c, g, or t
  misc_feature (54)..(54): n is a, c, g, or t
  misc_feature (61)..(62): n is a, c, g, or t
ttttaagtaatatttttnattnngatatgattgtgatttatatttatgtaggtntaatgannatgtgctttaggggtatataatgaccagtggcagaacaatggaatctacaaaggagttcttcaccaagcacaagtactttggtttaaaaaaagagaatgtaatcttttttcagcaaggaatgctccccgccatgagttttgatgggaaaattattttggaagagaagaacaaagtttctatggctccagatgggaatggtggtctttatcgggcacttgcagcccagaatattgtggaggatatggagcaaagaggcatttggagcattcatgtctattgtgttgacaacatattagtaaaagtggcagacccacggttcattggattttgcattcagaaaggagcagactgtggagcaaaggtggtagagaaaacgaaccctacagaaccagttggagtggtttgccgagtggatggagtttaccaggtggtagaatatagtgagatttccctggcaacagctcaaaaacgaagctcagacggacgactgctgttcaatgcggggaacattgccaaccatttcttcactgtaccatttctgagagatgttgtcaatgtttatgaacctcagttgcagcaccatgtggctcaaaagaagattccttatgtggatacccaaggacagttaattaagccagacaaacccaatggaataaagatggaaaaatttgtctttgacatcttccagtttgcaaagaagtttgtggtatatgaagtattgcgagaagatgagttttccccactaaagaatgctgatagtcagaatgggaaagacaaccctactactgcaaggcatgctttgatgtcccttcatcattgctgggtcctcaatgcagggggccatttcatagatgaaaatggctctcgccttccagcaattccccgcagtgctacaaatgggaagtcagagaccatcacagctgatgtcaatcacaacttgaaggatgccaatgatgtaccaatccaatgtgaaatctctcctcttatctcctatgctggagaaggattagaaagttatgtggcagataaagaattccatgcacctctaatcatcgatgagaatggagttcatgagctggtgaaaaatggtatttgaaccagataccaagttttgtttgccacgataggaatagcttttatttttgatagaccaactgtgaacctacaagacgtcttggacaactgaagtttaaatatccacagggttttattttgcttgttgaactcttagagctattgcaaacttcccaagatccagatgactgaatttcagatagcatttttatgattcccaactcattgaaggtcttatttatataattttttccaagccaaggagaccattggccatccaggaaatttcgtacagctgaaatataggcaggatgttcaacatcagtttacttgcagctggaagcatttgtttttgaagttgtacatagtaataatatgtcattgtacatgttgaaaggtttctatggtactaaaagtttgttttattttatcaaacattaagcttttttaagaaaataattgggcagtgaaataaatgtatcttcttgtctctgga

SEQ ID NO: 307811 - DNA, 2189 bp, Homo sapiens
atccctagccccgccccggcgccccgggccgcggccgcctccgcgtccgcgtcgtcgtctgtgctcccggcgctgacgtgtctgggcggtcggcttccactccttcaggcgtcggcagccactagtcgtggcgagaggggcggggtggccggggctggcgctccacttggcccccgctcccggcccgccccgccgccgcggcccccggatgagggtatatattcggagcgagcgcgggacgccgatgagtggccgcgcggaaggagctggagacggtcgtagctgcggtcgcgccgagaaaggtttacaggtacatacattacacccctatttctacaaagcttggctattagagcattatgaacattaatgacctcaaactcacgttgtccaaagctgggcaagagcacctactacgtttctggaatgagcttgaagaagcccaacaggtagaactttatgcagagctccaggccatgaactttgaggagctgaacttctttttccaaaaggccattgaaggttttaaccagtcttctcaccaaaagaatgtggatgcacgaatggaacctgtgcctcgagaggtattaggcagtgctacaagggatcaagatcagctccaggcctgggaaagtgaaggacttttccagatttctcagaataaagtagcagttcttcttctagctggtgggcaggggacaagactcggcgttgcatatcctaaggggatgtatgatgttggtttgccatcccgtaagacactttttcagattcaagcagagcgtatcctgaagctacagcaggttgctgaaaaatattatggcaacaaatgcattattccatggtatataatgaccagtggcagaacaatggaatctacaaaggagttcttcaccaagcacaagtactttggtttaaaaaaagagaatgtaatcttttttcagcaaggaatgctccccgccatgagttttgatgggaaaattattttggaagagaagaacaaagtttctatggctccagatgggaatggtggtctttatcgggcacttgcagcccagaatattgtggaggatatggagcaaagaggcatttggagcattcatgtctattgtgttgacaacatattagtaaaagtggcagacccacggttcattggattttgcattcagaaaggagcagactgtggagcaaaggtggtagagaaaacgaaccctacagaaccagttggagtggtttgccgagtggatggagtttaccaggtggtagaatatagtgagatttccctggcaacagctcaaaaacgaagctcagacggacgactgctgttcaatgcggggaacattgccaaccatttcttcactgtaccatttctgagagatgttgtcaatgtttatgaacctcagttgcagcaccatgtggctcaaaagaagattccttatgtggatacccaaggacagttaattaagccagacaaacccaatggaataaagatggaaaaatttgtctttgacatcttccagtttgcaaagaagtttgtggtatatgaagtattgcgagaagatgagttttccccactaaagaatgctgatagtcagaatgggaaagacaaccctactactgcaaggcatgctttgatgtcccttcatcattgctgggtcctcaatgcagggggccatttcatagatgaaaatggctctcgccttccagcaattccccgcagtgctacaaatgggaagtcagagaccatcacagctgatgtcaatcacaacttgaaggatgccaatgatgtaccaatccaatgtgaaatctctcctcttatctcctatgctggagaagtaagtctgctttactttttcctctattcttttacaaagctttgtatatttcaaaataatgaaaaagtggattttaaatgttctcaccataaagaaaggataagtatttgaggtgatagatatgttaattggctttatttgattattcgacagtgtatatatgcattgaatcatcacattgtatctgaaaaatatatacaattattgtcaattaaaaatgaaataaggttgggcacagtggctcactcctgtaatcccagtactttgggaggctgaggcaagaggattgcttgagctcaggagtttgagaccagcctgggcaatatagtgagacctgtctttataaagaaaaaa

SEQ ID NO: 307812 - DNA, 1618 bp, Homo sapiens
  misc_feature (67)..(67): n is a, c, g, or t
  misc_feature (81)..(81): n is a, c, g, or t
gcgtcggtaacgtaatatcgatactccccgtatcgtataataaaaaaagaccactttgaggtaactngaccagtgtgttgnaacaatggaatctacaaaggagttcttcaccaagcacaagtactttggtttaaaaaaagagaatgtaatcttttttcagcaaggaatgctccccgccatgagttttgatgggaaaattattttggaagagaagaacaaagtttctatggctccagatgggaatggtggtctttatcgggcacttgcagcccagaatattgtggaggatatggagcaaagaggcatttggagcattcatgtctattgtgttgacaacatattagtaaaagtggcagacccacggttcattggattttgcattcagaaaggagcagactgtggagcaaaggtggtagagaaaacgaaccctacagaaccagttggagtggtttgccgagtggatggagtttaccaggtggtagaatatagtgagatttccctggcaacagctcaaaaacgaagctcagacggacgactgctgttcaatgcggggaacattgccaaccatttcttcactgtaccatttctgagagatgttgtcaatgtttatgaacctcagttgcagcaccatgtggctcaaaagaagattccttatgtggatacccaaggacagttaattaagccagacaaacccaatggaataaagatggaaaaatttgtctttgacatcttccagtttgcaaagaagtttgtggtatatgaagtattgcgagaagatgagttttccccactaaagaatgctgatagtcagaatgggaaagacaaccctactactgcaaggcatgctttgatgtcccttcatcattgctgggtcctcaatgcagggggccatttcatagatgaaaatggctctcgccttccagcaattccccgcagtgctacaaatgggaagtcagagaccatcacagctgatgtcaatcacaacttgaaggatgccaatgatgtaccaatccaatgtgaaatctctcctcttatctcctatgctggagaaggattagaaagttatgtggcagataaagaattccatgcacctctaatcatcgatgagaatggagttcatgagctggtgaaaaatggtatttgaaccagataccaagttttgtttgccacgataggaatagcttttatttttgatagaccaactgtgaacctacaagacgtcttggacaactgaagtttaaatatccacagggttttattttgcttgttgaactcttagagctattgcaaacttcccaagatccagatgactgaatttcagatagcatttttatgattcccaactcattgaaggtcttatttatataattttttccaagccaaggagaccattggccatccaggaaatttcgtacagctgaaatataggcaggatgttcaacatcagtttacttgcagctggaagcatttgtttttgaagttgtacatagtaataatatgtcattgtacatgttgaaaggtttctatggtactaaaagtttgttttattttatcaaacattaagcttttttaagaaaataattgggcagtgaaataaatgtatcttcttgtctctgga

SEQ ID NO: 307813 - DNA, 2078 bp, Homo sapiens
atccctagccccgccccggcgccccgggccgcggccgcctccgcgtccgcgtcgtcgtctgtgctcccggcgctgacgtgtctgggcggtcggcttccactccttcaggcgtcggcagccactagtcgtggcgagaggggcggggtggccggggctggcgctccacttggcccccgctcccggcccgccccgccgccgcggcccccggatgagggtatatattcggagcgagcgcgggacgccgatgagtggccgcgcggaaggagctggagacggtcgtagctgcggtcgcgccgagaaaggtttacaggtacatacattacacccctatttctacaaagcttggctattagagcattatgaacattaatgacctcaaactcacgttgtccaaagctgggcaagagcacctactacgtttctggaatgagcttgaagaagcccaacaggtagaactttatgcagagctccaggccatgaactttgaggagctgaacttctttttccaaaaggccattgaaggttttaaccagtcttctcaccaaaagaatgtggatgcacgaatggaacctgtgcctcgagaggtattaggcagtgctacaagggatcaagatcagctccaggcctgggaaagtgaaggacttttccagatttctcagaataaagtagcagttcttcttctagctggtgggcaggggacaagactcggcgttgcatatcctaaggggatgtatgatgttggtttgccatcccgtaagacactttttcagattcaagcagagcgtatcctgaagctacagcaggttgctgaaaaatattatggcaacaaatgcattattccatggtatataatgaccagtggcagaacaatggaatctacaaaggagttcttcaccaagcacaagtactttggtttaaaaaaagagaatgtaatcttttttcagcaaggaatgctccccgccatgagttttgatgggaaaattattttggaagagaagaacaaagtttctatggctccagatgggaatggtggtctttatcgggcacttgcagcccagaatattgtggaggatatggagcaaagaggcatttggagcattcatgtctattgtgttgacaacatattagtaaaagtggcagacccacggttcattggattttgcattcagaaaggagcagactgtggagcaaaggtggtagagaaaacgaaccctacagaaccagttggagtggtttgccgagtggatggagtttaccaggtggtagaatatagtgagatttccctggcaacagctcaaaaacgaagctcagacggacgactgctgttcaatgcggggaacattgccaaccatttcttcactgtaccatttctgagagatgttgtcaatgtttatgaacctcagttgcagcaccatgtggctcaaaagaagattccttatgtggatacccaaggacagttaattaagccagacaaacccaatggaataaagatggaaaaatttgtctttgacatcttccagtttgcaaagaagtttgtggtatatgaagtattgcgagaagatgagttttccccactaaagaatgctgatagtcagaatgggaaagacaaccctactactgcaaggcatgctttgatgtcccttcatcattgctgggtcctcaatgcagggggccatttcatagatgaaaatggctctcgccttccagcaattccccgcagtgctacaaatgggaagtcagagaccatcacagctgatgtcaatcacaagtaaatataccagcctgcctacagtgcatggtgatggggctgtgcttccctccatactaactggcatcgtagtttagtgctctgccttttgggggtctggagggaggatggttgaaactttggtgtgggtgcactgcttacttggtggcaggtatctctctggatgacactaactcagaatcttgttgcatgctggaaatggagagcatgctttactaaagaatctgaccacaggtgttagagctggaactgacagattttcagatgataggtaagatccagagcaggttacaggtcagggagaacacat

SEQ ID NO: 307814 - DNA, 1264 bp, Homo sapiens
ggttgctctagaggtccctgatggcatttagacaggagcagactgtggagcaaaggtggtagagaaaacgaaccctacagaaccagttggagtggtttgccgagtggatggagtttaccaggtggtagaatatagtgagatttccctggcaacagctcaaaaacgaagctcagacggacgactgctgttcaatgcggggaacattgccaaccatttcttcactgtaccatttctgagagatgttgtcaatgtttatgaacctcagttgcagcaccatgtggctcaaaagaagattccttatgtggatacccaaggacagttaattaagccagacaaacccaatggaataaagatggaaaaatttgtctttgacatcttccagtttgcaaagaagtttgtggtatatgaagtattgcgagaagatgagttttccccactaaagaatgctgatagtcagaatgggaaagacaaccctactactgcaaggcatgctttgatgtcccttcatcattgctgggtcctcaatgcagggggccatttcatagatgaaaatggctctcgccttccagcaattccccgcagtgctacaaatgggaagtcagagaccatcacagctgatgtcaatcacaacttgaaggatgccaatgatgtaccaatccaatgtgaaatctctcctcttatctcctatgctggagaaggattagaaagttatgtggcagataaagaattccatgcacctctaatcatcgatgagaatggagttcatgagctggtgaaaaatggtatttgaaccagataccaagttttgtttgccacgataggaatagcttttatttttgatagaccaactgtgaacctacaagacgtcttggacaactgaagtttaaatatccacagggttttattttgcttgttgaactcttagagctattgcaaacttcccaagatccagatgactgaatttcagatagcatttttatgattcccaactcattgaaggtcttatttatataattttttccaagccaaggagaccattggccatccaggaaatttcgtacagctgaaatataggcaggatgttcaacatcagtttacttgcagctggaagcatttgtttttgaagttgtacatagtaataatatgtcattgtacatgttgaaaggtttctatggtactaaaagtttgttttattttatcaaacattaagcttttttaagaaaataattgggcagtgaaataaatgtatcttcttgtctctgga

SEQ ID NO: 307815 - DNA, 1417 bp, Homo sapiens
tttaaaaagttaatatgcattactttagaatatcaactccagttccaaaatatttcccattctatgcccatttgtagctgtgttactgtttcatcccatagtaacttaatgcgttttttaatgtaccatatatacagttttaaggcatttgtaatgaatacagttttaatgcacacgtaccacagttttagtggagactgttatttgatttttttttaaatataaagagatgattgggggaaagctattcatttactatttaaatatgaactgaaacttaaatgctcttcactttgaaaatcttagtattggttgttgacacatttgctcctgaatgttgtaagattttctggcattttaaatctggaacgtgattatatcttttctcctcctgcttcttagtgtttatgaacctcagttgcagcaccatgtggctcaaaagaagattccttatgtggatacccaaggacagttaattaagccagacaaacccaatggaataaagatggaaaaatttgtctttgacatcttccagtttgcaaagaagtttgtggtatatgaagtattgcgagaagatgagttttccccactaaagaatgctgatagtcagaatgggaaagacaaccctactactgcaaggcatgctttgatgtcccttcatcattgctgggtcctcaatgcagggggccatttcatagatgaaaatggctctcgccttccagcaattccccgcagtgctacaaatgggaagtcagagaccatcacagctgatgtcaatcacaacttgaaggatgccaatgatgtaccaatccaatgtgaaatctctcctcttatctcctatgctggagaaggattagaaagttatgtggcagataaagaattccatgcacctctaatcatcgatgagaatggagttcatgagctggtgaaaaatggtatttgaaccagataccaagttttgtttgccacgataggaatagcttttatttttgatagaccaactgtgaacctacaagacgtcttggacaactgaagtttaaatatccacagggttttattttgcttgttgaactcttagagctattgcaaacttcccaagatccagatgactgaatttcagatagcatttttatgattcccaactcattgaaggtcttatttatataattttttccaagccaaggagaccattggccatccaggaaatttcgtacagctgaaatataggcaggatgttcaacatcagtttacttgcagctggaagcatttgtttttgaagttgtacatagtaataatatgtcattgtacatgttgaaaggtttctatggtactaaaagtttgttttattttatcaaacattaagcttttttaagaaaataattgggcagtgaaataaatgtatcttcttgtctctgga

SEQ ID NO: 307816 - DNA, 1824 bp, Homo sapiens
atccctagccccgccccggcgccccgggccgcggccgcctccgcgtccgcgtcgtcgtctgtgctcccggcgctgacgtgtctgggcggtcggcttccactccttcaggcgtcggcagccactagtcgtggcgagaggggcggggtggccggggctggcgctccacttggcccccgctcccggcccgccccgccgccgcggcccccggatgagggtatatattcggagcgagcgcgggacgccgatgagtggccgcgcggaaggagctggagacggtcgtagctgcggtcgcgccgagaaaggtttacaggtacatacattacacccctatttctacaaagcttggctattagagcattatgaacattaatgacctcaaactcacgttgtccaaagctgggcaagagcacctactacgtttctggaatgagcttgaagaagcccaacaggtagaactttatgcagagctccaggccatgaactttgaggagctgaacttctttttccaaaaggccattgaaggttttaaccagtcttctcaccaaaagaatgtggatgcacgaatggaacctgtgcctcgagaggtattaggcagtgctacaagggatcaagatcagctccaggcctgggaaagtgaaggacttttccagatttctcagaataaagtagcagttcttcttctagctggtgggcaggggacaagactcggcgttgcatatcctaaggggatgtatgatgttggtttgccatcccgtaagacactttttcagattcaagcagagcgtatcctgaagctacagcaggttgctgaaaaatattatggcaacaaatgcattattccatggtatataatgaccagtggcagaacaatggaatctacaaaggagttcttcaccaagcacaagtactttggtttaaaaaaagagaatgtaatcttttttcagcaaggaatgctccccgccatgagttttgatgggaaaattattttggaagagaagaacaaagtttctatggctccagatgggaatggtggtctttatcgggcacttgcagcccagaatattgtggaggatatggagcaaagaggcatttggagcattcatgtctattgtgttgacaacatattagtaaaagtggcagacccacggttcattggattttgcattcagaaaggagcagactgtggagcaaaggtggtagagaaaacgaaccctacagaaccagttggagtggtttgccgagtggatggagtttaccaggtggtagaatatagtgagatttccctggcaacagctcaaaaacgaagctcagacggacgactgctgttcaatgcggggaacattgccaaccatttcttcactgtaccatttctgagagatgttgtcaagtatgggcaagatgggggccttttaaaattatatttattgttaatcagaaactaagacacttgagagggatgcagacaccccaagtccatatcccacagaattcatctttcctgaggatcacttatcaaatggacatttatctcatgttgtgattgtttttagtaagatgtattgtaaggtgggaatcatcggagcccattccccagcgcattaatgggaggccaaagcatttctcccttctcaccctcccacccccaactatgtgctaggttctgttgaagcaaagcataagaaatgaaactttctttaccacagctgtgagctttttaaaaatacagatgttcaccttacaccaactgaattagaatttcaggaggtgggttcggggcatctatatttttagaaagctgcccacaaagttctaattcagctgatt

SEQ ID NO: 307817 - DNA, 1211 bp, Homo sapiens
ggttgctctagaggtccctgatggcatttagacaggagcagactgtggagcaaaggtggtagagaaaacgaaccctacagaaccagttggagtggtttgccgagtggatggagtttaccaggtggtagaatatagtgagatttccctggcaacagctcaaaaacgaagctcagacggacgactgctgttcaatgcggggaacattgccaaccatttcttcactgtaccatttctgagagatgttgtcaatgtttatgaacctcagttgcagcaccatgtggctcaaaagaagattccttatgtggatacccaaggacagttaattaagccagacaaacccaatggaataaagatggatattgcgagaagatgagttttccccactaaagaatgctgatagtcagaatgggaaagacaaccctactactgcaaggcatgctttgatgtcccttcatcattgctgggtcctcaatgcagggggccatttcatagatgaaaatggctctcgccttccagcaattccccgcagtgctacaaatgggaagtcagagaccatcacagctgatgtcaatcacaacttgaaggatgccaatgatgtaccaatccaatgtgaaatctctcctcttatctcctatgctggagaaggattagaaagttatgtggcagataaagaattccatgcacctctaatcatcgatgagaatggagttcatgagctggtgaaaaatggtatttgaaccagataccaagttttgtttgccacgataggaatagcttttatttttgatagaccaactgtgaacctacaagacgtcttggacaactgaagtttaaatatccacagggttttattttgcttgttgaactcttagagctattgcaaacttcccaagatccagatgactgaatttcagatagcatttttatgattcccaactcattgaaggtcttatttatataattttttccaagccaaggagaccattggccatccaggaaatttcgtacagctgaaatataggcaggatgttcaacatcagtttacttgcagctggaagcatttgtttttgaagttgtacatagtaataatatgtcattgtacatgttgaaaggtttctatggtactaaaagtttgttttattttatcaaacattaagcttttttaagaaaataattgggcagtgaaataaatgtatcttcttgtctctgga

SEQ ID NO: 307818 - DNA, 976 bp, Homo sapiens
cttatgtggatacccaaggaatcttcttttgagccacatggtgctgcaactgaagattccttatgtggatacccaaggacagttaattaagccagacaaacccaatggaataaagatggaaaaatttgtctttgacatcttccagtttgcaaagaagtttgtggtatatgaagtattgcgagaagatgagttttccccactaaagaatgctgatagtcagaatgggaaagacaaccctactactgcaaggcatgctttgatgtcccttcatcattgctgggtcctcaatgcagggggccatttcatagatgaaaatggctctcgccttccagcaattccccgcttgaaggatgccaatgatgtaccaatccaatgtgaaatctctcctcttatctcctatgctggagaaggattagaaagttatgtggcagataaagaattccatgcacctctaatcatcgatgagaatggagttcatgagctggtgaaaaatggtatttgaaccagataccaagttttgtttgccacgataggaatagcttttatttttgatagaccaactgtgaacctacaagacgtcttggacaactgaagtttaaatatccacagggttttattttgcttgttgaactcttagagctattgcaaacttcccaagatccagatgactgaatttcagatagcatttttatgattcccaactcattgaaggtcttatttatataattttttccaagccaaggagaccattggccatccaggaaatttcgtacagctgaaatataggcaggatgttcaacatcagtttacttgcagctggaagcatttgtttttgaagttgtacatagtaataatatgtcattgtacatgttgaaaggtttctatggtactaaaagtttgttttattttatcaaacattaagcttttttaagaaaataattgggcagtgaaataaatgtatcttcttgtctctgga

SEQ ID NO: 307819 - DNA, 1185 bp, Homo sapiens
gtgattattatgactgagaaactgaattttaaattttaaattagttttaaaaattttaattaaatttaagtagccctgtgcagctattggcttctgtattggatagtacagctttagaatgtttgtcaacattaatagtaccaaggtagtggtgaagattaaaatgcaatatgaaggcttcagagcacctagcattgggcttggcatatagtatatacctagtaagtagtcacctttttatcaaattgaaacttggaaatggttaaaaatgagatgtatgtaaggggacagtgtgtaaaaactagtgaagtgctgtaaagagctaccagtaattattggcacttgccccaaatagtgtccttctgacctgagaatttcatattaacttaatcctcagggaatttagtgatcatcagggtagcatctattccatttgtttaactggaagaattatctgcaagcttctcagaggaaagttatggtttgtacttttgctctggcaagtaacatgggaagcaaagtctttaacacatacttgttttttttcttagcttgaaggatgccaatgatgtaccaatccaatgtgaaatctctcctcttatctcctatgctggagaaggattagaaagttatgtggcagataaagaattccatgcacctctaatcatcgatgagaatggagttcatgagctggtgaaaaatggtatttgaaccagataccaagttttgtttgccacgataggaatagcttttatttttgatagaccaactgtgaacctacaagacgtcttggacaactgaagtttaaatatccacagggttttattttgcttgttgaactcttagagctattgcaaacttcccaagatccagatgactgaatttcagatagcatttttatgattcccaactcattgaaggtcttatttatataattttttccaagccaaggagaccattggccatccaggaaatttcgtacagctgaaatataggcaggatgttcaacatcagtttacttgcagctggaagcatttgtttttgaagttgtacatagtaataatatgtcattgtacatgttgaaaggtttctatggtactaaaagtttgttttattttatcaaacattaagcttttttaagaaaataattgggcagtgaaataaatgtatcttcttgtctctgga

SEQ ID NO: 307820 - DNA, 432 bp, Homo sapiens
tgtcgaggatcccgacacttgaaacgtcaagacgtcttggacaactgaagtttaaatatccacagggttttattttgcttgttgaactcttagagctattgcaaacttcccaagatccagatgactgaatttcagatagcatttttatgattcccaactcattgaaggtcttatttatataattttttccaagccaaggagaccattggccatccaggaaatttcgtacagctgaaatataggcaggatgttcaacatcagtttacttgcagctggaagcatttgtttttgaagttgtacatagtaataatatgtcattgtacatgttgaaaggtttctatggtactaaaagtttgttttattttatcaaacattaagcttttttaagaaaataattgggcagtgaaataaatgtatcttcttgtctctgga

SEQ ID NO: 307821 - DNA, 381 bp, Homo sapiens
atccctagccccgccccggcgccccgggccgcggccgcctccgcgtccgcgtcgtcgtctgtgctcccggcgctgacgtgtctgggcggtcggcttccactccttcaggcgtcggcagccactagtcgtggcgagaggggcggggtggccggggctggcgctccacttggcccccgctcccggcccgccccgccgccgcggcccccggatgagggtatatattcggagcgagcgcgggacgccgatgagtggccgcgcggaaggagctggagacggtcgtagctgcggtcgcgccgagaaagaaggatggtattggagggctgagcacacgtatgctgaacatatggctgcttgaactttggcctgtcgctgtgtattccg

SEQ ID NO: 307822 - DNA, 345 bp, Homo sapiens
tcagctccaggcctgggaaagtgaaggtactgggcatgtacatatttcttactgaagtttatttgagatatactaaaattgttcaggtagctggatcatgtcactaatattttgattcatactacattaaaccaggtgacctagcagaaagtgacaaaattgtctttttatttttgatgctccatttaaggcttctctcattcaagtcttaatttgcctccagtctctttccctcctcaatttccatacttctgctagatttcttttcctgaagcacaagttaaatacttaagtttaagctggcttaattttttttttttttaagacagagtctcactctgttgc

SEQ ID NO: 307823 - DNA, 748 bp, Homo sapiens
tgagaaagggtctcgctcttgtcacaaaggctgcaatgcaatgagcctgcacccagccaataaaatttatttttaaaaacatttttcaaaattgaggataagtaaagcacaagaatgaagaacagtatgaagtctttcccctagattatttcatggaaatctcaccacaatcttagtaaaaatgatagcctatttttttttaaaaaaggtcgagacaatagtccaaagacactttactaataaacggaggaacccaaatatttctgcccctaaatccatggctcatgttactacaccattttcttttccattctagaatgaaaaccaattatgaaaaaaagtggtagagaggaaagaggaacagtaagggggagaaatttattaacctataggtttacatgatcaaagtagttaatgaaaacaaaatgtggaatagagccattaaaaaaaaaaactaactgcaaacttggatcactgtaatcacactgattaaacagacccattctaatctgaaccgtcctaatcacagcagtcctacttctcctatctctcccagtcctagctgctggcatcactatactactaacagaccgcaacctcaacaccaccttcttcgaccccgccgggaagaagaaaccccattctataccaacacctattctgattttcgggtcacccctgaaatttatattccttatcctgccaaggcttcggaataatctcccatattggtaacttactactcccg

SEQ ID NO: 307824 - DNA, 542 bp, Homo sapiens
gctcacacttgatagggcaggaattgcaatcccctctctgtgagcgcagattctccaccaaggcccactgtgggttcacggtcaaagctggctaccttggggttaccatgggtgagttctttgggaagccttggagaacctccccaccaggagatttggctctggctcaacctctacctataaaaagagtggagcacatataattaccttttatgagtttatttaaaccttgagtaacatccaccctacaaacccttgttttgtcaaactgcaggggtgcaagaatgcaggttgcttctttgcccccccttttctccatcctggccttgctttttcttcatgttcacagaagcctagggaaaatcaacaaactctctttcagagcagaagtctaaactggggtaacagtctcttattgcatacactcaaatcactataaatggctcagattgagcttccttccccactggactttgaaaggataagtggacatcgtggactcactctattccagcctgggcaacacagcgagacaatttttt

SEQ ID NO: 307825 - DNA, 2699 bp, Homo sapiens
ctcttccacatcaccttggtgtctccctaaataaaaccagccctccttatcgcctggaaaaaatcaagagctagagtttgaatgggttttatataaacactcacccctgtcagcgtgcggctgggctctcaggataaactcacagcatctggcgcgatgcttgccttgcgttctctcccctgaacgtcaaggtttaagcagagcccgaggactgggagctcttctctgaaattcgatcaacctgaagccagttgcggaactgcacggggtcccgatggacctcaaggaaagccccagtgagggcagcctgcaaccttctagcatccagatctttgccaacacctccaccctccatggcatccgccacatcttcgtgtatgggccgctgaccatccggcgtgtgctgtgggcagtggccttcgtgggctctctgggcctgctgctggtggagagctctgagagggtgtcctactacttctcctaccagcatgtcactaaggtggacgaagtggtggctcaaagcctggtcttcccagctgtgaccctctgtaacctcaatggcttccggttctccaggctcaccaccaacgacctgtaccatgctggggagctgctggccctgctggatgtcaacctgcagatcccggacccccatctggctgacccctccgtgctggaggccctgcggcagaaggccaacttcaagcactacaaacccaagcagttcagcatgctggagttcctgcaccgtgtgggccatgacctgaaggatatgatgctctactgcaagttcaaagggcaggagtgcggccaccaagacttcaccacagtgtttacaaaatatgggaagtgttacatgtttaactcaggcgaggatggcaaacctctgctcaccacggtcaagggggggacaggcaacgggctggagatcatgctggacattcagcaggatgagtacctgcccatctggggagagacagaggaaacgacatttgaagcaggagtgaaagttcagatccacagtcagtctgagccacctttcatccaagagctgggctttggggtggctccagggttccagacctttgtggccacacaggagcagaggctcacatacctgcccccaccgtggggtgagtgccgatcctcagagatgggcctcgacttttttcctgtttacagcatcaccgcctgtaggattgactgtgagacccgctacattgtggaaaactgcaactgccgcatggttcacatgccaggggatgcccctttttgtacccctgagcagcacaaggagtgtgcagagcctgccctaggtctgttggcggaaaaggacagcaattactgtctctgcaggacaccctgcaacctaacccgctacaacaaagagctctccatggtgaagatccccagcaagacatcagccaagtaccttgagaagaaatttaacaaatcagaaaaatatatctcagagaacatccttgttctggatatattttttgaagctctcaattatgagacaattgaacagaagaaggcgtatgaagttgctgccttacttggtgatattggtggtcagatgggattgttcattggtgctagtatccttacaatactagagctctttgattatatttatgagctgatcaaagagaagctattagacctgcttggcaaagaggaggacgaagggagccacgatgagaatgtgagtacttgtgacacaatgccaaaccactctgaaaccatcagtcacactgtgaacgtgcccctgcagacgaccctggggaccttggaggagattgcctgctgacacccctcgagtcacccagcactccctccaaacagaccttgaggcccaagacccaggacaaggaacagcaagctcaggtgggatggccccagtgctggaaagaagcaagagccccctatgcacacattgcagactagctgcctagacctcgctccggccacgtccaacacgacgcatccttgggccccgccgtgcgtccctcttaggagagatgagtcacactctggaactgtccaagaacgaacctgccatcacatctcactgccagatgtataaagcacctgcatgctcagacttcttgtggcgccacctccacgtctgtcttgtacatgacactcctccacgcggtttccagtgtccacactgctgcccgtgcagtgggaccagattccaggtccaaagtcaccatgaggccaccctggaatcagaactgcacaatcaagagggaacccatgggactctctgctacattcagttcttgtgtcgtttgtgaaagttcttaacctgcccaaaaacccccttttccccaagctgcccatggggcttcggcgccaaaggtgacccgcgccaacctccctccccccccagtgcctgtgacggcggcacagcagccagcgggtgggggacgcctgtgttcacccatggtgcccatgtcgttcttctctccctgtgacacagcttgtacagtctgattctttttatctggggtaggggggcttttatgtttgtccgatggagatttgttttgttttgcttcattttatgcttttttattttagttttgatgttctgaggtttgctttggtttttccattttctttggcatttatttattcgtgcttcaaatcacagtcatattaaaagctggtcttgtggaaatggctga

SEQ ID NO: 307826 - DNA, 1949 bp, Homo sapiens
gagtcttgagcatccagcggaactgagcagtggtgcgccagggttgggcccttcacctggcctccgtcccccataaaatgtgtttacaaaatatgggaagtgttacatgtttaactcaggcgaggatggcaaacctctgctcaccacggtcaagggggggacaggcaacgggctggagatcatgctggacattcagcaggatgagtacctgcccatctggggagagacagaggaaacgacatttgaagcaggagtgaaagttcagatccacagtcagtctgagccacctttcatccaagagctgggctttggggtggctccagggttccagacctttgtggccacacaggagcagaggctcacatacctgcccccaccgtggggtgagtgccgatcctcagagatgggcctcgacttttttcctgtttacagcatcaccgcctgtaggattgactgtgagacccgctacattgtggaaaactgcaactgccgcatggttcacatgccaggggatgcccctttttgtacccctgagcagcacaaggagtgtgcagagcctgccctaggtctgttggcggaaaaggacagcaattactgtctctgcaggacaccctgcaacctaacccgctacaacaaagagctctccatggtgaagatccccagcaagacatcagccaagtaccttgagaagaaatttaacaaatcagaaaaatatatctcagagaacatccttgttctggatatattttttgaagctctcaattatgagacaattgaacagaagaaggcgtatgaagttgctgccttacttggtgatattggtggtcagatgggattgttcattggtgctagtatccttacaatactagagctctttgattatatttatgagctgatcaaagagaagctattagacctgcttggcaaagaggaggacgaagggagccacgatgagaatgtgagtacttgtgacacaatgccaaaccactctgaaaccatcagtcacactgtgaacgtgcccctgcagacgaccctggggaccttggaggagattgcctgctgacacccctcgagtcacccagcactccctccaaacagaccttgaggcccaagacccaggacaaggaacagcaagctcaggtgggatggccccagtgctggaaagaagcaagagccccctatgcacacattgcagactagctgcctagacctcgctccggccacgtccaacacgacgcatccttgggccccgccgtgcgtccctcttaggagagatgagtcacactctggaactgtccaagaacgaacctgccatcacatctcactgccagatgtataaagcacctgcatgctcagacttcttgtggcgccacctccacgtctgtcttgtacatgacactcctccacgcggtttccagtgtccacactgctgcccgtgcagtgggaccagattccaggtccaaagtcaccatgaggccaccctggaatcagaactgcacaatcaagagggaacccatgggactctctgctacattcagttcttgtgtcgtttgtgaaagttcttaacctgcccaaaaacccccttttccccaagctgcccatggggcttcggcgccaaaggtgacccgcgccaacctccctccccccccagtgcctgtgacggcggcacagcagccagcgggtgggggacgcctgtgttcacccatggtgcccatgtcgttcttctctccctgtgacacagcttgtacagtctgattctttttatctggggtaggggggcttttatgtttgtccgatggagatttgttttgttttgcttcattttatgcttttttattttagttttgatgttctgaggtttgctttggtttttccattttctttggcatttatttattcgtgcttcaaatcacagtcatattaaaagctggtcttgtggaaatggctga

SEQ ID NO: 307827 - DNA, 409 bp, Homo sapiens
tgtgctgagttcactgtatcctcagtggtgctctgagatttccagaggaaggaaaggttaagaggataatggtacaacactggctgtcaaaaacctttcactgattgtctgagtctaggagaagggcagcagagcctccatgggtttgaacagcaacacgacctgtacaggcccagaaacacactgtgagcacaatccgggctggaggcctgctagagagtgagccagggagcagagtgagccacaggagcccaggctggggctacatttctgatgttggcctcattagcatctttccaaacaaaccaatgtaatgcacatctattaattcattcactcaacacaattttattaagtgtctgctctgtgtcaggcaatgagttcatggagttttcactcaagtaaagga

SEQ ID NO: 307828 - DNA, 368 bp, Homo sapiens
ctgtaataatgaagaccgagtaatattagtaaacacatatatcagtgaaacagaatagagtccagaaatagtcccacacatatatggacaattaatttttggcaaaggtgcaaaagtagtctaatggaggaaggataatcatatgccaaacaaatgtgctttgacctaaacctcacaatttatatgaaacttaacaaaaaactaagtctaaatataaaacatgaaactctaaaacttttatgggaaacgtataaggaaatttatgggacttagggtaggcaaagctttcttagttgtgacgacgaaagcataattcactaaaaaagggataaatttcgttttgactttgtctaagttaaaaacttttg

SEQ ID NO: 307829 - DNA, 1514 bp, Homo sapiens
cggccgcgagtcctgcgtgatcgcgagcatgtgtgcgtgcgcgtgtttatctgaggcgcgtgcggcggccaccccagcctagtcctcttcttggtgccactggctaactaggttgagaaaccggcgccacaggcggcacacctggcccggagctggcccgctcctccccgccgagccggcgccccaacaacgcgccctctcccagtcctcacaaaggggcctagtccggcccccggctctggccgtgagggagcgctgtgggggcgcgctgccttctgcctggaagtgttgggcaggtggtgggagagcgtcaggcttgaacaacatgattttaaagcacgtgtctgtctgtcgttttttacttttagggttttggccaaattgggcgagggcacaaaataaccacttaccccttctcaccgaggaagagcgggagaaagggtatggcacagtcacaagggtgggtgaaaagatacatcaaggccttttgtaaaggcttctttgtggcggtgcctgtggcagtgactttcttggatcgggtcgcctgtgtggcaagagtagaaggagcatcgatgcagccttctttgaatcctggggggagccagtcatctgatgtggtgcttttgaaccactggaaagtgaggaattttgaagtacaccgtggtgacattgtatcattggtgtctcctaaaaacccagaacagaagatcattaagagagtgattgctcttgaaggagatattgtcagaaccataggacacaaaaaccggtatgtcaaagtcccccgtggtcacatctgggttgaaggtgatcatcatggacacagttttgacagtaattcttttgggccggtttccctaggacttctgcatgcccatgccacacatatcctgtggcccccagagcgctggcagaaattggaatctgttcttcctccagagcgcttaccagtacagagagaagaggaatgactgcatgaatctacctgagttgctggcattgggaggccagttactggaaaggaatggaaaaaagaagcctccaaaagggaaaaacttctgacaatatgatgctgtgcgagaaatatttacagcacattaaaacgatctgtattattaaataaataattttcaaatgttaaacagtattaaatggcacctgattttgtgttaaattttagttccctgttgtttaatgcccccaaaatatgcagacctttgggaatataaaaatattgcacccacatgtcttaatggggctgaatttcagattatttgttacatatacttattatattgattgttgggttttgattttggtgcttgctgctgaaataaattgaaaattaatattcaataaaaatgatgtatttgtcacttgctgttaaggtagaacaagaaggaacacatattatacacataatgatgggaattacattgtgatttgtactatctacaaaggagtaactgccagttaggaagaacagtaaacagtgatgttaaaataaaacaatg

SEQ ID NO: 307830 - DNA, 797 bp, Homo sapiens
  misc_feature (797)..(797): n is a, c, g, or t
acttcaaatggtttttgtgaggattaaaggagtttatatacaatagcacctagaaaaatgctatataagtgcttactgtatttttctttgtatttcaatggctacaaaaggtgtttactattttttttattcatcatcacttctccctgggatgttaaacctggattaaattctgctttcaagctattaataatgattcttataaaatgatctctttattgctttctttctgtttctcatggaattaaggtttccctaggacttctgcatgcccatgccacacatatcctgtggcccccagagcgctggcagaaattggaatctgttcttcctccagagcgcttaccagtacagagagaagaggaatgactgcatgaatctacctgagttgctggcattgggaggccagttactggaaaggaatggaaaaaagaagcctccaaaagggaaaaacttctgacaatatgatgctgtgcgagaaatatttacagcacattaaaacgatctgtattattaaataaataattttcaaatgttaaacagtattaaatggcacctgattttgtgttaaattttagttccctgttgtttaatgcccccaaaatatgcagacctttgggaatataaaaatattgcacccacatgtcttaatggggctgaatttcagattatttgttacatatacttattatattgattgttgggttttgattttggtgcttgctgctgaaataaattgaaaattaatattcaataaaagcctcgttggcctcagcggtggagctctgcggccggan

SEQ ID NO: 307831 - DNA, 1181 bp, Homo sapiens
  misc_feature (1180)..(1180): n is a, c, g, or t
ggggctgagctgcgcagcggggttttggccaaattgggcgagggcacaaaataaccacttaccccttctcaccgaggaagagcgggagaaagggtatggcacagtcacaagggtgggtgaaaagatacatcaaggccttttgtaaaggcttctttgtggcggtgcctgtggcagtgactttcttggatcgggtcgcctgtgtggcaagagtagaaggagcatcgatgcagccttctttgaatcctggggggagccagtcatctgatgtggtgcttttgaaccactggaaagtgaggaattttgaagtacaccgtggtgacattgtatcattggtgtctcctaaaaacccagaacagaagatcattaagagagtgattgctcttgaaggagatattgtcagagatgggagaaaactgaaaaggatatgaaacagaaacttccgaatcagtgacaagaatgaaagctttagatgataagattgtaacaatcaggtgtttaagcagcctttagtaatgtcgtatttattgtacttgctgataaatcaagaacaattgttgacattcagcaagtaaatactgtgtggcatgatgtgtctcattgtgatcgctttctttaaacaagttgtagccaggcctatacaatgtggtagccaaaatgctttgactactacattgaggaagttttctgaccctgttttctaaaaaaacttgatcctaaagtatttgtattaatgatagtacacatattaactaatctcactgaaatgaacctcagtcagttttagagcagattctaggctagcagttctcacagcatggccagaggatcccaggggatccccactgggggcctatgagattaaaactactttcctaataatactaaagtgttacttgccgtttttcactctcattctcttgtgagtgtacagtggaattttccagatatgtaatattggagttgattgaatgcaggagcagatatgagaatccagctgttttctattaagccagaaactaaaaagatttgcaaaaatgtaaaaaaaaaaaatcattatttttactatttattgtttgcttttggaaaaggactataatttttatttaaatcgtattctttttgttaacataagggtttattattggtattttaaattgaatcaataaatgaaattttaaanc

SEQ ID NO: 307832 - DNA, 899 bp, Homo sapiens
  misc_feature (870)..(870): n is a, c, g, or t
agatttacctcctcatctggctcttcatttgtggtacttttaatgcaccagtaatggtaggagaggacattgaagcaaggagacactttctgaacctctgttgccaaccgagaagagttagcctaagattgaagaagtgcatatctgaggtcaaggacaaggcgggcagtgctcaatgtcatcctttagaacagagggcaggaatcccatctggagagtggaggcaactgaaagagaggtctcctaaaaacccagaacagaagatcattaagagagtgattgctcttgaaggagatattgtcagaaccataggacacaaaaaccggtatgtcaaagtcccccgtggtcacatctgggttgaaggtgatcatcatggacacagttttgacagtaattcttttgggccggtttccctaggacttctgcatgcccatgccacacatatcctgtggcccccagagcgctggcagaaattggaatctgttcttcctccagagcgcttaccagtacagagagaagaggaatgactgcatgaatctacctgagttgctggcattgggaggccagttactggaaaggaatggaaaaaagaagcctccaaaagggaaaaacttctgacaatatgatgctgtgcgagaaatatttacagcacattaaaacgatctgtattattaaataaataattttcaaatgttaaacagtaaaaaaaaaagacagaaaaaaaacccggagacactataaagcaggaatgcgcaacacaagcggcgctagcacagttggcacggggaccataggcggttccgagaccccagctctcttggtcaaaagcggcgcaaatctggcggggaccccatatgagaggcgaataanttccagataagccgggtaaccgcgtaagg

SEQ ID NO: 307833 - DNA, 941 bp, Homo sapiens
  misc_feature (932)..(932): n is a, c, g, or t
cgccggcggagggcggggtctgcgcggggacttcccccgggctgagctgcgcagcggggttttggccaaattgggcgagggcacaaaataaccacttaccccttctcaccgaggaagagcgggagaaagggtatggcacagtcacaagggtgggtgaaaagatacatcaaggccttttgtaaaggcttctttgtggcggtgcctgtggcagtgactttcttggatcgggtcgcctgtgtggcaagagtagaaggagcatcgatgcagccttctttgaatcctggggggagccagtcatctgatgtggtgcttttgaaccactggaaagtgaggaattttgaagtacaccgtggtgacattgtatcattggtgtctcctaaaaacccagaacagaagatcattaagagagtgattgctcttgaaggagatattgtcagcaaccttgggagaatccacctgaacattcctcagagaagctgaaaattactttaaaagaagttacagcagtgcatactatgtgtggctttcctacaatgtagcaaacagaaacttggggttccagaatgttcctgaatataaacacagtaaaatttcttggataggaagtgcttcaaaaaaagatgtcattggaagataccagtgtggaaggtaagggcattggtctgaatttatttgcccatctaagcttagtttgcagaaggcataaatagggaggaactagggaaataatgggcttagtcaacaggtaatctatttaggtgaagccactatattttgcgcagataaggggtgctgagactggttacttaaaaatcgagataaatcgggggaaagaagtattggacgccatgtatggccagttcaatagggggggggaacatgagaaaaaatatggacaaacttcaattatacacaggataatatattagggnacaaaagag

SEQ ID NO: 307834 - DNA, 575 bp, Homo sapiens
cggccgcgagtcctgcgtgatcgcgagcatgtgtgcgtgcgcgtgtttatctgaggcgcgtgcggcggccaccccagcctagtcctcttcttggtgccactggctaactaggttgagaaaccggcgccacaggcggcacacctggcccggagctggcccgctcctccccgccgagccggcgccccaacaacgcgccctctcccagtcctcacaaaggggcctagtccggcccccggctctggccgtgagggagcgctgtgggggcgcgctgccttctgcctggaagtgttgggcaggtggtgggagagcgtcaggcttgaacaacatgattttaaagcacgtgtctgtctgtcgttttttacttttagggttttggccaaattgggcgagggcacaaaataaccacttaccccttctcaccgaggaagagcgggagaaagggtaagtaaggaatggtcaggggtggaaggacctaggactttatcctgagagcgagcgagagagagaagggctagatgtccagaactgctcgtggggaacttgggcccagattctaccttttcatcgggaactgg

SEQ ID NO: 307835 - DNA, 787 bp, Homo sapiens
cgccggcggagggcggggtctgcgcggggacttcccccgggctgagctgcgcagcggggttttggccaaattgggcgagggcacaaaataaccacttaccccttctcaccgaggaagagcgggagaaagggtatggcacagtcacaagggtgggtgaaaagatacatcaaggccttttgtaaaggcttctttgtggcggtgcctgtggcagtgactttcttggatcgggtcgcctgtgtggcaagagtagaaggagcatcgatgcagccttctttgaatcctggggggagccagtcatctgatgtggtgcttttgaaccactggaaagtgaggaattttgaagtacaccgtggtgacattgtatcattggttttctcctgaactgctcttggtctccatgaaggctactggcaggagcacatgagagagcagcagcacagcaagtggataaaagcacagactctggagccagcctgtctagattcaaattttatttactctatctgtgatcttggcctcattaagttatctctgttttagtttttttcctatggttaatgatagtcccaacctcatagaatagctttgaacattcagtgagttattccacatgaagcacttagaggaactattagtattcaagtgtttcataacaaagtataatcatttgacaataaataaactaatatactcatttggtaacacacacagacccacacacacacacacacatacacgtatgtcatccactgtttgcaattgtgagattatactcccagaagtaatt

SEQ ID NO: 307836 - DNA, 892 bp, Homo sapiens
cgccggcggagggcggggtctgcgcggggacttcccccgggctgagctgcgcagcggggttttggccaaattgggcgagggcacaaaataaccacttaccccttctcaccgaggaagagcgggagaaagggggaaaatatctttgcatttcttcgttggtatgctcagcctcctttaacagtggaaagtcttgaagccaccaaatgagactttcactttaattgggagaagacttgctcttggttgaatcaaaaccttcatgtactggggaaaattgtgtatgaaccagcatagctttcacataagactgacgtcattttcctatatatgagctaatttacattaagaaatagctattgtagcagaaaagactgtaatattaattttgttttagtatataaagatactaaatacctattactgaagatttaagtaatatggaaaaatataaagcataaagtgaaattcctttcattgcaaataaatactgtcatcattttggttcatattctttattatttgacctctttctatgatgatgatgataaggatgacgatgaggatgatgctgtgtgtgtataaaatttcacataaatgggttcatattaaaaatgcaattttccaacttttttggaggagaatctcaagcaatataacgatatattgttctttttaatgattgcagattactctactgtatgcatgtcataatttatttacatatttgtgaacatttggttgttttcattttttcactgcaataaaaatggtatgttgaatatcgttgatcatatctttgcatccataaaataaattcctggagtggtgtttctgcatcagaaggtatattcatgtaacattttggtacatattaccatattaaatttgtcag

SEQ ID NO: 307837 - DNA, 1116 bp, Homo sapiens
ggcatttctcctattaatgacatacatgcattcctgaaaaatctttaattctgcaaaattaaaccataaaattttagggcttataaagaaaatagggctaggaacagatcatttgaaaccagtgacattttgtaaacagagctgagaaaatagaagttgtcataaaaacgagcactattaactccctccttgcatttgcacccagcatcacatcagtcttagcttgaaaccctggttttcttcctttgttgtaggtccttaaagtcatctacttctaatacagaccaatttcatcaaagttgaaaatctgctctaggatattgatctgttgattttattctattttaaacacaggggaaaatatctttgcatttcttcgttggtatgctcagcctcctttaacagtggaaagtcttgaagccaccaaatgagactttcactttaattgggagaagacttgctcttggttgaatcaaaaccttcatgtactggggaaaattgtgtatgaaccagcatagctttcacataagactgacgtcattttcctatatatgagctaatttacattaagaaatagctattgtagcagaaaagactgtaatattaattttgttttagtatataaagatactaaatacctattactgaagatttaagtaatatggaaaaatataaagcataaagtgaaattcctttcattgcaaataaatactgtcatcattttggttcatattctttattatttgacctctttctatgatgatgatgataaggatgacgatgaggatgatgctgtgtgtgtataaaatttcacataaatgggttcatattaaaaatgcaattttccaacttttttggaggagaatctcaagcaatataacgatatattgttctttttaatgattgcagattactctactgtatgcatgtcataatttatttacatatttgtgaacatttggttgttttcattttttcactgcaataaaaatggtatgttgaatatcgttgatcatatctttgcatccataaaataaattcctggagtggtgtttctgcatcagaaggtatattcatgtaacattttggtacatattaccatattaaatttgtcag

SEQ ID NO: 307838 - DNA, 1203 bp, Homo sapiens
cgccggcggagggcggggtctgcgcggggacttcccccgggctgagctgcgcagcggggttttggccaaattgggcgagggcacaaaataaccacttaccccttctcaccgaggaagagcgggagaaagggtatggcacagtcacaagggtgggtgaaaagatacatcaaggccttttgtaaaggcttctttgtggcggtgcctgtggcagtgactttcttggatcgggtcgcctgtgtggcaagagtagaaggagcatcgatgcagccttctttgaatcctggggggagccagtcatctgatgtggtgcttttgaaccactggaaagtgaggaattttgaagtacaccgtggtgacattgtatcattggtgtctcctaaaaacccagaacagaagatcattaagagagtgattgctcttgaaggagatattgtcagaaccataggacacaaaaaccggtatgtcaaagtcccccgtggtcacatctgggttgaaggtgatcatcatggacacagttttgacagtaattcttttgggccggtttccctaggacttctgcatgcccatgccacacatatcctgtggcccccagagcgctggcagaaattggaatctgttcttcctccagagcgcttaccagtacagagagaagaggaatgactgcatgaatctacctgagttgctggcattgggaggccagttactggaaaggaatggaaaaaagaagcctccaaaagggaaaaacttctgacaatatgatgctgtgcgagaaatatttacagcacattaaaacgatctgtattattaaataaataattttcaaatgttaaacagtattaaatggcacctgattttgtgttaaattttagttccctgttgtttaatgcccccaaaatatgcagacctttgggaatataaaaatattgcacccacatgtcttaatggggctgaatttcagattatttgttacatatacttattatattgattgttgggttttgattttggtgcttgctgctgaaataaattgaaaattaatattcaataaaaatgatgtatttgtcacttgctgttaaggtagaacaagaaggaacacatattatacacataatgatgggaattacattgtgatttgtactatctacaaaggagtaactgccagttaggaagaacagtaaacagtgatgttaaaataaaacaatg

SEQ ID NO: 307839 - DNA, 1536 bp, Homo sapiens
cggccgcgagtcctgcgtgatcgcgagcatgtgtgcgtgcgcgtgtttatctgaggcgcgtgcggcggccaccccagcctagtcctcttcttggtgccactggctaactaggttgagaaaccggcgccacaggcggcacacctggcccggagctggcccgctcctccccgccgagccggcgccccaacaacgcgccctctcccagtcctcacaaaggggcctagtccggcccccggctctggccgtgagggagcgctgtgggggcgcgctgccttctgcctggaagtgttgggcaggtggtgggagagcgtcaggcttgaacaacatgattttaaagcacgtgtctgtctgtcgttttttacttttagggttttggccaaattgggcgagggcacaaaataaccacttaccccttctcaccgaggaagagcgggagaaagggtatggcacagtcacaagggtgggtgaaaagatacatcaaggccttttgtaaaggcttctttgtggcggtgcctgtggcagtgactttcttggatcgggtcgcctgtgtggcaagagtagaaggagcatcgatgcagccttctttgaatcctggggggagccagtcatctgatgtggtgcttttgaaccactggaaagtgaggaattttgaagtacaccgtggtgacattgtatcattggtgtctcctaaaaacccagaacagaagatcattaagagagtgattgctcttgaaggagatattgtcagaaccataggacacaaaaaccggtatgtcaaagtcccccgtggtcacatctgggttgaaggtgatcatcatggacacagttttgacagtaattcttttgggccggtttccctaggacttctgcatgcccatgccacacatatcctgtggcccccagagcgctggcagaaattggaatctgttcttcctccagagcgcttaccagtacagagagaagaggaatgactgcatgaatctacctgagttgctggcattgggaggccagttactggaaaggaatggaaaaaagaagcctccaaaagggaaaaacttctgacaatatgatgctgtgcgagaaatatttacagcacattaaaacgatctgtattattaaataaataattttcaaatgttaaacagtattaaatggcacctgattttgtgttaaattttagttccctgttgtttaatgcccccaaaatatgcagacctttgggaatataaaaatattgcacccacatgtcttaatggggctgaatttcagattatttgttacatatacttattatattgattgttgggttttgattttggtgcttgctgctgaaataaattgaaaattaatattcaataaaaatgatgtatttgtcacttgctgttaaggtagaacaagaaggaacacatattatacacataatgatgggaattacattgtgatttgtactatctacaaaggagtaactgccagttaggaagaacagtaaacagtgatgttaaaataaaacaatgatttgctaaagtcctgttttga

SEQ ID NO: 307840 - DNA, 1552 bp, Homo sapiens
  misc_feature (1552)..(1552): n is a, c, g, or t
cggccgcgagtcctgcgtgatcgcgagcatgtgtgcgtgcgcgtgtttatctgaggcgcgtgcggcggccaccccagcctagtcctcttcttggtgccactggctaactaggttgagaaaccggcgccacaggcggcacacctggcccggagctggcccgctcctccccgccgagccggcgccccaacaacgcgccctctcccagtcctcacaaaggggcctagtccggcccccggctctggccgtgagggagcgctgtgggggcgcgctgccttctgcctggaagtgttgggcaggtggtgggagagcgtcaggcttgaacaacatgattttaaagcacgtgtctgtctgtcgttttttacttttagggttttggccaaattgggcgagggcacaaaataaccacttaccccttctcaccgaggaagagcgggagaaagggtatggcacagtcacaagggtgggtgaaaagatacatcaaggccttttgtaaaggcttctttgtggcggtgcctgtggcagtgactttcttggatcgggtcgcctgtgtggcaagagtagaaggagcatcgatgcagccttctttgaatcctggggggagccagtcatctgatgtggtgcttttgaaccactggaaagtgaggaattttgaagtacaccgtggtgacattgtatcattggtgtctcctaaaaacccagaacagaagatcattaagagagtgattgctcttgaaggagatattgtcagaaccataggacacaaaaaccggtatgtcaaagtcccccgtggtcacatctgggttgaaggtgatcatcatggacacagttttgacagtaattcttttgggccggtttccctaggacttctgcatgcccatgccacacatatcctgtggcccccagagcgctggcagaaattggaatctgttcttcctccagagcgcttaccagtacagagagaagaggaatgactgcatgaatctacctgagttgctggcattgggaggccagttactggaaaggaatggaaaaaagaagcctccaaaagggaaaaacttctgacaatatgatgctgtgcgagaaatatttacagcacattaaaacgatctgtattattaaataaataattttcaaatgttaaacagtattaaatggcacctgattttgtgttaaattttagttccctgttgtttaatgcccccaaaatatgcagacctttgggaatataaaaatattgcacccacatgtcttaatggggctgaatttcagattatttgttacatatacttattatattgattgttgggttttgattttggtgcttgctgctgaaataaattgaaaattaatattcaataaaaatgatgtatttgtcacttgctgttaaggtagaacaagaaggaacacatattatacacataatgatgggaattacattgtgatttgtactatctacaaaggagtaactgccagttaggaagaacagtaaacagtgatgttaaaataaaacaatggcctcgttggcctcagcggtggagctctgcggccggan

SEQ ID NO: 307841 - DNA, 1271 bp, Homo sapiens
cgccggcggagggcggggtctgcgcggggacttcccccgggctgagctgcgcagcggggttttggccaaattgggcgagggcacaaaataaccacttaccccttctcaccgaggaagagcgggagaaaggtggcctgattcttttgagaagccttcctactccttactcccaaccctgatcaaaggaaaagccatgttgtatggcacagtcacaagggtgggtgaaaagatacatcaaggccttttgtaaaggcttctttgtggcggtgcctgtggcagtgactttcttggatcgggtcgcctgtgtggcaagagtagaaggagcatcgatgcagccttctttgaatcctggggggagccagtcatctgatgtggtgcttttgaaccactggaaagtgaggaattttgaagtacaccgtggtgacattgtatcattggtgtctcctaaaaacccagaacagaagatcattaagagagtgattgctcttgaaggagatattgtcagaaccataggacacaaaaaccggtatgtcaaagtcccccgtggtcacatctgggttgaaggtgatcatcatggacacagttttgacagtaattcttttgggccggtttccctaggacttctgcatgcccatgccacacatatcctgtggcccccagagcgctggcagaaattggaatctgttcttcctccagagcgcttaccagtacagagagaagaggaatgactgcatgaatctacctgagttgctggcattgggaggccagttactggaaaggaatggaaaaaagaagcctccaaaagggaaaaacttctgacaatatgatgctgtgcgagaaatatttacagcacattaaaacgatctgtattattaaataaataattttcaaatgttaaacagtattaaatggcacctgattttgtgttaaattttagttccctgttgtttaatgcccccaaaatatgcagacctttgggaatataaaaatattgcacccacatgtcttaatggggctgaatttcagattatttgttacatatacttattatattgattgttgggttttgattttggtgcttgctgctgaaataaattgaaaattaatattcaataaaaatgatgtatttgtcacttgctgttaaggtagaacaagaaggaacacatattatacacataatgatgggaattacattgtgatttgtactatctacaaaggagtaactgccagttaggaagaacagtaaacagtgatgttaaaataaaacaatg

SEQ ID NO: 307842 - DNA, 1399 bp, Homo sapiens
  misc_feature (1399)..(1399): n is a, c, g, or t
cggccgcgagtcctgcgtgatcgcgagcatgtgtgcgtgcgcgtgtttatctgaggcgcgtgcggcggccaccccagcctagtcctcttcttggtgccactggctaactaggttgagaaaccggcgccacaggcggcacacctggcccggagctggcccgctcctccccgccgagccggcgccccaacaacgcgccctctcccagtcctcacaaaggggcctagtccggcccccggctctggccgtgagggagcgctgtgggggcgcgctgccttctgcctggaagtgttgggcaggtggtgggagagcgtcaggcttgaacaacatgattttaaagcacgtgtctgtctgtcgttttttacttttagggttttggccaaattgggcgagggcacaaaataaccacttaccccttctcaccgaggaagagcgggagaaagggtatggcacagtcacaagggtgggtgaaaagatacatcaaggccttttgtaaaggcttctttgtggcggtgcctgtggcagtgactttcttggatcgggtcgcctgtgtggcaagagtagaaggagcatcgatgcagccttctttgaatcctggggggagccagtcatctgatgtggtgcttttgaaccactggaaagtgaggaattttgaagtacaccgtggtgacattgtatcattggtgtctcctaaaaacccagaacagaagatcattaagagagtgattgctcttgaaggagatattgtcagaaccataggacacaaaaaccggtatgtcaaagtcccccgtggtcacatctgggttgaaggtgatcatcatggacacagttttgacagtaattcttttgggccggtttccctaggacttctgcatgcccatgccacacatatcctgtggcccccagagcgctggcagaaattggaatctgttcttcctccagagcgcttaccagtacagagagaagaggaatgactgcatgaatctacctgagttgctggcattgggaggccagttactggaaaggaatggaaaaaagaagcctccaaaagggaaaaacttctgacaatatgatgctgtgcgagaaatatttacagcacattaaaacgatctgtattattaaataaataattttcaaatgttaaacagtattaaatggcacctgattttgtgttaaattttagttccctgttgtttaatgcccccaaaatatgcagacctttgggaatataaaaatattgcacccacatgtcttaatggggctgaatttcagattatttgttacatatacttattatattgattgttgggttttgattttggtgcttgctgctgaaataaattgaaaattaatattcaataaaagcctcgttggcctcagcggtggagctctgcggccggan

SEQ ID NO: 307843 - DNA, 1411 bp, Homo sapiens
cggccgcgagtcctgcgtgatcgcgagcatgtgtgcgtgcgcgtgtttatctgaggcgcgtgcggcggccaccccagcctagtcctcttcttggtgccactggctaactaggttgagaaaccggcgccacaggcggcacacctggcccggagctggcccgctcctccccgccgagccggcgccccaacaacgcgccctctcccagtcctcacaaaggggcctagtccggcccccggctctggccgtgagggagcgctgtgggggcgcgctgccttctgcctggaagtgttgggcaggtggtgggagagcgtcaggcttgaacaacatgattttaaagcacgtgtctgtctgtcgttttttacttttagggttttggccaaattgggcgagggcacaaaataaccacttaccccttctcaccgaggaagagcgggagaaagggtatggcacagtcacaagggtgggtgaaaagatacatcaaggccttttgtaaaggcttctttgtggcggtgcctgtggcagtgactttcttggatcgggtcgcctgtgtggcaagagtagaaggagcatcgatgcagccttctttgaatcctggggggagccagtcatctgatgtggtgcttttgaaccactggaaagtgaggaattttgaagtacaccgtggtgacattgtatcattggtgtctcctaaaaacccagaacagaagatcattaagagagtgattgctcttgaaggagatattgtcaggtttccctaggacttctgcatgcccatgccacacatatcctgtggcccccagagcgctggcagaaattggaatctgttcttcctccagagcgcttaccagtacagagagaagaggaatgactgcatgaatctacctgagttgctggcattgggaggccagttactggaaaggaatggaaaaaagaagcctccaaaagggaaaaacttctgacaatatgatgctgtgcgagaaatatttacagcacattaaaacgatctgtattattaaataaataattttcaaatgttaaacagtattaaatggcacctgattttgtgttaaattttagttccctgttgtttaatgcccccaaaatatgcagacctttgggaatataaaaatattgcacccacatgtcttaatggggctgaatttcagattatttgttacatatacttattatattgattgttgggttttgattttggtgcttgctgctgaaataaattgaaaattaatattcaataaaaatgatgtatttgtcacttgctgttaaggtagaacaagaaggaacacatattatacacataatgatgggaattacattgtgatttgtactatctacaaaggagtaactgccagttaggaagaacagtaaacagtgatgttaaaataaaacaatg

SEQ ID NO: 307844 - DNA, 1070 bp, Homo sapiens
agatttacctcctcatctggctcttcatttgtggtacttttaatgcaccagtaatggtaggagaggacattgaagcaaggagacactttctgaacctctgttgccaaccgagaagagttagcctaagattgaagaagtgcatatctgaggtcaaggacaaggcgggcagtgctcaatgtcatcctttagaacagagggcaggaatcccatctggagagtggaggcaactgaaagagaggtctcctaaaaacccagaacagaagatcattaagagagtgattgctcttgaaggagatattgtcagaaccataggacacaaaaaccggtatgtcaaagtcccccgtggtcacatctgggttgaaggtgatcatcatggacacagttttgacagtaattcttttgggccggtttccctaggacttctgcatgcccatgccacacatatcctgtggcccccagagcgctggcagaaattggaatctgttcttcctccagagcgcttaccagtacagagagaagaggaatgactgcatgaatctacctgagttgctggcattgggaggccagttactggaaaggaatggaaaaaagaagcctccaaaagggaaaaacttctgacaatatgatgctgtgcgagaaatatttacagcacattaaaacgatctgtattattaaataaataattttcaaatgttaaacagtattaaatggcacctgattttgtgttaaattttagttccctgttgtttaatgcccccaaaatatgcagacctttgggaatataaaaatattgcacccacatgtcttaatggggctgaatttcagattatttgttacatatacttattatattgattgttgggttttgattttggtgcttgctgctgaaataaattgaaaattaatattcaataaaaatgatgtatttgtcacttgctgttaaggtagaacaagaaggaacacatattatacacataatgatgggaattacattgtgatttgtactatctacaaaggagtaactgccagttaggaagaacagtaaacagtgatgttaaaataaaacaatg

SEQ ID NO: 307845 - DNA, 958 bp, Homo sapiens
gtttctagcagtggttttaaatcatggttcaacctgcccttaactcctctctgctctcgtttgtgtagtttctcctgaactgctcttggtctccatgaaggctactggcaggagcacatgagagaggtctcctaaaaacccagaacagaagatcattaagagagtgattgctcttgaaggagatattgtcagaaccataggacacaaaaaccggtatgtcaaagtcccccgtggtcacatctgggttgaaggtgatcatcatggacacagttttgacagtaattcttttgggccggtttccctaggacttctgcatgcccatgccacacatatcctgtggcccccagagcgctggcagaaattggaatctgttcttcctccagagcgcttaccagtacagagagaagaggaatgactgcatgaatctacctgagttgctggcattgggaggccagttactggaaaggaatggaaaaaagaagcctccaaaagggaaaaacttctgacaatatgatgctgtgcgagaaatatttacagcacattaaaacgatctgtattattaaataaataattttcaaatgttaaacagtattaaatggcacctgattttgtgttaaattttagttccctgttgtttaatgcccccaaaatatgcagacctttgggaatataaaaatattgcacccacatgtcttaatggggctgaatttcagattatttgttacatatacttattatattgattgttgggttttgattttggtgcttgctgctgaaataaattgaaaattaatattcaataaaaatgatgtatttgtcacttgctgttaaggtagaacaagaaggaacacatattatacacataatgatgggaattacattgtgatttgtactatctacaaaggagtaactgccagttaggaagaacagtaaacagtgatgttaaaataaaacaatg

SEQ ID NO: 307846 - DNA, 1449 bp, Homo sapiens
  misc_feature (1449)..(1449): n is a, c, g, or t
cggccgcgagtcctgcgtgatcgcgagcatgtgtgcgtgcgcgtgtttatctgaggcgcgtgcggcggccaccccagcctagtcctcttcttggtgccactggctaactaggttgagaaaccggcgccacaggcggcacacctggcccggagctggcccgctcctccccgccgagccggcgccccaacaacgcgccctctcccagtcctcacaaaggggcctagtccggcccccggctctggccgtgagggagcgctgtgggggcgcgctgccttctgcctggaagtgttgggcaggtggtgggagagcgtcaggcttgaacaacatgattttaaagcacgtgtctgtctgtcgttttttacttttagggttttggccaaattgggcgagggcacaaaataaccacttaccccttctcaccgaggaagagcgggagaaagggtatggcacagtcacaagggtgggtgaaaagatacatcaaggccttttgtaaaggcttctttgtggcggtgcctgtggcagtgactttcttggatcgggtcgcctgtgtggcaagagtagaaggagcatcgatgcagccttctttgaatcctggggggagccagtcatctgatgtggtgcttttgaaccactggaaagtgaggaattttgaagtacaccgtggtgacattgtatcattggtgtctcctaaaaacccagaacagaagatcattaagagagtgattgctcttgaaggagatattgtcaggtttccctaggacttctgcatgcccatgccacacatatcctgtggcccccagagcgctggcagaaattggaatctgttcttcctccagagcgcttaccagtacagagagaagaggaatgactgcatgaatctacctgagttgctggcattgggaggccagttactggaaaggaatggaaaaaagaagcctccaaaagggaaaaacttctgacaatatgatgctgtgcgagaaatatttacagcacattaaaacgatctgtattattaaataaataattttcaaatgttaaacagtattaaatggcacctgattttgtgttaaattttagttccctgttgtttaatgcccccaaaatatgcagacctttgggaatataaaaatattgcacccacatgtcttaatggggctgaatttcagattatttgttacatatacttattatattgattgttgggttttgattttggtgcttgctgctgaaataaattgaaaattaatattcaataaaaatgatgtatttgtcacttgctgttaaggtagaacaagaaggaacacatattatacacataatgatgggaattacattgtgatttgtactatctacaaaggagtaactgccagttaggaagaacagtaaacagtgatgttaaaataaaacaatggcctcgttggcctcagcggtggagctctgcggccggan

SEQ ID NO: 307847 - DNA, 912 bp, Homo sapiens
acttcaaatggtttttgtgaggattaaaggagtttatatacaatagcacctagaaaaatgctatataagtgcttactgtatttttctttgtatttcaatggctacaaaaggtgtttactattttttttattcatcatcacttctccctgggatgttaaacctggattaaattctgctttcaagctattaataatgattcttataaaatgatctctttattgctttctttctgtttctcatggaattaaggtttccctaggacttctgcatgcccatgccacacatatcctgtggcccccagagcgctggcagaaattggaatctgttcttcctccagagcgcttaccagtacagagagaagaggaatgactgcatgaatctacctgagttgctggcattgggaggccagttactggaaaggaatggaaaaaagaagcctccaaaagggaaaaacttctgacaatatgatgctgtgcgagaaatatttacagcacattaaaacgatctgtattattaaataaataattttcaaatgttaaacagtattaaatggcacctgattttgtgttaaattttagttccctgttgtttaatgcccccaaaatatgcagacctttgggaatataaaaatattgcacccacatgtcttaatggggctgaatttcagattatttgttacatatacttattatattgattgttgggttttgattttggtgcttgctgctgaaataaattgaaaattaatattcaataaaaatgatgtatttgtcacttgctgttaaggtagaacaagaaggaacacatattatacacataatgatgggaattacattgtgatttgtactatctacaaaggagtaactgccagttaggaagaacagtaaacagtgatgttaaaataaaacaatg

SEQ ID NO: 307848 - DNA, 1040 bp, Homo sapiens
cggccgcgagtcctgcgtgatcgcgagcatgtgtgcgtgcgcgtgtttatctgaggcgcgtgcggcggccaccccagcctagtcctcttcttggtgccactggctaactaggttgagaaaccggcgccacaggcggcacacctggcccggagctggcccgctcctccccgccgagccggcgccccaacaacgcgccctctcccagtcctcacaaaggggcctagtccggcccccggctctggccgtgagggagcgctgtgggggcgcgctgccttctgcctggaagtgttgggcaggtggtgggagagcgtcaggcttgaacaacatgattttaaagcacgtgtctgtctgtcgttttttacttttagggttttggccaaattgggcgagggcacaaaataaccacttaccccttctcaccgaggaagagcgggagaaagggtatggcacagtcacaagggtgggtgaaaagatacatcaaggccttttgtaaaggcttctttgtggcggtgcctgtggcagtgactttcttggatcgggtcgcctgtgtggcaagagtagaaggagcatcgatgcagccttctttgaatcctggggggagccagtcatctgatgtggtgcttttgaaccactggaaagtgaggaattttgaagtacaccgtggtgacattgtatcattggtcagcagcacagcaagtggataaaagcacagactctggagccagcctgtctagattcaaattttatttactctatctgtgatcttggcctcattaagttatctctgttttagtttttttcctatggttaatgatagtcccaacctcatagaatagctttgaacattcagtgagttattccacatgaagcacttagaggaactattagtattcaagtgtttcataacaaagtataatcatttgacaataaataaactaatatactcatttggtaacacacacagacccacacacacacacacacatacacgtatgtcatccactgtttgcaattgtgagattatactcccagaagtaatt

SEQ ID NO: 307849 - DNA, 977 bp, Homo sapiens
cggccgcgagtcctgcgtgatcgcgagcatgtgtgcgtgcgcgtgtttatctgaggcgcgtgcggcggccaccccagcctagtcctcttcttggtgccactggctaactaggttgagaaaccggcgccacaggcggcacacctggcccggagctggcccgctcctccccgccgagccggcgccccaacaacgcgccctctcccagtcctcacaaaggggcctagtccggcccccggctctggccgtgagggagcgctgtgggggcgcgctgccttctgcctggaagtgttgggcaggtggtgggagagcgtcaggcttgaacaacatgattttaaagcacgtgtctgtctgtcgttttttacttttagggttttggccaaattgggcgagggcacaaaataaccacttaccccttctcaccgaggaagagcgggagaaagggtatggcacagtcacaagggtgggtgaaaagatacatcaaggccttttgtaaaggcttctttgtggcggtgcctgtggcagtgactttcttggatcgggtcgcctgtgtggcaagagtagaaggagcatcgatgcagccttctttgaatcctggggggagccagtcatctgatgtggtgcttttgaaccactggaaagtgaggaattttgaagtacaccgtggtgacattgtatcattggtaaacacatatatagcaaagcagactgtcctttctattgcaaggggttttgttcagagttggttgaccagtgttgtttcctaaagcatgggagatctggcagagggaggtgggtgcatattatttttttgcatatctttcttatttttcactgtctctttctttctgtaaaaagttggtcacagtggagttattgtttaagtatgttattcagtagctacatttatttaataacattattggttgcacaaaatatgatttgctgtcatcaagtcctcactatagtatatgtaggtg

SEQ ID NO: 307850 - DNA, 379 bp, Homo sapiens
attacttgggaaatacatctgaagtccatgagggccaaagttttggagacattccaaatgagctggtacatctttagtgagcatcattaacctttcaggttgtaaggaatatagataaacttactgatcatattgttattctttaattgtgaagtataggataaatattaatttaaattaaccatatagtctaaaatgatcattaaatcattattgatcagatattaaaagtagcatgactattttaagattaagattatgatgttaaggttcatttaaaaaaattcaagaacatttaactattttagaagcaaatgcagaaactaagaggactcttttgtactcatagagatgggagaaaactgaaaaggatatgaaa

SEQ ID NO: 307851 - DNA, 6740 bp, Homo sapiens
cggtcccgccccttcctaccttccagtagccggcggcggtgtctcaggcggcaatggaaggatccgagcctgtggccgcccatcagggggaagaggcgtcctgttcttcctgggggactggcagcacaaataaaaatttgcccattatgtcaacagcatctgtggaaatcgatgatgcattgtatagtcgacagaggtacgttcttggagacacagcaatgcagaagatggccaagtcccatgttttcttaagtgggatgggtggtcttggtttggaaattgcaaagaatcttgttcttgcagggattaaggcagttacaattcatgatacagaaaaatgccaagcatgggatctaggaaccaacttctttctcagtgaagatgatgttgttaataagagaaacagggctgaagctgtacttaaacatattgcagaactaaatccatacgttcatgtcacatcatcttctgttcctttcaatgagaccacagatctctcctttttagataaataccagtgtgtagtattgactgagatgaaacttccattgcagaagaagatcaatgacttttgccgttctcagtgccctccaattaagtttatcagtgcagatgtacatggaatttggtcaaggttattttgtgatttcggtgatgaatttgaagttttagatacaacaggagaagaaccaaaagaaattttcatttcaaacataacgcaagcaaatcctggcattgttacttgccttgaaaatcatcctcacaaactggagacaggacaattcctaacatttcgagaaattaatggaatgacaggtttaaatggatctatacaacaaataacggtgatatcgccattttcttttagtattggtgacaccacagaactggaaccatatttacatggaggcatagctgtccaagttaagactcctaaaacagttttttttgaatcactggagaggcagttaaaacatccaaagtgccttattgtggattttagcaaccctgaggcacctttagagattcacacagctatgcttgccttggaccagtttcaggagaaatacagtcgcaagccaaatgttggatgccaacaagattcagaagaactgttgaaactagcaacatctataagtgaaaccttggaagagaagcctgatgtaaatgctgacattgtgcattggctctcttggactgcccaaggctttttatctccacttgctgcagcagtaggaggtgttgccagccaagaagtattgaaagctgtaacaggaaaattttctcctttgtgccagtggttatatcttgaagcagcagatattgttgaatcactaggcaaacctgaatgtgaagaatttctcccacgaggagatagatatgatgccttaagagcttgcattggagacactttgtgtcagaaactgcaaaatttaaacatcttcttagtagggtgtggagccataggctgtgaaatgttgaaaaattttgctttacttggtgttggcacaagcaaagagaaaggaatgattacagttacagatcctgacttgatagagaaatccaacttaaatagacagttcctatttcgtcctcatcacatacagaaacctaaaagctacactgctgctgatgctactctgaaaataaattctcaaataaagatagatgcacacctgaacaaagtatgtccaaccactgagaccatttacaatgatgagttctatactaaacaagatgtaattattacagcattagataatgtggaagccaggagatacgtagacagtcgttgcttagcaaatctaaggcctcttttagattctggaacaatgggcactaagggacacactgaagttattgtaccgcatttgactgagtcttacaatagtcatcgggatcccccagaagaggaaataccattttgtactctaaaatcctttccagctgctattgaacacaccatacagtgggcaagagataagtttgaaagttccttttcccacaaaccttcattgtttaacaaattttggcaaacctattcatctgcagaagaagtcttacagaagatacagagtggacacagtttagaaggctgttttcaagttataaagttacttagcagaagacctagaaattggtcccagtgtgtagaattagcaagattaaagtttgaaaaatattttaaccataaggctcttcagcttcttcactgtttccctctggacatacgattaaaagatggcagtttattttggcagtcaccaaagaggccaccctctccaataaaatttgatttaaatgagcctttgcacctcagtttccttcagaatgctgcaaaactatatgctacagtatattgtattccatttgcagaagaggacttatcagcagatgccctcttgaatattctttcagaagtaaagattcaggaattcaagccttccaataaggttgttcaaacagatgaaactgcaaggaaaccagaccatgttcctattagcagtgaagatgagaggaatgcaattttccaactagaaaaggctattttatctaatgaagccaccaaaagtgaccttcagatggcagtgctttcatttgaaaaagatgatgatcataatggacacatagatttcatcacagctgcatcaaatcttcgtgccaaaatgtacagcattgaaccagctgaccgtttcaaaacaaagcgcatagctggtaaaattatacctgctatagcaacaaccactgctacagtttctggcttggttgccttggagatgatcaaagtaactggtggctatccatttgaagcttacaaaaattgttttcttaacttagccattccaattgtagtatttacagagacaactgaagtaaggaaaactaaaatcagaaatggaatatcatttacaatttgggatcgatggaccgtacatggaaaagaagatttcaccctcttggatttcataaatgcagtcaaagagaagtatggaattgagccaacaatggtggtacagggagtcaaaatgctttatgttcctgtaatgcctggtcatgcaaaaagattgaagttaacaatgcataaacttgtaaaacctactactgaaaagaaatatgtggatcttactgtgtcatttgctccagacattgatggagatgaagatttgccgggacctccagtaagatactacttcagtcatgacactgattaatacaagttgtcttaacgttactccaggaccacttgattttggaaagagtgcacttaattcagaagctaaagaaaatcagttcataatactatggatttctctttcattaagccttaattttaagggaaacatcagtaagaaactgcactgaagaattataaaacattttggggcatagcatacacttgtctaacggttcacacgtggctatgatcacaagcaactttgaactggaatgctatttacaaaagttttgtgtattaatctgtgtattaatctctctggataaaaagaaggaaaaaatatgtatgaccagaacagatatggatgaagaaattgaaagcaacgaatgcaactattcaaaaagtttaattttatgaatttcttttttgtttagtcttgaagactgattttctatgcaaatagtgtttggcatcctgcacctctgatatgatttggctttgagaatttaataccactgggaagaagtatggtagtggtggatgaagggtggatattttaaattgtgcagttacagtttactgtcctattacctctgctcgtttaaccagtttgttatatcactgtgtccccaaaatcaggatttttgttgatagcatcagtgttgtaggagcaataggtcagatgagacatattaacttagactaaacgtgaacagtattatatggactctcacaacgctcttagagaatccgtgaatgtgaacagacaaatgtggctaaccatttgattcttcagtatgccttctaatgtggctattttatttatgtgagactctaaacctgattgtcctaatatataaaactaaaagattttgtaaagggagtgtctttagaaatagatgaaatgtagaatgttaaaaattattgctagggtagtcttttttttccagaaacctaattagggtattaaattttgtgttttttttttttttttttttttaaacagaagcatgttatttcattcccattcccagaaagggagttaatgaagataaaaatttattttttaaggtctttattgagagaaactttgttttctgatatgaactattgcagatgtttttataaatactttcattaaaatgatgtaaacagtagtacccaacactgtaaactcagtgaaaatagtaaatgattcttttattactaagactgtcatgcattctgaagcagttggcttttttttaaccataggaagtcatttccctctagctcctttccttctactctcctgctcagaccattagtaggtactttgttaaataaaaaactagattaacatcaatattactccaatttggtatcttttacactatgtattatacctactttctttttatttcatttacaaatagtttaaattactttatcaaccagctgtattgtttccctcttgtaaaagtaccatcaagtggggaaaatgtatgtggaagtggagagtgaatttgtatgactaaaggataatctgtacatggggaagtgggcaaaagtggataggatgaatttaaagaaaatgactacctttggaaaaaagaaattaaattttgttcacatatcctaccctttcccattgtgcatatcccaagtgtcatatttaaaactaaggttacttaaaacagaatccaggaatatcaaggctctgtggcttggaattttagaggataggactaataaaaggacttttgcaaagaaggcttttttccacgttcactttgttttgtgttctttgaaagtaactgatacttttcgggtagttaattcagcagtccataaatatgatccagtaacttgcttatattttattgaagtctcgacagctcttcagaagtaaatttagaacgatgctgtcagttcatatttatagatattagtgttttagcagataaaacaaaatcaacaaaaattaagttcattttgtgattaaacctgcaaccatttttccattactttttttctatagttaatggttattgccatgatttcttctgtttggttctactaagctagaaagccagggtgaagttaatgataattcccattattttatttctgtaccatgagattgctgttgatgactgaaataccaggtgcaaaaattaatgatttgatttttgtacagtttcaatgagtattttttacttattaaaaataaattaagaaatgtaagaatatctttgtaaatcatgtttcataagttgactccagagattctgattttgctgtttattttgtgagtaatgttgctttggtgtttcctgattttcaagtttgcaatcatggagatacagcagttattaggtgtggaaggacattacctcaaatgtcctcagatggctccaggaaattcttttaaaacagttggagagaaatagtcgtgaccatgtaaaacctagaggatctggtaaatcccatactactggttagggatttgtaaagtccatttctttttagagttcaaagcagttctgttacttgtccataagttcctcataaattgtcccaaaggtaggacatggaaataaatgtatatctttattttttaatctactatgtcacactctggtgatattcatggaacattaaaaaagcaactatgtttattttataattagtaaaatgaagatagaaaattgttcttttgaaatttttagggaaaaaaaaaatctcgtgacctaaatctttccactataatgaatattcattgtgattgcaaatatctaattttatataatcactgtgtatggatttagcgattttacttttcatagattcaaaaacatataatctgaatgctttctctgaaaaaaaaaaaaatcagagttgagctcttgaggatcagagttaagtatccattgataatatgtgttcattttgctctatgtcataactttgtttttttattgagaaatatatatttttcaaaaacacatatatattcaaaaatacataaaatataaatatgcagttcaaggaataattttaaagcaactatataactagcactcagcttagtagaatatattgacagcagttcagaaattacacatgtagttccttcccagtcacaaccagctccctgccacgtaccctttggtaattaccactatcctaccttgtatgataatgtctctttgtttttatagtgttaccacctatgtgtgtaaacttaaacaatacagtttgcttgtttttgagttttatttaaaatcatacattcttttgtagctgcatttgttcaagatgggattgattcatgttggttgtagctgtactttattcttcattatgtctgtgtaatttacttttctgttaatatgccacaatttatttactgtagacaattgggatgtttttagtttcaggcaattacagtttcacaatgaacatcattttatgtaactcctagtacaaagagtatatatttaggagtagaattttttggtcatagggtattcatatcttaaattttattagatgattacaaatttttttctaagcattagta

SEQ ID NO: 307852 - DNA, 4926 bp, Homo sapiens
cggtcccgccccttcctaccttccagtagccggcggcggtgtctcaggcggcaatggaaggatccgagcctgtggccgcccatcagggggaagaggcgtcctgttcttcctgggggactggcagcacaaataaaaatttgcccattatgtcaacagcatctgtggaaatcgatgatgcattgtatagtcgacagaggtacgttcttggagacacagcaatgcagaagatggccaagtcccatgttttcttaagtgggatgggtggtcttggtttggaaattgcaaagaatcttgttcttgcagggattaaggcagttacaattcatgatacagaaaaatgccaagcatgggatctaggaaccaacttctttctcagtgaagatgatgttgttaataagagaaacagggctgaagctgtacttaaacatattgcagaactaaatccatacgttcatgtcacatcatcttctgttcctttcaatgagaccacagatctctcctttttagataaataccagtgtgtagtattgactgagatgaaacttccattgcagaagaagatcaatgacttttgccgttctcagtgccctccaattaagtttatcagtgcagatgtacatggaatttggtcaaggttattttgtgatttcggtgatgaatttgaagttttagatacaacaggagaagaaccaaaagaaattttcatttcaaacataacgcaagcaaatcctggcattgttacttgccttgaaaatcatcctcacaaactggagacaggacaattcctaacatttcgagaaattaatggaatgacaggtttaaatggatctatacaacaaataacggtgatatcgccattttcttttagtattggtgacaccacagaactggaaccatatttacatggaggcatagctgtccaagttaagactcctaaaacagttttttttgaatcactggagaggcagttaaaacatccaaagtgccttattgtggattttagcaaccctgaggcacctttagagattcacacagctatgcttgccttggaccagtttcaggagaaatacagtcgcaagccaaatgttggatgccaacaagattcagaagaactgttgaaactagcaacatctataagtgaaaccttggaagagaagcctgatgtaaatgctgacattgtgcattggctctcttggactgcccaaggctttttatctccacttgctgcagcagtaggaggtgttgccagccaagaagtattgaaagctgtaacaggaaaattttctcctttgtgccagtggttatatcttgaagcagcagatattgttgaatcactaggcaaacctgaatgtgaagaatttctcccacgaggagatagatatgatgccttaagagcttgcattggagacactttgtgtcagaaactgcaaaatttaaacatcttcttagtagggtgtggagccataggctgtgaaatgttgaaaaattttgctttacttggtgttggcacaagcaaagagaaaggaatgattacagttacagatcctgacttgatagagaaatccaacttaaatagacagttcctatttcgtcctcatcacatacagaaacctaaaagctacactgctgctgatgctactctgaaaataaattctcaaataaagatagatgcacacctgaacaaagtatgtccaaccactgagaccatttacaatgatgagttctatactaaacaagatgtaattattacagcattagataatgtggaagccaggagatacgtagacagtcgttgcttagcaaatctaaggcctcttttagattctggaacaatgggcactaagggacacactgaagttattgtaccgcatttgactgagtcttacaatagtcatcgggatcccccagaagaggaaataccattttgtactctaaaatcctttccagctgctattgaacacaccatacagtgggcaagagataagtttgaaagttccttttcccacaaaccttcattgtttaacaaattttggcaaacctattcatctgcagaagaagtcttacagaagatacagagtggacacagtttagaaggctgttttcaagttataaagttacttagcagaagacctagaaattggtcccagtgtgtagaattagcaagattaaagtttgaaaaatattttaaccataaggctcttcagcttcttcactgtttccctctggacatacgattaaaagatggcagtttattttggcagtcaccaaagaggccaccctctccaataaaatttgatttaaatgagcctttgcacctcagtttccttcagaatgctgcaaaactatatgctacagtatattgtattccatttgcagaagaggacttatcagcagatgccctcttgaatattctttcagaagtaaagattcaggaattcaagccttccaataaggttgttcaaacagatgaaactgcaaggaaaccagaccatgttcctattagcagtgaagatgagaggaatgcaattttccaactagaaaaggctattttatctaatgaagccaccaaaagtgaccttcagatggcagtgctttcatttgaaaaagatgatgatcataatggacacatagatttcatcacagctgcatcaaatcttcgtgccaaaatgtacagcattgaaccagctgaccgtttcaaaacaaagcgcatagctggtaaaattatacctgctatagcaacaaccactgctacagtttctggcttggttgccttggagatgatcaaagtaactggtggctatccatttgaagcttacaaaaattgttttcttaacttagccattccaattgtagtatttacagagacaactgaagtaaggaaaactaaaatcagaaatggaatatcatttacaatttgggatcgatggaccgtacatggaaaagaagatttcaccctcttggatttcataaatgcagtcaaagagaagtatggaattgagccaacaatggtggtacagggagtcaaaatgctttatgttcctgtaatgcctggtcatgcaaaaagattgaagttaacaatgcataaacttgtaaaacctactactgaaaagaaatatgtggatcttactgtgtcatttgctccagacattgatggagatgaagatttgccgggacctccagtaagatactacttcagtcatgacactgattaatacaagttgtcttaacgttactccaggaccacttgattttggaaagagtgcacttaattcagaagctaaagaaaatcagttcataatactatggatttctctttcattaagccttaattttaagggaaacatcagtaagaaactgcactgaagaattataaaacattttggggcatagcatacacttgtctaacggttcacacgtggctatgatcacaagcaactttgaactggaatgctatttacaaaagttttgtgtattaatctgtgtattaatctctctggataaaaagaaggaaaaaatatgtatgaccagaacagatatggatgaagaaattgaaagcaacgaatgcaactattcaaaaagtttaattttatgaatttcttttttgtttagtcttgaagactgattttctatgcaaatagtgtttggcatcctgcacctctgatatgatttggctttgagaatttaataccactgggaagaagtatggtagtggtggatgaagggtggatattttaaattgtgcagttacagtttactgtcctattacctctgctcgtttaaccagtttgttatatcactgtgtccccaaaatcaggatttttgttgatagcatcagtgttgtaggagcaataggtcagatgagacatattaacttagactaaacgtgaacagtattatatggactctcacaacgctcttagagaatccgtgaatgtgaacagacaaatgtggctaaccatttgattcttcagtatgccttctaatgtggctattttatttatgtgagactctaaacctgattgtcctaatatataaaactaaaagattttgtaaagggagtgtctttagaaatagatgaaatgtagaatgttaaaaattattgctagggtagtcttttttttccagaaacctaattagggtattaaattttgtgttttttttttttttttttttttaaacagaagcatgttatttcattcccattcccagaaagggagttaatgaagataaaaatttattttttaaggtctttattgagagaaactttgttttctgatatgaactattgcagatgtttttataaatactttcattaaaatgatgtaaacagtagtacccaacactgtaaactcagtgaaaatagtaaatgattcttttattactaagactgtcatgcattctgaagcagttggcttttttttaaccataggaagtcatttccctctagctcctttccttctactctcctgctcagaccattagtaggtactttgttaaataaaaaactagattaacatcaatattactccaatttggtatcttttacactatgtattatacctactttctttttatttcatttacaaatagtttaaattactttatcaaccagctgtattgtttccctcttgtaaaagtaccatcaagtggggaaaatgtatgtggaagtggagagtgaatttgtatgactaaaggataatctgtacatggggaagtgggcaaaagtggataggatgaatttaaagaaaatgactacctttggaaaaaagaaattaaattttgttcacatatcctaccctttcccattgtgcatatcccaagtgtcatatttaaaactaaggttacttaaaacagaatccaggaatatcaaggctctgtggcttggaattttagaggataggactaataaaaggacttttgcaaaga

SEQ ID NO: 307853 - DNA, 5400 bp, Homo sapiens
cggtcccgccccttcctaccttccagtagccggcggcggtgtctcaggcggcaatggaaggatccgagcctgtggccgcccatcagggggaagaggcgtcctgttcttcctgggggactggcagcacaaataaaaatttgcccattatgtcaacagcatctgtggaaatcgatgatgcattgtatagtcgacagaggtacgttcttggagacacagcaatgcagaagatggccaagtcccatgttttcttaagtgggatgggtggtcttggtttggaaattgcaaagaatcttgttcttgcagggattaaggcagttacaattcatgatacagaaaaatgccaagcatgggatctaggaaccaacttctttctcagtgaagatgatgttgttaataagagaaacagggctgaagctgtacttaaacatattgcagaactaaatccatacgttcatgtcacatcatcttctgttcctttcaatgagaccacagatctctcctttttagataaataccagtgtgtagtattgactgagatgaaacttccattgcagaagaagatcaatgacttttgccgttctcagtgccctccaattaagtttatcagtgcagatgtacatggaatttggtcaaggttattttgtgatttcggtgatgaatttgaagttttagatacaacaggagaagaaccaaaagaaattttcatttcaaacataacgcaagcaaatcctggcattgttacttgccttgaaaatcatcctcacaaactggagacaggacaattcctaacatttcgagaaattaatggaatgacaggtttaaatggatctatacaacaaataacggtgatatcgccattttcttttagtattggtgacaccacagaactggaaccatatttacatggaggcatagctgtccaagttaagactcctaaaacagttttttttgaatcactggagaggcagttaaaacatccaaagtgccttattgtggattttagcaaccctgaggcacctttagagattcacacagctatgcttgccttggaccagtttcaggagaaatacagtcgcaagccaaatgttggatgccaacaagattcagaagaactgttgaaactagcaacatctataagtgaaaccttggaagagaagcctgatgtaaatgctgacattgtgcattggctctcttggactgcccaaggctttttatctccacttgctgcagcagtaggaggtgttgccagccaagaagtattgaaagctgtaacaggaaaattttctcctttgtgccagtggttatatcttgaagcagcagatattgttgaatcactaggcaaacctgaatgtgaagaatttctcccacgaggagatagatatgatgccttaagagcttgcattggagacactttgtgtcagaaactgcaaaatttaaacatcttcttagtagggtgtggagccataggctgtgaaatgttgaaaaattttgctttacttggtgttggcacaagcaaagagaaaggaatgattacagttacagatcctgacttgatagagaaatccaacttaaatagacagttcctatttcgtcctcatcacatacagaaacctaaaagctacactgctgctgatgctactctgaaaataaattctcaaataaagatagatgcacacctgaacaaagtatgtccaaccactgagaccatttacaatgatgagttctatactaaacaagatgtaattattacagcattagataatgtggaagccaggagatacgtagacagtcgttgcttagcaaatctaaggcctcttttagattctggaacaatgggcactaagggacacactgaagttattgtaccgcatttgactgagtcttacaatagtcatcgggatcccccagaagaggaaataccattttgtactctaaaatcctttccagctgctattgaacacaccatacagtgggcaagagataagtttgaaagttccttttcccacaaaccttcattgtttaacaaattttggcaaacctattcatctgcagaagaagtcttacagaagatacagagtggacacagtttagaaggctgttttcaagttataaagttacttagcagaagacctagaaattggtcccagtgtgtagaattagcaagattaaagtttgaaaaatattttaaccataaggctcttcagcttcttcactgtttccctctggacatacgattaaaagatggcagtttattttggcagtcaccaaagaggccaccctctccaataaaatttgatttaaatgagcctttgcacctcagtttccttcagaatgctgcaaaactatatgctacagtatattgtattccatttgcagaagaggacttatcagcagatgccctcttgaatattctttcagaagtaaagattcaggaattcaagccttccaataaggttgttcaaacagatgaaactgcaaggaaaccagaccatgttcctattagcagtgaagatgagaggaatgcaattttccaactagaaaaggctattttatctaatgaagccaccaaaagtgaccttcagatggcagtgctttcatttgaaaaagatgatgatcataatggacacatagatttcatcacagctgcatcaaatcttcgtgccaaaatgtacagcattgaaccagctgaccgtttcaaaacaaagcgcatagctggtaaaattatacctgctatagcaacaaccactgctacagtttctggcttggttgccttggagatgatcaaagtaactggtggctatccatttgaagcttacaaaaattgttttcttaacttagccattccaattgtagtatttacagagacaactgaagtaaggaaaactaaaatcagaaatggaatatcatttacaatttgggatcgatggaccgtacatggaaaagaagatttcaccctcttggatttcataaatgcagtcaaagagaagtatggaattgagccaacaatggtggtacagggagtcaaaatgctttatgttcctgtaatgcctggtcatgcaaaaagattgaagttaacaatgcataaacttgtaaaacctactactgaaaagaaatatgtggatcttactgtgtcatttgctccagacattgatggagatgaagatttgccgggacctccagtaagatactacttcagtcatgacactgattaatacaagttgtcttaacgttactccaggaccacttgattttggaaagagtgcacttaattcagaagctaaagaaaatcagttcataatactatggatttctctttcattaagccttaattttaagggaaacatcagtaagaaactgcactgaagaattataaaacattttggggcatagcatacacttgtctaacggttcacacgtggctatgatcacaagcaactttgaactggaatgctatttacaaaagttttgtgtattaatctgtgtattaatctctctggataaaaagaaggaaaaaatatgtatgaccagaacagatatggatgaagaaattgaaagcaacgaatgcaactattcaaaaagtttaattttatgaatttcttttttgtttagtcttgaagactgattttctatgcaaatagtgtttggcatcctgcacctctgatatgatttggctttgagaatttaataccactgggaagaagtatggtagtggtggatgaagggtggatattttaaattgtgcagttacagtttactgtcctattacctctgctcgtttaaccagtttgttatatcactgtgtccccaaaatcaggatttttgttgatagcatcagtgttgtaggagcaataggtcagatgagacatattaacttagactaaacgtgaacagtattatatggactctcacaacgctcttagagaatccgtgaatgtgaacagacaaatgtggctaaccatttgattcttcagtatgccttctaatgtggctattttatttatgtgagactctaaacctgattgtcctaatatataaaactaaaagattttgtaaagggagtgtctttagaaatagatgaaatgtagaatgttaaaaattattgctagggtagtcttttttttccagaaacctaattagggtattaaattttgtgttttttttttttttttttttttaaacagaagcatgttatttcattcccattcccagaaagggagttaatgaagataaaaatttattttttaaggtctttattgagagaaactttgttttctgatatgaactattgcagatgtttttataaatactttcattaaaatgatgtaaacagtagtacccaacactgtaaactcagtgaaaatagtaaatgattcttttattactaagactgtcatgcattctgaagcagttggcttttttttaaccataggaagtcatttccctctagctcctttccttctactctcctgctcagaccattagtaggtactttgttaaataaaaaactagattaacatcaatattactccaatttggtatcttttacactatgtattatacctactttctttttatttcatttacaaatagtttaaattactttatcaaccagctgtattgtttccctcttgtaaaagtaccatcaagtggggaaaatgtatgtggaagtggagagtgaatttgtatgactaaaggataatctgtacatggggaagtgggcaaaagtggataggatgaatttaaagaaaatgactacctttggaaaaaagaaattaaattttgttcacatatcctaccctttcccattgtgcatatcccaagtgtcatatttaaaactaaggttacttaaaacagaatccaggaatatcaaggctctgtggcttggaattttagaggataggactaataaaaggacttttgcaaagaaggcttttttccacgttcactttgttttgtgttctttgaaagtaactgatacttttcgggtagttaattcagcagtccataaatatgatccagtaacttgcttatattttattgaagtctcgacagctcttcagaagtaaatttagaacgatgctgtcagttcatatttatagatattagtgttttagcagataaaacaaaatcaacaaaaattaagttcattttgtgattaaacctgcaaccatttttccattactttttttctatagttaatggttattgccatgatttcttctgtttggttctactaagctagaaagccagggtgaagttaatgataattcccattattttatttctgtaccatgagattgctgttgatgactgaaataccaggtgcaaaaattaatgatttgatttttgtacagtttcaatgagtattttttacttattaaaaataaattaagaaatgta

SEQ ID NO: 307854 - DNA, 6760 bp, Homo sapiens
cggtcccgccccttcctaccttccagtagccggcggcggtgtctcaggcggcaatggaaggatccgagcctgtggccgcccatcagggggaagaggcgtcctgttcttcctgggggactggcagcacaaataaaaatttgcccattatgtcaacagcatctgtggaaatcgatgatgcattgtatagtcgacagaggtacgttcttggagacacagcaatgcagaagatggccaagtcccatgttttcttaagtgggatgggtggtcttggtttggaaattgcaaagaatcttgttcttgcagggattaaggcagttacaattcatgatacagaaaaatgccaagcatgggatctaggaaccaacttctttctcagtgaagatgatgttgttaataagagaaacagggctgaagctgtacttaaacatattgcagaactaaatccatacgttcatgtcacatcatcttctgttcctttcaatgagaccacagatctctcctttttagataaataccagtgtgtagtattgactgagatgaaacttccattgcagaagaagatcaatgacttttgccgttctcagtgccctccaattaagtttatcagtgcagatgtacatggaatttggtcaaggttattttgtgatttcggtgatgaatttgaagttttagatacaacaggagaagaaccaaaagaaattttcatttcaaacataacgcaagcaaatcctggcattgttacttgccttgaaaatcatcctcacaaactggagacaggacaattcctaacatttcgagaaattaatggaatgacaggtttaaatggatctatacaacaaataacggtgatatcgccattttcttttagtattggtgacaccacagaactggaaccatatttacatggaggcatagctgtccaagttaagactcctaaaacagttttttttgaatcactggagaggcagttaaaacatccaaagtgccttattgtggattttagcaaccctgaggcacctttagagattcacacagctatgcttgccttggaccagtttcaggagaaatacagtcgcaagccaaatgttggatgccaacaagattcagaagaactgttgaaactagcaacatctataagtgaaaccttggaagagaagcctgatgtaaatgctgacattgtgcattggctctcttggactgcccaaggctttttatctccacttgctgcagcagtaggaggtgttgccagccaagaagtattgaaagctgtaacaggaaaattttctcctttgtgccagtggttatatcttgaagcagcagatattgttgaatcactaggcaaacctgaatgtgaagaatttctcccacgaggagatagatatgatgccttaagagcttgcattggagacactttgtgtcagaaactgcaaaatttaaacatcttcttagtagggtgtggagccataggctgtgaaatgttgaaaaattttgctttacttggtgttggcacaagcaaagagaaaggaatgccatattttcttgatattagattacagttacagatcctgacttgatagagaaatccaacttaaatagacagttcctatttcgtcctcatcacatacagaaacctaaaagctacactgctgctgatgctactctgaaaataaattctcaaataaagatagatgcacacctgaacaaagtatgtccaaccactgagaccatttacaatgatgagttctatactaaacaagatgtaattattacagcattagataatgtggaagccaggagatacgtagacagtcgttgcttagcaaatctaaggcctcttttagattctggaacaatgggcactaagggacacactgaagttattgtaccgcatttgactgagtcttacaatagtcatcgggatcccccagaagaggaaataccattttgtactctaaaatcctttccagctgctattgaacacaccatacagtgggcaagagataagtttgaaagttccttttcccacaaaccttcattgtttaacaaattttggcaaacctattcatctgcagaagaagtcttacagaagatacagagtggacacagtttagaaggctgttttcaagttataaagttacttagcagaagacctagaaattggtcccagtgtgtagaattagcaagattaaagtttgaaaaatattttaaccataaggctcttcagcttcttcactgtttccctctggacatacgattaaaagatggcagtttattttggcagtcaccaaagaggccaccctctccaataaaatttgatttaaatgagcctttgcacctcagtttccttcagaatgctgcaaaactatatgctacagtatattgtattccatttgcagaagaggacttatcagcagatgccctcttgaatattctttcagaagtaaagattcaggaattcaagccttccaataaggttgttcaaacagatgaaactgcaaggaaaccagaccatgttcctattagcagtgaagatgagaggaatgcaattttccaactagaaaaggctattttatctaatgaagccaccaaaagtgaccttcagatggcagtgctttcatttgaaaaagatgatgatcataatggacacatagatttcatcacagctgcatcaaatcttcgtgccaaaatgtacagcattgaaccagctgaccgtttcaaaacaaagcgcatagctggtaaaattatacctgctatagcaacaaccactgctacagtttctggcttggttgccttggagatgatcaaagtaactggtggctatccatttgaagcttacaaaaattgttttcttaacttagccattccaattgtagtatttacagagacaactgaagtaaggaaaactaaaatcagaaatggaatatcatttacaatttgggatcgatggaccgtacatggaaaagaagatttcaccctcttggatttcataaatgcagtcaaagagaagtatggaattgagccaacaatggtggtacagggagtcaaaatgctttatgttcctgtaatgcctggtcatgcaaaaagattgaagttaacaatgcataaacttgtaaaacctactactgaaaagaaatatgtggatcttactgtgtcatttgctccagacattgatggagatgaagatttgccgggacctccagtaagatactacttcagtcatgacactgattaatacaagttgtcttaacgttactccaggaccacttgattttggaaagagtgcacttaattcagaagctaaagaaaatcagttcataatactatggatttctctttcattaagccttaattttaagggaaacatcagtaagaaactgcactgaagaattataaaacattttggggcatagcatacacttgtctaacggttcacacgtggctatgatcacaagcaactttgaactggaatgctatttacaaaagttttgtgtattaatctgtgtattaatctctctggataaaaagaaggaaaaaatatgtatgaccagaacagatatggatgaagaaattgaaagcaacgaatgcaactattcaaaaagtttaattttatgaatttcttttttgtttagtcttgaagactgattttctatgcaaatagtgtttggcatcctgcacctctgatatgatttggctttgagaatttaataccactgggaagaagtatggtagtggtggatgaagggtggatattttaaattgtgcagttacagtttactgtcctattacctctgctcgtttaaccagtttgttatatcactgtgtccccaaaatcaggatttttgttgatagcatcagtgttgtaggagcaataggtcagatgagacatattaacttagactaaacgtgaacagtattatatggactctcacaacgctcttagagaatccgtgaatgtgaacagacaaatgtggctaaccatttgattcttcagtatgccttctaatgtggctattttatttatgtgagactctaaacctgattgtcctaatatataaaactaaaagattttgtaaagggagtgtctttagaaatagatgaaatgtagaatgttaaaaattattgctagggtagtcttttttttccagaaacctaattagggtattaaattttgtgttttttttttttttttttttttaaacagaagcatgttatttcattcccattcccagaaagggagttaatgaagataaaaatttattttttaaggtctttattgagagaaactttgttttctgatatgaactattgcagatgtttttataaatactttcattaaaatgatgtaaacagtagtacccaacactgtaaactcagtgaaaatagtaaatgattcttttattactaagactgtcatgcattctgaagcagttggcttttttttaaccataggaagtcatttccctctagctcctttccttctactctcctgctcagaccattagtaggtactttgttaaataaaaaactagattaacatcaatattactccaatttggtatcttttacactatgtattatacctactttctttttatttcatttacaaatagtttaaattactttatcaaccagctgtattgtttccctcttgtaaaagtaccatcaagtggggaaaatgtatgtggaagtggagagtgaatttgtatgactaaaggataatctgtacatggggaagtgggcaaaagtggataggatgaatttaaagaaaatgactacctttggaaaaaagaaattaaattttgttcacatatcctaccctttcccattgtgcatatcccaagtgtcatatttaaaactaaggttacttaaaacagaatccaggaatatcaaggctctgtggcttggaattttagaggataggactaataaaaggacttttgcaaagaaggcttttttccacgttcactttgttttgtgttctttgaaagtaactgatacttttcgggtagttaattcagcagtccataaatatgatccagtaacttgcttatattttattgaagtctcgacagctcttcagaagtaaatttagaacgatgctgtcagttcatatttatagatattagtgttttagcagataaaacaaaatcaacaaaaattaagttcattttgtgattaaacctgcaaccatttttccattactttttttctatagttaatggttattgccatgatttcttctgtttggttctactaagctagaaagccagggtgaagttaatgataattcccattattttatttctgtaccatgagattgctgttgatgactgaaataccaggtgcaaaaattaatgatttgatttttgtacagtttcaatgagtattttttacttattaaaaataaattaagaaatgtaagaatatctttgtaaatcatgtttcataagttgactccagagattctgattttgctgtttattttgtgagtaatgttgctttggtgtttcctgattttcaagtttgcaatcatggagatacagcagttattaggtgtggaaggacattacctcaaatgtcctcagatggctccaggaaattcttttaaaacagttggagagaaatagtcgtgaccatgtaaaacctagaggatctggtaaatcccatactactggttagggatttgtaaagtccatttctttttagagttcaaagcagttctgttacttgtccataagttcctcataaattgtcccaaaggtaggacatggaaataaatgtatatctttattttttaatctactatgtcacactctggtgatattcatggaacattaaaaaagcaactatgtttattttataattagtaaaatgaagatagaaaattgttcttttgaaatttttagggaaaaaaaaaatctcgtgacctaaatctttccactataatgaatattcattgtgattgcaaatatctaattttatataatcactgtgtatggatttagcgattttacttttcatagattcaaaaacatataatctgaatgctttctctgaaaaaaaaaaaaatcagagttgagctcttgaggatcagagttaagtatccattgataatatgtgttcattttgctctatgtcataactttgtttttttattgagaaatatatatttttcaaaaacacatatatattcaaaaatacataaaatataaatatgcagttcaaggaataattttaaagcaactatataactagcactcagcttagtagaatatattgacagcagttcagaaattacacatgtagttccttcccagtcacaaccagctccctgccacgtaccctttggtaattaccactatcctaccttgtatgataatgtctctttgtttttatagtgttaccacctatgtgtgtaaacttaaacaatacagtttgcttgtttttgagttttatttaaaatcatacattcttttgtagctgcatttgttcaagatgggattgattcatgttggttgtagctgtactttattcttcattatgtctgtgtaatttacttttctgttaatatgccacaatttatttactgtagacaattgggatgtttttagtttcaggcaattacagtttcacaatgaacatcattttatgtaactcctagtacaaagagtatatatttaggagtagaattttttggtcatagggtattcatatcttaaattttattagatgattacaaatttttttctaagcattagta

SEQ ID NO: 307855 - DNA, 4783 bp, Homo sapiens
cggtcccgccccttcctaccttccagtagccggcggcggtgtctcaggcggcaatggaaggatccgagcctgtggccgcccatcagggggaagaggcgtcctgttcttcctgggggactggcagcacaaataaaaatttgcccattatgtcaacagcatctgtggaaatcgatgatgcattgtatagtcgacagaggtacgttcttggagacacagcaatgcagaagatggccaagtcccatgttttcttaagtgggatgggtggtcttggtttggaaattgcaaagaatcttgttcttgcagggattaaggcagttacaattcatgatacagaaaaatgccaagcatgggatctaggaaccaacttctttctcagtgaagatgatgttgttaataagagaaacagggctgaagctgtacttaaacatattgcagaactaaatccatacgttcatgtcacatcatcttctgttcctttcaatgagaccacagatctctcctttttagataaataccagtgtgtagtattgactgagatgaaacttccattgcagaagaagatcaatgacttttgccgttctcagtgccctccaattaagtttatcagtgcagatgtacatggaatttggtcaaggttattttgtgatttcggtgatgaatttgaagttttagatacaacaggagaagaaccaaaagaaattttcatttcaaacataacgcaagcaaatcctggcattgttacttgccttgaaaatcatcctcacaaactggagacaggacaattcctaacatttcgagaaattaatggaatgacaggtttaaatggatctatacaacaaataacggtgatatcgccattttcttttagtattggtgacaccacagaactggaaccatatttacatggaggcatagctgtccaagttaagactcctaaaacagttttttttgaatcactggagaggcagttaaaacatccaaagtgccttattgtggattttagcaaccctgaggcacctttagagattcacacagctatgcttgccttggaccagtttcaggagaaatacagtcgcaagccaaatgttggatgccaacaagattcagaagaactgttgaaactagcaacatctataagtgaaaccttggaagagaagcctgatgtaaatgctgacattgtgcattggctctcttggactgcccaaggctttttatctccacttgctgcagcagtaggaggtgttgccagccaagaagtattgaaagctgtaacaggaaaattttctcctttgtgccagtggttatatcttgaagcagcagatattgttgaatcactaggcaaacctgaatgtgaagaatttctcccacgaggagatagatatgatgccttaagagcttgcattggagacactttgtgtcagaaactgcaaaatttaaacatcttcttagtagggtgtggagccataggctgtgaaatgttgaaaaattttgctttacttggtgttggcacaagcaaagagaaaggaatgattacagttacagatcctgacttgatagagaaatccaacttaaatagacagttcctatttcgtcctcatcacatacagaaacctaaaagctacactgctgctgatgctactctgaaaataaattctcaaataaagatagatgcacacctgaacaaagtatgtccaaccactgagaccatttacaatgatgagttctatactaaacaagatgtaattattacagcattagataatgtggaagccaggagatacgtagacagtcgttgcttagcaaatctaaggcctcttttagattctggaacaatgggcactaagggacacactgaagttattgtaccgcatttgactgagtcttacaatagtcatcgggatcccccagaagaggaaataccattttgtactctaaaatcctttccagctgctattgaacacaccatacagtgggcaagagataagtttgaaagttccttttcccacaaaccttcattgtttaacaaattttggcaaacctattcatctgcagaagaagtcttacagaagatacagagtggacacagtttagaaggctgttttcaagttataaagttacttagcagaagacctagaaattggtcccagtgtgtagaattagcaagattaaagtttgaaaaatattttaaccataaggctcttcagcttcttcactgtttccctctggacatacgattaaaagatggcagtttattttggcagtcaccaaagaggccaccctctccaataaaatttgatttaaatgagcctttgcacctcagtttccttcagaatgctgcaaaactatatgctacagtatattgtattccatttgcagaagaggacttatcagcagatgccctcttgaatattctttcagaagtaaagattcaggaattcaagccttccaataaggttgttcaaacagatgaaactgcaaggaaaccagaccatgttcctattagcagtgaagatgagaggaatgcaattttccaactagaaaaggctattttatctaatgaagccaccaaaagtgaccttcagatggcagtgctttcatttgaaaaagatgatgatcataatggacacatagatttcatcacagctgcatcaaatcttcgtgccaaaatgtacagcattgaaccagctgaccgtttcaaaacaaagcgcatagctggtaaaattatacctgctatagcaacaaccactgctacagtttctggcttggttgccttggagatgatcaaagtaactggtggctatccatttgaagcttacaaaaattgttttcttaacttagccattccaattgtagtatttacagagacaactgaagtaaggaaaactaaaatcagaaatggaatatcatttacaatttgggatcgatggaccgtacatggaaaagaagatttcaccctcttggatttcataaatgcagtcaaagagaagtatggaattgagccaacaatggtggtacagggagtcaaaatgctttatgttcctgtaatgcctggtcatgcaaaaagattgaagttaacaatgcataaacttgtaaaacctactactgaaaagaaatatgtggatcttactgtgtcatttgctccagacattgatggagatgaagatttgccgggacctccagtaagatactacttcagtcatgacactgattaatacaagttgtcttaacgttactccaggaccacttgattttggaaagagtgcacttaattcagaagctaaagaaaatcagttcataatactatggatttctctttcattaagccttaattttaagggaaacatcagtaagaaactgcactgaagaattataaaacattttggggcatagcatacacttgtctaacggttcacacgtggctatgatcacaagcaactttgaactggaatgctatttacaaaagttttgtgtattaatctgtgtattaatctctctggataaaaagaaggaaaaaatatgtatgaccagaacagatatggatgaagaaattgaaagcaacgaatgcaactattcaaaaagtttaattttatgaatttcttttttgtttagtcttgaagactgattttctatgcaaatagtgtttggcatcctgcacctctgatatgatttggctttgagaatttaataccactgggaagaagtatggtagtggtggatgaagggtggatattttaaattgtgcagttacagtttactgtcctattacctctgctcgtttaaccagtttgttatatcactgtgtccccaaaatcaggatttttgttgatagcatcagtgttgtaggagcaataggtcagatgagacatattaacttagactaaacgtgaacagtattatatggactctcacaacgctcttagagaatccgtgaatgtgaacagacaaatgtggctaaccatttgattcttcagtatgccttctaatgtggctattttatttatgtgagactctaaacctgattgtcctaatatataaaactaaaagattttgtaaagggagtgtctttagaaatagatgaaatgtagaatgttaaaaattattgctagggtagtcttttttttccagaaacctaattagggtattaaattttgtgttttttttttttttttttttttaaacagaagcatgttatttcattcccattcccagaaagggagttaatgaagataaaaatttattttttaaggtctttattgagagaaactttgttttctgatatgaactattgcagatgtttttataaatactttcattaaaatgatgtaaacagtagtacccaacactgtaaactcagtgaaaatagtaaatgattcttttattactaagactgtcatgcattctgaagcagttggcttttttttaaccataggaagtcatttccctctagctcctttccttctactctcctgctcagaccattagtaggtactttgttaaataaaaaactagattaacatcaatattactccaatttggtatcttttacactatgtattatacctactttctttttatttcatttacaaatagtttaaattactttatcaaccagctgtattgtttccctcttgtaaaagtaccatcaagtggggaaaatgtatgtggaagtggagagtgaatttgtatgactaaaggataatctgtacatggggaagtgggcaaaagtagtcattttctttaaattcatcctatccacttttgcccacttccccatgtacagatt

SEQ ID NO: 307856 - DNA, 5722 bp, Homo sapiens
gtttatggcagttgagaaaattaaagttagggtgttctgttttgagttgtagatgccaacaagattcagaagaactgttgaaactagcaacatctataagtgaaaccttggaagagaagcctgatgtaaatgctgacattgtgcattggctctcttggactgcccaaggctttttatctccacttgctgcagcagtaggaggtgttgccagccaagaagtattgaaagctgtaacaggaaaattttctcctttgtgccagtggttatatcttgaagcagcagatattgttgaatcactaggcaaacctgaatgtgaagaatttctcccacgaggagatagatatgatgccttaagagcttgcattggagacactttgtgtcagaaactgcaaaatttaaacatcttcttagtagggtgtggagccataggctgtgaaatgttgaaaaattttgctttacttggtgttggcacaagcaaagagaaaggaatgccatattttcttgatattagattacagttacagatcctgacttgatagagaaatccaacttaaatagacagttcctatttcgtcctcatcacatacagaaacctaaaagctacactgctgctgatgctactctgaaaataaattctcaaataaagatagatgcacacctgaacaaagtatgtccaaccactgagaccatttacaatgatgagttctatactaaacaagatgtaattattacagcattagataatgtggaagccaggagatacgtagacagtcgttgcttagcaaatctaaggcctcttttagattctggaacaatgggcactaagggacacactgaagttattgtaccgcatttgactgagtcttacaatagtcatcgggatcccccagaagaggaaataccattttgtactctaaaatcctttccagctgctattgaacacaccatacagtgggcaagagataagtttgaaagttccttttcccacaaaccttcattgtttaacaaattttggcaaacctattcatctgcagaagaagtcttacagaagatacagagtggacacagtttagaaggctgttttcaagttataaagttacttagcagaagacctagaaattggtcccagtgtgtagaattagcaagattaaagtttgaaaaatattttaaccataaggctcttcagcttcttcactgtttccctctggacatacgattaaaagatggcagtttattttggcagtcaccaaagaggccaccctctccaataaaatttgatttaaatgagcctttgcacctcagtttccttcagaatgctgcaaaactatatgctacagtatattgtattccatttgcagaagaggacttatcagcagatgccctcttgaatattctttcagaagtaaagattcaggaattcaagccttccaataaggttgttcaaacagatgaaactgcaaggaaaccagaccatgttcctattagcagtgaagatgagaggaatgcaattttccaactagaaaaggctattttatctaatgaagccaccaaaagtgaccttcagatggcagtgctttcatttgaaaaagatgatgatcataatggacacatagatttcatcacagctgcatcaaatcttcgtgccaaaatgtacagcattgaaccagctgaccgtttcaaaacaaagcgcatagctggtaaaattatacctgctatagcaacaaccactgctacagtttctggcttggttgccttggagatgatcaaagtaactggtggctatccatttgaagcttacaaaaattgttttcttaacttagccattccaattgtagtatttacagagacaactgaagtaaggaaaactaaaatcagaaatggaatatcatttacaatttgggatcgatggaccgtacatggaaaagaagatttcaccctcttggatttcataaatgcagtcaaagagaagtatggaattgagccaacaatggtggtacagggagtcaaaatgctttatgttcctgtaatgcctggtcatgcaaaaagattgaagttaacaatgcataaacttgtaaaacctactactgaaaagaaatatgtggatcttactgtgtcatttgctccagacattgatggagatgaagatttgccgggacctccagtaagatactacttcagtcatgacactgattaatacaagttgtcttaacgttactccaggaccacttgattttggaaagagtgcacttaattcagaagctaaagaaaatcagttcataatactatggatttctctttcattaagccttaattttaagggaaacatcagtaagaaactgcactgaagaattataaaacattttggggcatagcatacacttgtctaacggttcacacgtggctatgatcacaagcaactttgaactggaatgctatttacaaaagttttgtgtattaatctgtgtattaatctctctggataaaaagaaggaaaaaatatgtatgaccagaacagatatggatgaagaaattgaaagcaacgaatgcaactattcaaaaagtttaattttatgaatttcttttttgtttagtcttgaagactgattttctatgcaaatagtgtttggcatcctgcacctctgatatgatttggctttgagaatttaataccactgggaagaagtatggtagtggtggatgaagggtggatattttaaattgtgcagttacagtttactgtcctattacctctgctcgtttaaccagtttgttatatcactgtgtccccaaaatcaggatttttgttgatagcatcagtgttgtaggagcaataggtcagatgagacatattaacttagactaaacgtgaacagtattatatggactctcacaacgctcttagagaatccgtgaatgtgaacagacaaatgtggctaaccatttgattcttcagtatgccttctaatgtggctattttatttatgtgagactctaaacctgattgtcctaatatataaaactaaaagattttgtaaagggagtgtctttagaaatagatgaaatgtagaatgttaaaaattattgctagggtagtcttttttttccagaaacctaattagggtattaaattttgtgttttttttttttttttttttttaaacagaagcatgttatttcattcccattcccagaaagggagttaatgaagataaaaatttattttttaaggtctttattgagagaaactttgttttctgatatgaactattgcagatgtttttataaatactttcattaaaatgatgtaaacagtagtacccaacactgtaaactcagtgaaaatagtaaatgattcttttattactaagactgtcatgcattctgaagcagttggcttttttttaaccataggaagtcatttccctctagctcctttccttctactctcctgctcagaccattagtaggtactttgttaaataaaaaactagattaacatcaatattactccaatttggtatcttttacactatgtattatacctactttctttttatttcatttacaaatagtttaaattactttatcaaccagctgtattgtttccctcttgtaaaagtaccatcaagtggggaaaatgtatgtggaagtggagagtgaatttgtatgactaaaggataatctgtacatggggaagtgggcaaaagtggataggatgaatttaaagaaaatgactacctttggaaaaaagaaattaaattttgttcacatatcctaccctttcccattgtgcatatcccaagtgtcatatttaaaactaaggttacttaaaacagaatccaggaatatcaaggctctgtggcttggaattttagaggataggactaataaaaggacttttgcaaagaaggcttttttccacgttcactttgttttgtgttctttgaaagtaactgatacttttcgggtagttaattcagcagtccataaatatgatccagtaacttgcttatattttattgaagtctcgacagctcttcagaagtaaatttagaacgatgctgtcagttcatatttatagatattagtgttttagcagataaaacaaaatcaacaaaaattaagttcattttgtgattaaacctgcaaccatttttccattactttttttctatagttaatggttattgccatgatttcttctgtttggttctactaagctagaaagccagggtgaagttaatgataattcccattattttatttctgtaccatgagattgctgttgatgactgaaataccaggtgcaaaaattaatgatttgatttttgtacagtttcaatgagtattttttacttattaaaaataaattaagaaatgtaagaatatctttgtaaatcatgtttcataagttgactccagagattctgattttgctgtttattttgtgagtaatgttgctttggtgtttcctgattttcaagtttgcaatcatggagatacagcagttattaggtgtggaaggacattacctcaaatgtcctcagatggctccaggaaattcttttaaaacagttggagagaaatagtcgtgaccatgtaaaacctagaggatctggtaaatcccatactactggttagggatttgtaaagtccatttctttttagagttcaaagcagttctgttacttgtccataagttcctcataaattgtcccaaaggtaggacatggaaataaatgtatatctttattttttaatctactatgtcacactctggtgatattcatggaacattaaaaaagcaactatgtttattttataattagtaaaatgaagatagaaaattgttcttttgaaatttttagggaaaaaaaaaatctcgtgacctaaatctttccactataatgaatattcattgtgattgcaaatatctaattttatataatcactgtgtatggatttagcgattttacttttcatagattcaaaaacatataatctgaatgctttctctgaaaaaaaaaaaaatcagagttgagctcttgaggatcagagttaagtatccattgataatatgtgttcattttgctctatgtcataactttgtttttttattgagaaatatatatttttcaaaaacacatatatattcaaaaatacataaaatataaatatgcagttcaaggaataattttaaagcaactatataactagcactcagcttagtagaatatattgacagcagttcagaaattacacatgtagttccttcccagtcacaaccagctccctgccacgtaccctttggtaattaccactatcctaccttgtatgataatgtctctttgtttttatagtgttaccacctatgtgtgtaaacttaaacaatacagtttgcttgtttttgagttttatttaaaatcatacattcttttgtagctgcatttgttcaagatgggattgattcatgttggttgtagctgtactttattcttcattatgtctgtgtaatttacttttctgttaatatgccacaatttatttactgtagacaattgggatgtttttagtttcaggcaattacagtttcacaatgaacatcattttatgtaactcctagtacaaagagtatatatttaggagtagaattttttggtcatagggtattcatatcttaaattttattagatgattacaaatttttttctaagcattagta

SEQ ID NO: 307857 - DNA, 6686 bp, Homo sapiens
cggtcccgccccttcctaccttccagtagccggcggcggtgtctcaggcggcaatggaaggatccgagcctgtggccgcccatcagggggaagaggcgtcctgttcttcctgggggactggcagcacaaataaaaatttgcccattatgtcaacagcatctgtggaaatcgatgatgcattgtatagtcgacagaggtacgttcttggagacacagcaatgcagaagatggccaagtcccatgttttcttaagtgggatgggtggtcttggtttggaaattgcaaagaatcttgttcttgcagggattaaggcagttacaattcatgatacagaaaaatgccaagcatgggatctaggaaccaacttctttctcagtgaagatgatgttgttaataagagaaacagggctgaagctgtacttaaacatattgcagaactaaatccatacgttcatgtcacatcatcttctgttcctttcaatgagaccacagatctctcctttttagataaataccagtgtgtagtattgactgagatgaaacttccattgcagaagaagatcaatgacttttgccgttctcagtgccctccaattaagtttatcagtgcagatgtacatggaatttggtcaaggttattttgtgatttcggtgatgaatttgaagttttagatacaacaggagaagaaccaaaagaaattttcatttcaaacataacgcaagcaaatcctggcattgttacttgccttgaaaatcatcctcacaaactggagacaggacaattcctaacatttcgagaaattaatggaatgacaggtttaaatggatctatacaacaaataacggtgatatcgccattttcttttagtattggtgacaccacagaactggaaccatatttacatggaggcatagctgtccaagttaagactcctaaaacagttttttttgaatcactggagaggcagttaaaacatccaaagtgccttattgtggattttagcaaccctgaggcacctttagagattcacacagctatgcttgccttggaccagtttcaggagaaatacagtcgcaagccaaatgttggatgccaacaagattcagaagaactgttgaaactagcaacatctataagtgaaaccttggaagagaagcctgatgtaaatgctgacattgtgcattggctctcttggactgcccaaggctttttatctccacttgctgcagcagtaggaggtgttgccagccaagaagtattgaaagctgtaacaggaaaattttctcctttgtgccagtggttatatcttgaagcagcagatattgttgaatcactaggcaaacctgaatgtgaagaatttctcccacgaggagatagatatgatgccttaagagcttgcattggagacactttgtgtcagaaactgcaaaatttaaacatcttcttagtagggtgtggagccataggctgtgaaatgttgaaaaattttgctttacttggtgttggcacaagcaaagagaaaggaatgattacagttacagatcctgacttgatagagaaatccaacttaaatagacagttcctatttcgtcctcatcacatacagaaacctaaaagctacactgctgctgatgctactctgaaaataaattctcaaataaagatagatgcacacctgaacaaagtatgtccaaccactgagaccatttacaatgatgagttctatactaaacaagatgtaattattacagcattagataatgtggaagccaggagatacgtagacagtcgttgcttagcaaatctaaggcctcttttagattctggaacaatgggcactaagggacacactgaagttattgtaccgcatttgactgagtcttacaatagtcatcgggatcccccagaagaggaaataccattttgtactctaaaatcctttccagctgctattgaacacaccatacagtgggcaagagataagtttgaaagttccttttcccacaaaccttcattgtttaacaaattttggcaaacctattcatctgcagaagaagtcttacagaagatacagagtggacacagtttagaaggctgttttcaagttataaagttacttagcagaagacctagaaattggtcccagtgtgtagaattagcaagattaaagtttgaaaaatattttaaccataaggctcttcagcttcttcactgtttccctctggacatacgattaaaagatggcagtttattttggcagtcaccaaagaggccaccctctccaataaaatttgatttaaatgagcctttgcacctcagtttccttcagaatgctgcaaaactatatgctacagtatattgtattccatttgcagaagaggacttatcagcagatgccctcttgaatattctttcagaagtaaagattcaggaattcaagccttccaataaggttgttcaaacagatgaaactgcaaggaaaccagaccatgttcctattagcagtgaagatgagaggaatgcaattttccaactagaaaaggctattttatctaatgaagccaccaaaagtgaccttcagatggcagtgctttcatttgaaaaagatgatgatcataatggacacatagatttcatcacagctgcatcaaatcttcgtgccaaaatgtacagcattgaaccagctgaccgtttcaaaacaaagcgcatagctggtaaaattatacctgctatagcaacaaccactgctacagtttctggcttggttgccttggagatgatcaaagtaactggtggctatccatttgaagcttacaaaaattgttttcttaacttagccattccaattgtagtatttacagagacaactgaagtaaggaaaactaaaatcagaaatggaatatcatttacaatttgggatcgatggaccgtacatggaaaagaagatttcaccctcttggatttcataaatgcagtcaaagagaagtatggaattgagccaacaatggtggtacagggagtcaaaatgctttatgttcctgtaatgcctggtcatgcaaaaagattgaagttaacaatgcataaacttgtaaaacctactactgaaaagaaatatgtggatcttactgtgtcatttgctccagacattgatggagatgaagatttgccgggacctccagtaagatactacttcagtcatgacactgattaatacaagttgtcttaacgttactccaggaccacttgattttggaaagagtgcacttaattcagaagctaaagaaaatcagttcataatactatggatttctctttcattaagccttaattttaagggaaacatcagtaagaaactgcactgaagaattataaaacattttggggcatagcatacacttgtctaacggttcacacgtggctatgatcacaagcaactttgaactggaatgctatttacaaaagttttgtgtattaatctgtgtattaatctctctggataaaaagaaggaaaaaatatgtatgaccagaacagatatggatgaagaaattgaaagcaacgaatgcaactattcaaaaagtttaattttatgaatttcttttttgtttagtcttgaagactgattttctatgcaaatagtgtttggcatcctgcacctctgatatgatttggctttgagaatttaataccactgggaagaagtatggtagtggtggatgaagggtggatattttaaattgtgcagttacagtttactgtcctattacctctgctcgtttaaccagtttgttatatcactgtgtccccaaacatattaacttagactaaacgtgaacagtattatatggactctcacaacgctcttagagaatccgtgaatgtgaacagacaaatgtggctaaccatttgattcttcagtatgccttctaatgtggctattttatttatgtgagactctaaacctgattgtcctaatatataaaactaaaagattttgtaaagggagtgtctttagaaatagatgaaatgtagaatgttaaaaattattgctagggtagtcttttttttccagaaacctaattagggtattaaattttgtgttttttttttttttttttttttaaacagaagcatgttatttcattcccattcccagaaagggagttaatgaagataaaaatttattttttaaggtctttattgagagaaactttgttttctgatatgaactattgcagatgtttttataaatactttcattaaaatgatgtaaacagtagtacccaacactgtaaactcagtgaaaatagtaaatgattcttttattactaagactgtcatgcattctgaagcagttggcttttttttaaccataggaagtcatttccctctagctcctttccttctactctcctgctcagaccattagtaggtactttgttaaataaaaaactagattaacatcaatattactccaatttggtatcttttacactatgtattatacctactttctttttatttcatttacaaatagtttaaattactttatcaaccagctgtattgtttccctcttgtaaaagtaccatcaagtggggaaaatgtatgtggaagtggagagtgaatttgtatgactaaaggataatctgtacatggggaagtgggcaaaagtggataggatgaatttaaagaaaatgactacctttggaaaaaagaaattaaattttgttcacatatcctaccctttcccattgtgcatatcccaagtgtcatatttaaaactaaggttacttaaaacagaatccaggaatatcaaggctctgtggcttggaattttagaggataggactaataaaaggacttttgcaaagaaggcttttttccacgttcactttgttttgtgttctttgaaagtaactgatacttttcgggtagttaattcagcagtccataaatatgatccagtaacttgcttatattttattgaagtctcgacagctcttcagaagtaaatttagaacgatgctgtcagttcatatttatagatattagtgttttagcagataaaacaaaatcaacaaaaattaagttcattttgtgattaaacctgcaaccatttttccattactttttttctatagttaatggttattgccatgatttcttctgtttggttctactaagctagaaagccagggtgaagttaatgataattcccattattttatttctgtaccatgagattgctgttgatgactgaaataccaggtgcaaaaattaatgatttgatttttgtacagtttcaatgagtattttttacttattaaaaataaattaagaaatgtaagaatatctttgtaaatcatgtttcataagttgactccagagattctgattttgctgtttattttgtgagtaatgttgctttggtgtttcctgattttcaagtttgcaatcatggagatacagcagttattaggtgtggaaggacattacctcaaatgtcctcagatggctccaggaaattcttttaaaacagttggagagaaatagtcgtgaccatgtaaaacctagaggatctggtaaatcccatactactggttagggatttgtaaagtccatttctttttagagttcaaagcagttctgttacttgtccataagttcctcataaattgtcccaaaggtaggacatggaaataaatgtatatctttattttttaatctactatgtcacactctggtgatattcatggaacattaaaaaagcaactatgtttattttataattagtaaaatgaagatagaaaattgttcttttgaaatttttagggaaaaaaaaaatctcgtgacctaaatctttccactataatgaatattcattgtgattgcaaatatctaattttatataatcactgtgtatggatttagcgattttacttttcatagattcaaaaacatataatctgaatgctttctctgaaaaaaaaaaaaatcagagttgagctcttgaggatcagagttaagtatccattgataatatgtgttcattttgctctatgtcataactttgtttttttattgagaaatatatatttttcaaaaacacatatatattcaaaaatacataaaatataaatatgcagttcaaggaataattttaaagcaactatataactagcactcagcttagtagaatatattgacagcagttcagaaattacacatgtagttccttcccagtcacaaccagctccctgccacgtaccctttggtaattaccactatcctaccttgtatgataatgtctctttgtttttatagtgttaccacctatgtgtgtaaacttaaacaatacagtttgcttgtttttgagttttatttaaaatcatacattcttttgtagctgcatttgttcaagatgggattgattcatgttggttgtagctgtactttattcttcattatgtctgtgtaatttacttttctgttaatatgccacaatttatttactgtagacaattgggatgtttttagtttcaggcaattacagtttcacaatgaacatcattttatgtaactcctagtacaaagagtatatatttaggagtagaattttttggtcatagggtattcatatcttaaattttattagatgattacaaatttttttctaagcattagta

SEQ ID NO: 307858 - DNA, 2836 bp, Homo sapiens
cggtcccgccccttcctaccttccagtagccggcggcggtgtctcaggcggcaatggaaggatccgagcctgtggccgcccatcagggggaagaggcgtcctgttcttcctgggggactggcagcacaaataaaaatttgcccattatgtcaacagcatctgtggaaatcgatgatgcattgtatagtcgacagaggtacgttcttggagacacagcaatgcagaagatggccaagtcccatgttttcttaagtgggatgggtggtcttggtttggaaattggtaagcaatatttatattcctaatttttgacacttttgagcaatgaagatagtttaaataacttaacttcatccccttatatttcctataaaggaagttagatccaaaatgttgatcagattgagtttttaatctttgtcaagactatttcgtgatgttatattcttccacaaagaaccaataatgactcattgcttctttttgtgatgttaatagccattaattatcattctctatatccattaattcattataagcacacatacatatactgtattcataaaaacatatctggaagaatacgttgaaattttaggagtgattatctctgggtgttgtgattatgcacattttaattttttcacttttaacctgtattttgtaacttttttaagacaaggaacttgtattaagtagtaaaaaaagaagttaaaagtatgcagtcagatatgtgactaagctctgtgaagacatatctagtgtgtattcccaatattgagctattcctttttcttttgcctttctagcaaagaatcttgttcttgcagggattaaggtaagtaaatgtcctctgtaagaaaaattgttatgagccttttttttggctcatttgttatggtaatattgtttatactttgttttaattattgtctttaatgctctactttttaaaaaaaatcatggaaatttaaaaaatatacaaagaaagaattgtgtaacaaaaccccacatacccatcagaaagcatcagttaccaactcttggggacatttgtttcatatatcttcttcccattccttattgcccccaactgccaaattattttgatgtaaatttcagacattgtattatatcatccttaaatattttagtagtatctttaaaagataagaatatcttttgaagcagcaatataattttcacacctaaaatgtaacaagctcttaataccattgtattagtttacatgttgctataaaacagtttaccccaaaatttgtagcttaagcaacatttgttgtctcatagtttctgtgagtcaggattcgggcatgactctggttggggtttctctgggagtctcttacaaggctgcagtcaaggtattagcagggcctgcagtcatcttgaggctagactggggaaggatctgcttcccaagctggctcatgtggttcttggtaggatttagttcttcatgtattgttaaactgaggacctcagttcctgctggctcttgaccaaaggtcaccctcaattccttgcttgtatggctttctccatagggcagttcacagtgtggcagtttgcttcatcagagtaaacaagtaagacaggagaagagagtgtgttaacaagacaagtcagtcttttgtaacctaatctcagaagtgggtccaggccacactcaaggtgggagatcacacgaaagcctaaatactatgaagcaggaaacattgtggccatcttaaaagcctgtctaccacagtcatcaaatgtctagttagagttcaaattttcccaaatgtcttaagacattttattgaaagcttgtatcattctaatcaggatccaagtaaaattcgtatactgaacttggtttattttaatctatagatttcccttccttgcctaggttttttcttgcaatttatttgttgaagaaactagtcatttgtcacaggtatttctacatgtgtatttcctgtaaactggtagttatagccagagaatccagttcagatttgattctttttggcaagactgtttcatagctgttctcccatcaggagacagtaatattctgttgtctctctttttgtgattattattagctgttaattattattgcctagattcattatttcattaggggcagtgatgatgttttatcattcttttctcatttattagctggaattatattttagaaaaaaattccagtcatgactttcttggtttcacgaaagtatggattgtacatttacaaaatgcaggataaatactacatttttccccattaacttaccagttttcaaaatcagtggtttcctgtcatcatttcgtagtattgaccagtgaatttatatgtatgtgtacattatgataaactcatggatttaaacataatttgatgtgttttgatctattatagttattttcattgatgctcagattgttccatctttggttattgtggttctcttcctgttttttgaggctttgagacacagcccccagtagtctttgtcgctgtttacaaagtcttttcagtgggcagagctagaacgttcgtaatgagtaaatactgaaatttctgattttcaggtttaggcttataaagtattactaaaatttctaatttttactttggattataggatatttatttctgtgattttatatttgtatcttattaggattttggtttctaatgatccattacgtgctttatcctatatatgctatatattctttatcctattatattttacttgtatggcatagtttcagaataccaattccaatattgttaataataatgtattattga

SEQ ID NO: 307859 - DNA, 1164 bp, Homo sapiens
cggtcccgccccttcctaccttccagtagccggcggcggtgtctcaggcggcaatggaaggatccgagcctgtggccgcccatcagggggaagaggcgtcctgttcttcctgggggactggcagcacaaataaaaatttgcccattatgtcaacagcatctgtggaaatcgatgatgcattgtatagtcgacagaggtacgttcttggagacacagcaatgcagaagatggccaagtcccatgttttcttaagtgggatgggtggtcttggtttggaaattgcaaagaatcttgttcttgcagggattaaggcagttacaattcatgatacagaaaaatgccaagcatgggatctaggaaccaacttctttctcagtgaagatgatgttgttaataagagaaacagggctgaagctgtacttaaacatattgcagaactaaatccatacgttcatgtcacatcatcttctgttcctttcaatgagaccacagatctctcctttttagataaataccagtgtgtagtattgactgagatgaaacttccattgcagaagaagatcaatgacttttgccgttctcagtgccctccaattaagtttatcagtgcagatgtacatggaatttggtcaaggttattttgtgatttcggtgatgaatttgaagttttagatacaacaggagaagaaccaaaagaaattttcatttcaaacataacgcaagcaaatcctggcattgttacttgccttgaaaatcatcctcacaaactggagacaggacaattcctaacatttcgagaaattaatggaatgacaggtttaaatggatctatacaacaaataacggtgatatcgccattttcttttagtattggtgacaccacagaactggaaccatatttacatggaggcatagctgtccaagttaagactcctaaaacagttttttttgaatcactggagaggcagttaaaacatccaaagtgccttattgtggattttagcaaccctgaggcacctttagagattcacacagctatgcttgccttggaccagtttcaggagaaatacagtcgcaagccaaatgttgggtaatgttttaagtttaaaaataagtattttcctttttataaaagtagtagttcagaaattataatttaaaaag

SEQ ID NO: 307860 - DNA, 437 bp, Homo sapiens
agttccccacactcctcccagctcttcattaaaaaaaaaaaaaaacaaacaaacaaaaaaaaacactatgctggaattctttaattttgtaaattagggataattaacctcttatgacaataagagttgaaatttaaatatctatatccctgtgtaatgattttttaaattttttgtcttctagtgatatcgccattttcttttagtattggtgacaccacagaactggaaccatatttacatggaggcatagctgtccaagttaagactcctaaaacagttttttttgtaagtatttttttttcggcttaaaaaacatttttttacagaaaaagaaaggcagaagagacaaataactactcagttaaccaaacagattaaatgtggaacagaatttgtttttatttttatttttttgtttgtacccactttgaggg

SEQ ID NO: 307861 - DNA, 936 bp, Homo sapiens
agcgctttcattttttctgctaccgtgactaagatggaagcgtttttggggtcgcggtccggactttgggcggggggtccggccccaggacagttttaccgcattccatccactcccgattccttcatggatccggcgtctgcactttacagaggtccaatcacgcggacccagaaccccatggtgaccgggacctcagtcctcggcgttaagttcgagggcggagtggtgattgccgcagacatgctgggatcctacggctccttggctcgtttccgcaacatctctcgcattatgcgagtcaacaacagtaccatgctgggtgcctctggcgactacgctgatttccagtatttgaagcaagttctcggccagatggtgattgatgaggagcttctgggagatggacacagctatagtcctagagctattcattcatggctgaccagggccatgtacagccggcgctcgaagatgaaccctttgtggaacaccatggtcatcggaggctatgctgatggagagagcttcctcggttatgtggacatgcttggtgtagcctatgaagccccttcgctggccactggttatggtgcatacttggctcagcctctgctgcgagaagttctggagaagcagccagtgctaagccagaccgaggcccgcgacttagtagaacgctgcatgcgagtgctgtactaccgagatgcccgttcttacaaccggtttcaaatcgccactgtcaccgaaaaaggtgttgaaatagagggaccattgtctacagagaccaactgggatattgcccacatgatcagtggctttgaatgaaatacagatgcattatccagaactgaagttgccctacttttaactttgaacttggctagttcaaagatagactcttcttttgtaaagtaaataaattcttcaaaatgc

SEQ ID NO: 307862 - DNA, 1047 bp, Homo sapiens
agcgctttcattttttctgctaccgtgactaagatggaagcgtttttggggtcgcggtccggactttgggcggggggtccggccccaggacagttttaccgcattccatccactcccgattccttcatggatccggcgtctgcactttacagaggtccaatcacgcggacccagaaccccatggtgaccgggacctcagtcctcggcgttaagttcgagggcggagtggtgattgccgcagacatgctgggatcctacggctccttggctcgtttccgcaacatctctcgcattatgcgagtcaacaacagtaccatgctgggtgcctctggcgactacgctgatttccagtatttgaagcaagttctcggccagatggtgattgatgaggagcttctgggagatggacacagctatagtcctagagctattcattcatggctgaccagggccatgtacagccggcgctcgaagatgaaccctttgtggaacaccatggtcatcggaggctatgctgatggagagagcttcctcggttatgtggacatgcttggtgtagcctatgaagccccttcgctggccactggttatggtgcatacttggctcagcctctgctgcgagaagttctggagaagcagccagtgctaagccagaccgaggcccgcgacttagtagaacgctgcatgcgagtgctgtactaccgagatgcccgttcttacaaccggtttcaaatcgccactgtcaccgaaaaaggtgttgaaatagagggaccattgtctacagagaccaactgggatattgcccacatgatcagtggctttgaatgaaatacagatgcattatccagaactgaagttgccctacttttaactttgaacttggctagttcaaagatagactcttcttttgtaaagtaaataaattcttcaaaatgcaaaaaaaaaaaataacacaaaaaaaacgccgggactctatgcggggaaaaagtaagggaagaaaagtccacactttgaagggaacgcgccaaggaagaaaacgcaaaaaaa

SEQ ID NO: 307863 - DNA, 942 bp, Homo sapiens
  misc_feature (32)..(32): n is a, c, g, or t
aaaccttacggctaggtacgaggcctgggtgntgctaagatggaagcgtttttggggtcgcggtccggactttgggcggggggtccggccccaggacagttttaccgcattccatccactcccgattccttcatggatccggcgtctgcactttacagaggtccaatcacgcggacccagaaccccatggtgaccgggacctcagtcctcggcgttaagttcgagggcggagtggtgattgccgcagacatgctgggatcctacggctccttggctcgtttccgcaacatctctcgcattatgcgagtcaacaacagtaccatgctgggtgcctctggcgactacgctgatttccagtatttgaagcaagttctcggccagatggtgattgatgaggagcttctgggagatggacacagctatagtcctagagctattcattcatggctgaccagggccatgtacagccggcgctcgaagatgaaccctttgtggaacaccatggtcatcggaggctatgctgatggagagagcttcctcggttatgtggacatgcttggtgtagcctatgaagccccttcgctggccactggttatggtgcatacttggctcagcctctgctgcgagaagttctggagaagcagccagtgctaagccagaccgaggcccgcgacttagtagaacgctgcatgcgagtgctgtactaccgagatgcccgttcttacaaccggtttcaaatcgccactgtcaccgaaaaaggtgttgaaatagagggaccattgtctacagagaccaactgggatattgcccacatgatcagtggctttgaatgaaatacagatgcattatccagaactgaagttgccctacttttaactttgaacttggctagttcaaagatagactcttcttttgtaaagtaaataaattcttcaaaatgc

SEQ ID NO: 307864 - DNA, 1076 bp, Homo sapiens
  misc_feature (32)..(32): n is a, c, g, or t
aaaccttacggctaggtacgaggcctgggtgntgctaagatggaagcgtttttggggtcgcggtccggactttgggcggggggtccggccccaggacagttttaccgcattccatccactcccgattccttcatggatccggcgtctgcactttacagaggtccaatcacgcggacccagaaccccatggtgaccgggacctcagtcctcggcgttaagttcgagggcggagtggtgattgccgcagacatgctgggatcctacggctccttggctcgtttccgcaacatctctcgcattatgcgagtcaacaacagtaccatgctgggtgcctctggcgactacgctgatttccagtatttgaagcaagttctcggccagatggtgattgatgaggagcttctgggagatggacacagctatagtcctagagctattcattcatggctgaccagggccatgtacagccggcgctcgaagatgaaccctttgtggaacaccatggtcatcggaggctatgctgatggagagagcttcctcggttatgtggacatgcttggtgtagcctatgaagccccttcgctggccactggttatggtgcatacttggctcagcctctgctgcgagaagttctggagaagcagccagtgctaagccagaccgaggcccgcgacttagtagaacgctgcatgcgagtgctgtactaccgagatgcccgttcttacaaccggtttcaaatcgccactgtcaccgaaaaaggtgttgaaatagagggaccattgtctacagagaccaactgggatattgcccacatgatcagtggctttgaatgaaatacagatgcattatccagaactgaagttgccctacttttaactttgaacttggctagttcaaagatagactcttcttttgtaaagtaaataaattcttcaaaatgccaaaaaacaaaacccctccccttctcttcctacctctctcctacttcatccctaacctcctcctctatacaaaataacctcggggggggcccgtgccccaatccccctgggggcgctttcacattcggggcgcg

SEQ ID NO: 307865 - DNA, 599 bp, Homo sapiens
  misc_feature (23)..(23): n is a, c, g, or t
ggctggtccaggcctacgggtanatgcacgtctggccgatggtgattgatgaggagcttctgggagatggacacagctatagtcctagagctattcattcatggctgaccagggccatgtacagccggcgctcgaagatgaaccctttgtggaacaccatggtcatcggaggctatgctgatggagagagcttcctcggttatgtggacatgcttggtgtagcctatgaagccccttcgctggccactggttatggtgcatacttggctcagcctctgctgcgagaagttctggagaagcagccagtgctaagccagaccgaggcccgcgacttagtagaacgctgcatgcgagtgctgtactaccgagatgcccgttcttacaaccggtttcaaatcgccactgtcaccgaaaaaggtgttgaaatagagggaccattgtctacagagaccaactgggatattgcccacatgatcagtggctttgaatgaaatacagatgcattatccagaactgaagttgccctacttttaactttgaacttggctagttcaaagatagactcttcttttgtaaagtaaataaattcttcaaaatgc

SEQ ID NO: 307866 - DNA, 877 bp, Homo sapiens
  misc_feature (13)..(14): n is a, c, g, or t
  misc_feature (16)..(16): n is a, c, g, or t
  misc_feature (26)..(26): n is a, c, g, or t
  misc_feature (97)..(97): n is a, c, g, or t
ggagctaccaagnntntgattcaaanaaaccgcgacgcgcgttatttaaaacaacgacgcagtactatacgtctaggtacagctggtgcaatcggangaggaataagatggaagcgtttttggggtcgcggtccggactttgggcggggggtccggccccaggacagttttaccgcattccatccactcccgattccttcatggatccggcgtctgcactttacagaggtccaatcacgcggacccagaaccccatggtgaccgggacctcagtcctcggcgttaagttcgagggcggagtggtgattgccgcagacatgctgggatcctacggctccttggctcgtttccgcaacatctctcgcattatgcgagtcaacaacagtaccatgctgggtgcctctggcgactacgctgatttccagtatttgaagcaagttctcggccagatggtgattgatgaggagcttctgggagatggacacagctatagtcctagagctattcattcatggctgaccagggccatgtacagccggcgctcgaagatgaaccctttgtggaacaccatggtcatcggaggctatgctgatggagagagcttcctcggttatgtggacatgcttggtgtagcctatgaagccccttcgctggccactggttatggtgcatacttggctcagcctctgctgcgagaagttctggagaagcagccagtgctaagccagaccgaggcccgcgacttagtagaacgctgcatgcgagtgctgtactaccgagatgcccgttcttacaaccggttcaacgccctgtccgaaagggtgcttggggcctgttccggcccgggtttccctttcgggtttgatctgcttccccg

SEQ ID NO: 307867 - DNA, 982 bp, Homo sapiens
  misc_feature (32)..(32): n is a, c, g, or t
  misc_feature (785)..(785): n is a, c, g, or t
  misc_feature (788)..(789): n is a, c, g, or t
aaaccttacggctaggtacgaggcctgggtgntgctcctcggcgttaagttcgagggcggagtggtgattgccgcagacatgctgggatcctacggctccttggctcgtttccgcaacatctctcgcattatgcgagtcaacaacagtaccatgctgggtgcctctggcgactacgctgatttccagtatttgaagcaagttctcggccagatggtgattgatgaggagcttctgggagatggacacagctatagtcctagagctattcattcatggctgaccagggccatgtacagccggcgctcgaagatgaaccctttgtggaacaccatggtcatcggaggctatgctgatggagagagcttcctcggttatgtggacatgcttggtgtagcctatgaagccccttcgctggccactggttatggtgcatacttggctcagcctctgctgcgagaagttctggagaagcagccagtgctaagccagaccgaggcccgcgacttagtagaacgctgcatgcgagtgctgtactaccgagatgcccgttcttacaaccggtttcaaatcgccactgtcaccgaaaaaggtgttgaaatagagggaccattgtctacagagaccaactgggatattgcccacatgatcagtggctttgaatgaaatacagatgcattatccagaactgaagttgccctacttttaactttgaacttggctagttcaaagatagactcttcttttgtaaagtaaataaattcttcaaaatgcaaaaaaaaagaanaanncacaaaaggacagccagctcgggcgccccactcgaggggggcggccgccaacacgggcgcaacgacaggggacccagcgacacacacaggacaccagacaaagaagagagacaaaaaggagaaacaaggaagaacacacaagaggagagacaaaaaacgcagaaagcggagaacacgagataaggaccgagaa

SEQ ID NO: 307868 - DNA, 1010 bp, Homo sapiens
  misc_feature (13)..(14): n is a, c, g, or t
  misc_feature (16)..(16): n is a, c, g, or t
  misc_feature (26)..(26): n is a, c, g, or t
  misc_feature (97)..(97): n is a, c, g, or t
ggagctaccaagnntntgattcaaanaaaccgcgacgcgcgttatttaaaacaacgacgcagtactatacgtctaggtacagctggtgcaatcggangaggaataagatggaagcgtttttggggtcgcggtccggactttgggcggggggtccggccccaggacagttttaccgcattccatccactcccgattccttcatggatccggcgtctgcactttacagaggtccaatcacgcggacccagaaccccatggtgaccgggacctcagtcctcggcgttaagttcgagggcggagtggtgattgccgcagacatgctgggatcctacggctccttggctcgtttccgcaacatctctcgcattatgcgagtcaacaacagtaccatgctgggtgcctctggcgactacgctgatttccagtatttgaagcaagttctcggccagatggtgattgatgaggagcttctgggagatggacacagctatagtcctagagctattcattcatggctgaccagggccatgtacagccggcgctcgaagatgaaccctttgtggaacaccatggtcatcggaggctatgctgatggagagagcttcctcggttatgtggacatgcttggtgtagcctatgaagccccttcgctggccactggttatggtgcatacttggctcagcctctgctgcgagaagttctggagaagcagccagtgctaagccagaccgaggcccgcgacttagtagaacgctgcatgcgagtgctgtactaccgagatgcccgttcttacaaccggtttcaaatcgccactgtcaccgaaaaaggtgttgaaatagagggaccattgtctacagagaccaactgggatattgcccacatgatcagtggctttgaatgaaatacagatgcattatccagaactgaagttgccctacttttaactttgaacttggctagttcaaagatagactcttcttttgtaaagtaaataaattcttcaaaatgc

SEQ ID NO: 307869 - DNA, 1146 bp, Homo sapiens
  misc_feature (949)..(949): n is a, c, g, or t
  misc_feature (952)..(953): n is a, c, g, or t
agcgctttcattttttctgctaccgtgactaagatggaagcgtttttggggtcgcggtccggactttgggcggggggtccggccccaggacagttttaccgcattccatccactcccgattccttcatggatccggcgtctgcactttacagaggtccaatcacgcggacccagaaccccatggtgaccgggacctcagtcctcggcgttaagttcgagggcggagtggtgattgccgcagacatgctgggatcctacggctccttggctcgtttccgcaacatctctcgcattatgcgagtcaacaacagtaccatgctgggtgcctctggcgactacgctgatttccagtatttgaagcaagttctcggccagatggtgattgatgaggagcttctgggagatggacacagctatagtcctagagctattcattcatggctgaccagggccatgtacagccggcgctcgaagatgaaccctttgtggaacaccatggtcatcggaggctatgctgatggagagagcttcctcggttatgtggacatgcttggtgtagcctatgaagccccttcgctggccactggttatggtgcatacttggctcagcctctgctgcgagaagttctggagaagcagccagtgctaagccagaccgaggcccgcgacttagtagaacgctgcatgcgagtgctgtactaccgagatgcccgttcttacaaccggtttcaaatcgccactgtcaccgaaaaaggtgttgaaatagagggaccattgtctacagagaccaactgggatattgcccacatgatcagtggctttgaatgaaatacagatgcattatccagaactgaagttgccctacttttaactttgaacttggctagttcaaagatagactcttcttttgtaaagtaaataaattcttcaaaatgcaaaaaaaaagaanaanncacaaaaggacagccagctcgggcgccccactcgaggggggcggccgccaacacgggcgcaacgacaggggacccagcgacacacacaggacaccagacaaagaagagagacaaaaaggagaaacaaggaagaacacacaagaggagagacaaaaaacgcagaaagcggagaacacgagataaggaccgagaa

SEQ ID NO: 307870 - DNA, 1033 bp, Homo sapiens
agcgctttcattttttctgctaccgtgactaagatggaagcgtttttggggtcgcggtccggactttgggcggggggtccggccccaggacagttttaccgcattccatccactcccgattccttcatggatccggcgtctgcactttacagaggtccaatcacgcggacccagaaccccatggtgaccgggacctcagtcctcggcgttaagttcgagggcggagtggtgattgccgcagacatgctgggatcctacggctccttggctcgtttccgcaacatctctcgcattatgcgagtcaacaacagtaccatgctgggtgcctctggcgactacgctgatttccagtatttgaagcaagttctcggccagatggtgattgatgaggagcttctgggagatggacacagctatagtcctagagctattcattcatggctgaccagggccatgtacagccggcgctcgaagatgaaccctttgtggaacaccatggtcatcggaggctatgctgatggagagagcttcctcggttatgtggacatgcttggtgtagcctatgaagccccttcgctggccactggttatggtgcatacttggctcagcctctgctgcgagaagttctggagaagcagccagtgctaagccagaccgaggcccgcgacttagtagaacgctgcatgcgagtgctgtactaccgagatgcccgttcttacaaccggtttcaaatcgccactgtcaccgaaaaaggtgttgaaatagagggaccattgtctacagagaccaactgggatattgcccacatgatcagtggctttgaatgaaatacagatgcattatccagaactgaagttgccctacttttaactttgaacttggctagttcaaagatagactcttcttttgtaaagtaaataaattcttcaaaatgcaaaaacacatacgcagacagaaaaacactttttggggcgcaccgcaccaagaaaaagcttttaaaacctcttgtttggggcggcggcccccgtagtt

SEQ ID NO: 307871 - DNA, 969 bp, Homo sapiens
agcgctttcattttttctgctaccgtgactaagatggaagcgtttttggggtcgcggtccggactttgggcggggggtccggccccaggacagttttaccgcattccatccactcccgattccttcatggatccggcgtctgcactttacagaggtccaatcacgcggacccagaaccccatggtgaccgggacctcagtcctcggcgttaagttcgagggcggagtggtgattgccgcagacatgctgggatcctacggctccttggctcgtttccgcaacatctctcgcattatgcgagtcaacaacagtaccatgctgggtgcctctggcgactacgctgatttccagtatttgaagcaagttctcggccagatggtgattgatgaggagcttctgggagatggacacagctatagtcctagagctattcattcatggctgaccagggccatgtacagccggcgctcgaagatgaaccctttgtggaacaccatggtcatcggaggctatgctgatggagagagcttcctcggttatgtggacatgcttggtgtagcctatgaagccccttcgctggccactggttatggtgcatacttggctcagcctctgctgcgagaagttctggagaagcagccagtgctaagccagaccgaggcccgcgacttagtagaacgctgcatgcgagtgctgtactaccgagatgcccgttcttacaaccggtttcaaatcgccactgtcaccgaaaaaggtgttgaaatagagggaccattgtctacagagaccaactgggatattgcccacatgatcagtggctttgaatgaaatacagatgcattatccagaactgaagttgccctacttttaactttgaacttggctagttcaaagatagactcttcttttgtaaagtaaataaattcttcaaaatgcaaaaaaaaaacaaaacgaaaaaaaaacaacctc

SEQ ID NO: 307872 - DNA, 1070 bp, Homo sapiens
agcgctttcattttttctgctaccgtgactaagatggaagcgtttttggggtcgcggtccggactttgggcggggggtccggccccaggacagttttaccgcattccatccactcccgattccttcatggatccggcgtctgcactttacagaggtccaatcacgcggacccagaaccccatggtgaccgggacctcagtcctcggcgttaagttcgagggcggagtggtgattgccgcagacatgctgggatcctacggctccttggctcgtttccgcaacatctctcgcattatgcgagtcaacaacagtaccatgctgggtgcctctggcgactacgctgatttccagtatttgaagcaagttctcggccagatggtgattgatgaggagcttctgggagatggacacagctatagtcctagagctattcattcatggctgaccagggccatgtacagccggcgctcgaagatgaaccctttgtggaacaccatggtcatcggaggctatgctgatggagagagcttcctcggttatgtggacatgcttggtgtagcctatgaagccccttcgctggccactggttatggtgcatacttggctcagcctctgctgcgagaagttctggagaagcagccagtgctaagccagaccgaggcccgcgacttagtagaacgctgcatgcgagtgctgtactaccgagatgcccgttcttacaaccggtttcaaatcgccactgtcaccgaaaaaggtgttgaaatagagggaccattgtctacagagaccaactgggatattgcccacatgatcagtggctttgaatgaaatacagatgcattatccagaactgaagttgccctacttttaactttgaacttggctagttcaaagatagactcttcttttgtaaagtaaataaattcttcaaaatgccaaaaaacaaaacccctccccttctcttcctacctctctcctacttcatccctaacctcctcctctatacaaaataacctcggggggggcccgtgccccaatccccctgggggcgctttcacattcggggcgcg

SEQ ID NO: 307873 - DNA, 964 bp, Homo sapiens
agcgctttcattttttctgctaccgtgactaagatggaagcgtttttggggtcgcggtccggactttgggcggggggtccggccccaggacagttttaccgcattccatccactcccgattccttcatggatccggcgtctgcactttacagaggtccaatcacgcggacccagaaccccatggtgaccgggacctcagtcctcggcgttaagttcgagggcggagtggtgattgccgcagacatgctgggatcctacggctccttggctcgtttccgcaacatctctcgcattatgcgagtcaacaacagtaccatgctgggtgcctctggcgactacgctgatttccagtatttgaagcaagttctcggccagatggtgattgatgaggagcttctgggagatggacacagctatagtcctagagctattcattcatggctgaccagggccatgtacagccggcgctcgaagatgaaccctttgtggaacaccatggtcatcggaggctatgctgatggagagagcttcctcggttatgtggacatgcttggtgtagcctatgaagccccttcgctggccactggttatggtgcatacttggctcagcctctgctgcgagaagttctggagaagcagccagtgctaagccagaccgaggcccgcgacttagtagaacgctgcatgcgagtgctgtactaccgagatgcccgttcttacaaccggtttcaaatcgccactgtcaccgaaaaaggtgttgaaatagagggaccattgtctacagagaccaactgggatattgcccacatgatcagtggctttgaatgaaatacagatgcattatccagaactgaagttgccctacttttaactttgaacttggctagttcaaagatagactcttcttttgtaaagtaaataaattcttcaaaatgcaaaaaaagtcgacgcggccgcgaattta

SEQ ID NO: 307874 - DNA, 945 bp, Homo sapiens
agcgctttcattttttctgctaccgtgactaagatggaagcgtttttggggtcgcggtccggactttgggcggggggtccggccccaggacagttttaccgcattccatccactcccgattccttcatggatccggcgtctgcactttacagaggtccaatcacgcggacccagaaccccatggtgaccgggacctcagtcctcggcgttaagttcgagggcggagtggtgattgccgcagacatgctgggatcctacggctccttggctcgtttccgcaacatctctcgcattatgcgagtcaacaacagtaccatgctgggtgcctctggcgactacgctgatttccagtatttgaagcaagttctcggccagatggtgattgatgaggagcttctgggagatggacacagctatagtcctagagctattcattcatggctgaccagggccatgtacagccggcgctcgaagatgaaccctttgtggaacaccatggtcatcggaggctatgctgatggagagagcttcctcggttatgtggacatgcttggtgtagcctatgaagccccttcgctggccactggttatggtgcatacttggctcagcctctgctgcgagaagttctggagaagcagccagtgctaagccagaccgaggcccgcgacttagtagaacgctgcatgcgagtgctgtactaccgagatgcccgttcttacaaccggtttcaaatcgccactgtcaccgaaaaaggtgttgaaatagagggaccattgtctacagagaccaactgggatattgcccacatgatcagtggctttgaatgaaatacagatgcattatccagaactgaagttgccctacttttaactttgaacttggctagttcaaagaaccctggtttgtaataatccagccctcttgttttcttttctttcttcttg

SEQ ID NO: 307875 - DNA, 978 bp, Homo sapiens
  misc_feature (848)..(848): n is a, c, g, or t
  misc_feature (905)..(905): n is a, c, g, or t
  misc_feature (907)..(907): n is a, c, g, or t
  misc_feature (916)..(916): n is a, c, g, or t
  misc_feature (922)..(922): n is a, c, g, or t
agcgctttcattttttctgctaccgtgactaagatggaagcgtttttggggtcgcggtccggactttgggcggggggtccggccccaggacagttttaccgcattccatccactcccgattccttcatggatccggcgtctgcactttacagaggtccaatcacgcggacccagaaccccatggtgaccgggacctcagtcctcggcgttaagttcgagggcggagtggtgattgccgcagacatgctgggatcctacggctccttggctcgtttccgcaacatctctcgcattatgcgagtcaacaacagtaccatgctgggtgcctctggcgactacgctgatttccagtatttgaagcaagttctcggccagatggtgattgatgaggagcttctgggagatggacacagctatagtcctagagctattcattcatggctgaccagggccatgtacagccggcgctcgaagatgaaccctttgtggaacaccatggtcatcggaggctatgctgatggagagagcttcctcggttatgtggacatgcttggtgtagcctatgaagccccttcgctggccactggttatggtgcatacttggctcagcctctgctgcgagaagttctggagaagcagccagtgctaagccagaccgaggcccgcgacttagtagaacgctgcatgcgagtgctgtactaccgagatgcccgttcttacaaccggtttcaaatcgccactgtcaccgaaaaaggtgttgaaatagagggaccattgtctacagagaccaactgggatattgcccacatgatcagtggtttgaatgaatacgatgcttatccaaatgnagtggcctactttaattgactggtagtcaagataagcctcttggaggataatctccngnaaaaaaaancgggtnttggggaaaggtgagccggtttgtccgccttggaggggggccctgggtatacgaga

SEQ ID NO: 307876 - DNA, 1122 bp, Homo sapiens
agcgctttcattttttctgctaccgtgactaagatggaagcgtttttggggtcgcggtccggactttgggcggggggtccggccccaggacagttttaccgcattccatccactcccgattccttcatggatccggcgtctgcactttacagaggtccaatcacgcggacccagaaccccatggtgaccgggacctcagtcctcggcgttaagttcgagggcggagtggtgattgccgcagacatgctgggatcctacggctccttggctcgtttccgcaacatctctcgcattatgcgagtcaacaacagtaccatgctgggtgcctctggcgactacgctgatttccagtatttgaagcaagttctcggccagatggtgattgatgaggagcttctgggagatggacacagctatagtcctagagctattcattcatggctgaccagggccatgtacagccggcgctcgaagatgaaccctttgtggaacaccatggtcatcggaggctatgctgatggagagagcttcctcggttatgtggacatgcttggtgtagcctatgaagccccttcgctggccactggttatggtgcatacttggctcagcctctgctgcgagaagttctggagaagcagccagtgctaagccagaccgaggcccgcgacttagtagaacgctgcatgcgagtgctgtactaccgagatgcccgttcttacaaccggtttcaaatcgccactgtcaccgaaaaaggtgttgaaatagagggaccattgtctacagagaccaactgggatattgcccacatgatcaggtgagtaatagggaaaaaattggtgacagacttgggaggtctttggcttacactaagctgggcttttctgggaggctcacccaggaaaattttctgggtggaaagttttggttggacagtacagctatttttaggaattgatccctttatgcttcacaattttattattctgtcttccttttttagtggctttgaatgaaatacagatgcattatccagaactgaagttgccctacttttaactttgaacttggctagttcaaagatagactcttcttttgtaaagtaaataaattcttcaaaatgc

SEQ ID NO: 307877 - DNA, 964 bp, Homo sapiens
  misc_feature (24)..(25): n is a, c, g, or t
  misc_feature (28)..(28): n is a, c, g, or t
  misc_feature (51)..(51): n is a, c, g, or t
  misc_feature (54)..(54): n is a, c, g, or t
  misc_feature (56)..(56): n is a, c, g, or t
atggcctttttatgggctgacacnntantagaaaaccacgtggtggttgtnaananaacagtgtacgtcgattccgggtgaacgtttgggtcgcgtcgattgggcggggtcgccgagtaagttttaccgcattccatccactcccgattccttcatggatccggcgtctgcactttacagaggtccaatcacgcggacccagaaccccatggtgaccgggacctcagtcctcggcgttaagttcgagggcggagtggtgattgccgcagacatgctgggatcctacggctccttggctcgtttccgcaacatctctcgcattatgcgagtcaacaacagtaccatgctgggtgcctctggcgactacgctgatttccagtatttgaagcaagttctcggccagatggtgattgatgaggagcttctgggagatggacacagctatagtcctagagctattcattcatggctgaccagggccatgtacagccggcgctcgaagatgaaccctttgtggaacaccatggtcatcggaggctatgctgatggagagagcttcctcggttatgtggacatgcttggtgtagcctatgaagccccttcgctggccactggttatggtgcatacttggctcagcctctgctgcgagaagttctggagaagcagccagtgctaagccagaccgaggcccgcgacttagtagaacgctgcatgcgagtgctgtactaccgagatgcccgttcttacaaccggtttcaaatcgccactgtcaccgaaaaaggtgttgaaatagagggaccattgtctacagagaccaactgggatattgcccacatgatcagtggctttgaatgaaatacagatgcattatccagaactgaagttgccctacttttaactttgaacttggctagttcaaagatagactcttcttttgtaaagtaaataaattcttcaaaatgc

SEQ ID NO: 307878 - DNA, 827 bp, Homo sapiens
  misc_feature (18)..(19): n is a, c, g, or t
  misc_feature (26)..(26): n is a, c, g, or t
gcagtctggtaccgcccnnggggtantggatatcgtcgacccacgcgctctgcacgcggacccagaaccccatggtgaccgggacctcagtcctcggcgttaagttcgagggcggagtggtgattgccgcagacatgctgggatcctacggctccttggctcgtttccgcaacatctctcgcattatgcgagtcaacaacagtaccatgctgggtgcctctggcgactacgctgatttccagtatttgaagcaagttctcggccagatggtgattgatgaggagcttctgggagatggacacagctatagtcctagagctattcattcatggctgaccagggccatgtacagccggcgctcgaagatgaaccctttgtggaacaccatggtcatcggaggctatgctgatggagagagcttcctcggttatgtggacatgcttggtgtagcctatgaagccccttcgctggccactggttatggtgcatacttggctcagcctctgctgcgagaagttctggagaagcagccagtgctaagccagaccgaggcccgcgacttagtagaacgctgcatgcgagtgctgtactaccgagatgcccgttcttacaaccggtttcaaatcgccactgtcaccgaaaaaggtgttgaaatagagggaccattgtctacagagaccaactgggatattgcccacatgatcagtggctttgaatgaaatacagatgcattatccagaactgaagttgccctacttttaactttgaacttggctagttcaaagatagactcttcttttgtaaagtaaataaattcttcaaaatgc

SEQ ID NO: 307879 - DNA, 803 bp, Homo sapiens
agcgctttcattttttctgctaccgtgactaagatggaagcgtttttggggtcgcggtccggactttgggcggggggtccggccccaggacagttttaccgcattccatccactcccgattccttcatggatccggcgtctgcactttacagaggtccaatcacgcggacccagaaccccatggtgaccgggacctcagtcctcggcgttaagttcgagggcggagtggtgattgccgcagacatgctgggatcctacggctccttggctcgtttccgcaacatctctcgcattatgcgagtcaacaacagtaccatgctgggtgcctctggcgactacgctgatttccagtatttgaagcaagttctcggccagatggtgattgatgaggagcttctgggagatggacacagctatagtcctagagctattcattcatggctgaccagggccatgtacagccggcgctcgaagatgaaccctttgtggaacaccatggtcatcggaggctatgctgatggagagagcttcctcggttatgtggacatgcttggtgtagcctatgaagccccttcgctggccactggttatggtgcatacttggctcagcctctgctgcgagaagttctggagaagcagccagtgctaagccagaccgaggcccgcgacttagtagaacgctgcatgcgagtgctgtactaccgagatgcccgttcttacaaccggttcaacgccctgtccgaaagggtgcttggggcctgttccggcccgggtttccctttcgggtttgatctgcttccccg

SEQ ID NO: 307880 - DNA, 1122 bp, Homo sapiens
agcgctttcattttttctgctaccgtgactaagatggaagcgtttttggggtcgcggtccggactttgggcggggggtccggccccaggacagttttaccgcattccatccactcccgattccttcatggatccggcgtctgcactttacagaggtccaatcacgcggacccagaaccccatggtgaccgggacctcagtcctcggcgttaagttcgagggcggagtggtgattgccgcagacatgctgggatcctacggctccttggctcgtttccgcaacatctctcgcattatgcgagtcaacaacagtaccatgctgggtgcctctggcgactacgctgatttccagtatttgaagcaagttctcggccagatggtgattgatgaggagcttctgggagatggacacagctatagtcctagagctattcattcatggctgaccagggccatgtacagccggcgctcgaagatgaaccctttgtggaacaccatggtcatcggaggctatgctgatggagagagcttcctcggttatgtggacatgcttggtgtagcctatgaagccccttcgctggccactggttatggtgcatacttggctcagcctctgctgcgagaagttctggagaagcagccagtgctaagccagaccgaggcccgcgacttagtagaacgctgcatgcgagtgctgtactaccgagatgcccgttcttacaaccgggtgagggatgtgctgggaacctaattggcgggctctggctacttgcaatccctgggtctctatgctttgaagaacagattgccttacttgtgtgactcctattttcacattggggaagacctccacctgacctttcatttaaggacttaaggcgtgggcattattgaatgctctgctttcttccagtttcaaatcgccactgtcaccgaaaaaggtgttgaaatagagggaccattgtctacagagaccaactgggatattgcccacatgatcagtggctttgaatgaaatacagatgcattatccagaactgaagttgccctacttttaactttgaacttggctagttcaaagatagactcttcttttgtaaagtaaataaattcttcaaaatgc

SEQ ID NO: 307881 - DNA, 1308 bp, Homo sapiens
agcgctttcattttttctgctaccgtgactaagatggaagcgtttttggggtcgcggtccggactttgggcggggggtccggccccaggacagttttaccgcattccatccactcccgattccttcatggatccggcgtctgcactttacagaggtccaatcacgcggacccagaaccccatggtgaccgggacctcagtcctcggcgttaagttcgagggcggagtggtgattgccgcagacatgctgggatcctacggctccttggctcgtttccgcaacatctctcgcattatgcgagtcaacaacagtaccatgctgggtgcctctggcgactacgctgatttccagtatttgaagcaagttctcggccagatggtgattgatgaggagcttctgggagatggacacagctatagtcctagagctattcattcatggctgaccagggccatgtacagccggcgctcgaagatgaaccctttgtggaacaccatggtcatcggaggctatgctgatggagagagcttcctcggttatgtggacatgcttggtgtagcctatgaagccccttcgctggccactggttatggtgcatacttggctcagcctctgctgcgagaagttctggagaagcagccagtgctaagccagaccgaggcccgcgacttagtagaacgctgcatgcgagtgctgtactaccgagatgcccgttcttacaaccgggtgagggatgtgctgggaacctaattggcgggctctggctacttgcaatccctgggtctctatgctttgaagaacagattgccttacttgtgtgactcctattttcacattggggaagacctccacctgacctttcatttaaggacttaaggcgtgggcattattgaatgctctgctttcttccagtttcaaatcgccactgtcaccgaaaaaggtgttgaaatagagggaccattgtctacagagaccaactgggatattgcccacatgatcaggtgagtaatagggaaaaaattggtgacagacttgggaggtctttggcttacactaagctgggcttttctgggaggctcacccaggaaaattttctgggtggaaagttttggttggacagtacagctatttttaggaattgatccctttatgcttcacaattttattattctgtcttccttttttagtggctttgaatgaaatacagatgcattatccagaactgaagttgccctacttttaactttgaacttggctagttcaaagatagactcttcttttgtaaagtaaataaattcttcaaaatgc

SEQ ID NO: 307882 - DNA, 1190 bp, Homo sapiens
agcgctttcattttttctgctaccgtgactaagatggaagcgtttttggggtcgcggtccggactttgggcggggggtccggccccaggacagttttaccgcattccatccactcccgattccttcatggatccggcgtctgcactttacagaggtccaatcacgcggacccagaaccccatggtgaccgggacctcagtcctcggcgttaagttcgagggcggagtggtgattgccgcagacatgctgggatcctacggctccttggctcgtttccgcaacatctctcgcattatgcgagtcaacaacagtaccatgctgggtgcctctggcgactacgctgatttccagtatttgaagcaagttctcggccagatggtgtaagtcatccagagaacaggagagtggttcccaagtagagaggggagtcccctgttttttattcccttcgatgggatggggggacttgttgcagcgggggactggaagagttgttggaggtgggcgatctgtgtttgcaataaagtttttggcattaggtgtaaaatgggggaaggtgtggtaacttcttttggggatgggtggagaccccgacttaattctctcccttttctcacaaccaattccttttaaggattgatgaggagcttctgggagatggacacagctatagtcctagagctattcattcatggctgaccagggccatgtacagccggcgctcgaagatgaaccctttgtggaacaccatggtcatcggaggctatgctgatggagagagcttcctcggttatgtggacatgcttggtgtagcctatgaagccccttcgctggccactggttatggtgcatacttggctcagcctctgctgcgagaagttctggagaagcagccagtgctaagccagaccgaggcccgcgacttagtagaacgctgcatgcgagtgctgtactaccgagatgcccgttcttacaaccggtttcaaatcgccactgtcaccgaaaaaggtgttgaaatagagggaccattgtctacagagaccaactgggatattgcccacatgatcagtggctttgaatgaaatacagatgcattatccagaactgaagttgccctacttttaactttgaacttggctagttcaaagatagactcttcttttgtaaagtaaataaattcttcaaaatgc

SEQ ID NO: 307883 - DNA, 759 bp, Homo sapiens
  misc_feature (736)..(736): n is a, c, g, or t
agcgctttcattttttctgctaccgtgactaagatggaagcgtttttggggtcgcggtccggactttgggcggggggtccggccccaggacagttttaccgcattccatccactcccgattccttcatggatccggcgtctgcactttacagaggtccaatcacgcggacccagaaccccatggtgaccgggacctcagtcctcggcgttaagttcgagggcggagtggtgattgccgcagacatgctgggatcctacggctccttggctcgtttccgcaacatctctcgcattatgcgagtcaacaacagtaccatgctgggtgcctctggcgactacgctgatttccagtatttgaagcaagttctcggccagatggtgattgatgaggagcttctgggagatggacacagctatagtcctagagctattcattcatggctgaccagggccatgtacagccggcgctcgaagatgaaccctttgtggaacaccatggtcatcggaggctatgctgatggagagagcttcctcggttatgtggacatgcttggtgtagcctatgaagccccttcgctggccactggttatggtgcatacttggctcagcctctgctgcgagaagttctggagaagcagccagtgctaagccagaccgaggccccgccgaactttaattaaaaaacgcttgccattgccaaattgcctggttacttaacccgaaaaaacgccccgnttccttaacaaacccgggttttc

SEQ ID NO: 307884 - DNA, 1329 bp, Homo sapiens
agcgctttcattttttctgctaccgtgactaagatggaagcgtttttggggtcgcggtccggactttgggcggggggtccggccccaggacagttttaccgcattccatccactcccgattccttcatggatccggcgtctgcactttacagaggtccaatcacgcggacccagaaccccatggtgaccgggacctcagtcctcggcgttaagttcgagggcggagtggtgattgccgcagacatgctgggatcctacggctccttggctcgtttccgcaacatctctcgcattatgcgagtcaacaacagtaccatgctgggtgcctctggcgactacgctgatttccagtatttgaagcaagttctcggccagatggtgattgatgaggagcttctgggagatggacacagctatagtcctagagctattcattcatggctgaccagggccatgtacagccggcgctcgaagatgaaccctttgtggaacaccatggtcatcggaggctatgctgatggagagagcttcctcggttatgtggacatgcttggtgtagcctatgaagccccttcgctggccactggttatggtgcatacttggctcaggtaagtagtaagtctagaggtgggggaaagggaagacaaaaggaaatggattagtggttgtctgcttttctcctgaaattctgatatgagggatgggctgggatcgctattactgggcagatggttttctttgtagtctgggggctgtaggtgttgacactgattccagtgacaagatgacatgactgggagtcagtagacatgcaaagagaggacaccctagaacttcttcctgaagtggctcttagcttattttctaagcagagttcattctggtgaggcaagaagtagaatgtcatctttcactctaatgctttttataccatagatttgagacaactagcctgttattcagcccaatatccccccatggttttcccccaatctccctagcctctgctgcgagaagttctggagaagcagccagtgctaagccagaccgaggcccgcgacttagtagaacgctgcatgcgagtgctgtactaccgagatgcccgttcttacaaccggtttcaaatcgccactgtcaccgaaaaaggtgttgaaatagagggaccattgtctacagagaccaactgggatattgcccacatgatcagtggctttgaatgaaatacagatgcattatccagaactgaagttgccctacttttaactttgaacttggctagttcaaagatagactcttcttttgtaaagtaaataaattcttcaaaatgc

SEQ ID NO: 307885 - DNA, 1111 bp, Homo sapiens
agcgctttcattttttctgctaccgtgactaagatggaagcgtttttggggtcgcggtccggactttgggcggggggtccggccccaggacagttttaccgcattccatccactcccgattccttcatggatccggcgtctgcactttacagaggtccaatcacgcggacccagaaccccatggtgaccgggacctcagtcctcggcgttaagttcgagggcggagtggtgattgccgcagacatgctgggatcctacggctccttggctcgtttccgcaacatctctcgcattatgcgagtcaacaacagtaccatgctgggtgcctctggcgactacgctgatttccagtatttgaagcaagttctcggccagatggtgattgatgaggagcttctgggagatggacacagctatagtcctagagctattcattcatggctgaccagggccatgtacagccggcgctcgaagatgaaccctttgtggaacaccatggtcatcggaggctatgctgatggagagaggttcatatgaatacaaataacttatttcctttaccacccaacctagtacctgtgtagtatctcttctgtctcttctccccaagtgaatcccactttaactcagaccccatggtccccttcttcagctaagatgaacctaaggtgaaatgagttttgacccattgtgtcctgttagcttcctcggttatgtggacatgcttggtgtagcctatgaagccccttcgctggccactggttatggtgcatacttggctcagcctctgctgcgagaagttctggagaagcagccagtgctaagccagaccgaggcccgcgacttagtagaacgctgcatgcgagtgctgtactaccgagatgcccgttcttacaaccggtttcaaatcgccactgtcaccgaaaaaggtgttgaaatagagggaccattgtctacagagaccaactgggatattgcccacatgatcagtggctttgaatgaaatacagatgcattatccagaactgaagttgccctacttttaactttgaacttggctagttcaaagatagactcttcttttgtaaagtaaataaattcttcaaaatgc

SEQ ID NO: 307886 - DNA, 1211 bp, Homo sapiens
agcgctttcattttttctgctaccgtgactaagatggaagcgtttttggggtcgcggtccggactttgggcggggggtccggccccaggacagttttaccgcattccatccactcccgattccttcatggatccggcgtctgcactttacagaggtccaatcacgcggacccagaaccccatggtgaccgggacctcagtcctcggcgttaagttcgagggcggagtggtgattgccgcagacatgctgggatcctacggctccttggctcgtttccgcaacatctctcgcattatgcgagtcaacaacagtaccatgctgggtgcctctggcgactacgctgatttccagtatttgaagcaagttctcggccagatggtgattgatgaggagcttctgggagatggacacagctatagtcctagagctattcattcatggctgaccagggccatgtacagccggcgctcgaagatgaaccctttgtggaacaccatggtcatcggaggctatgctgatggagagagcttcctcggttatgtggacatgcttggtgtagcctatgaagccccttcgctggccactggttatggtgcatacttggctcaggtaagtagtaagtctagaggtgggggaaagggaagacaaaaggaaatggattagtggttgtctgcttttctcctgaaattctgatatgagggatgggctgggatcgctattactgggcagatggttttctttgtagtctgggggctgtaggtgttgacactgattccagtgacaagatgacatgactgggagtcagtagacatgcaaagagaggacaccctagaacttcttcctgaagtggctcttagcttattttctaagcagagttcattctgcctctgctgcgagaagttctggagaagcagccagtgctaagccagaccgaggcccgcgacttagtagaacgctgcatgcgagtgctgtactaccgagatgcccgttcttacaaccggtttcaaatcgccactgtcaccgaaaaaggtgttgaaatagagggaccattgtctacagagaccaactgggatattgcccacatgatcagtggctttgaatgaaatacagatgcattatccagaactgaagttgccctacttttaactttgaacttggctagttcaaagatagactcttcttttgtaaagtaaataaattcttcaaaatgc

SEQ ID NO: 307887 - DNA, 1504 bp, Homo sapiens
agcgctttcattttttctgctaccgtgactaagatggaagcgtttttggggtcgcggtccggactttgggcggggggtccggccccaggacagttttaccgcattccatccactcccgattccttcatggatccggcgtctgcactttacagaggtccaatcacgcggacccagaaccccatggtgaccgggacctcagtcctcggcgttaagttcgagggcggagtggtgattgccgcagacatgctgggatcctacggctccttggctcgtttccgcaacatctctcgcattatgcgagtcaacaacagtaccatgctgggtgcctctggcgactacgctgatttccagtatttgaagcaagttctcggccagatggtgattgatgaggagcttctgggagatggacacagctatagtcctagagctattcattcatggctgaccagggccatgtacagccggcgctcgaagatgaaccctttgtggaacaccatggtcatcggaggctatgctgatggagagaggttcatatgaatacaaataacttatttcctttaccacccaacctagtacctgtgtagtatctcttctgtctcttctccccaagtgaatcccactttaactcagaccccatggtccccttcttcagctaagatgaacctaaggtgaaatgagttttgacccattgtgtcctgttagcttcctcggttatgtggacatgcttggtgtagcctatgaagccccttcgctggccactggttatggtgcatacttggctcaggtaagtagtaagtctagaggtgggggaaagggaagacaaaaggaaatggattagtggttgtctgcttttctcctgaaattctgatatgagggatgggctgggatcgctattactgggcagatggttttctttgtagtctgggggctgtaggtgttgacactgattccagtgacaagatgacatgactgggagtcagtagacatgcaaagagaggacaccctagaacttcttcctgaagtggctcttagcttattttctaagcagagttcattctggtgaggcaagaagtagaatgtcatctttcactctaatgctttttataccatagatttgagacaactagcctgttattcagcccaatatccccccatggttttcccccaatctccctagcctctgctgcgagaagttctggagaagcagccagtgctaagccagaccgaggcccgcgacttagtagaacgctgcatgcgagtgctgtactaccgagatgcccgttcttacaaccggtttcaaatcgccactgtcaccgaaaaaggtgttgaaatagagggaccattgtctacagagaccaactgggatattgcccacatgatcagtggctttgaatgaaatacagatgcattatccagaactgaagttgccctacttttaactttgaacttggctagttcaaagatagactcttcttttgtaaagtaaataaattcttcaaaatgc

SEQ ID NO: 307888 - DNA, 1386 bp, Homo sapiens
agcgctttcattttttctgctaccgtgactaagatggaagcgtttttggggtcgcggtccggactttgggcggggggtccggccccaggacagttttaccgcattccatccactcccgattccttcatggatccggcgtctgcactttacagaggtccaatcacgcggacccagaaccccatggtgaccgggacctcagtcctcggcgttaagttcgagggcggagtggtgattgccgcagacatgctgggatcctacggctccttggctcgtttccgcaacatctctcgcattatgcgagtcaacaacagtaccatgctgggtgcctctggcgactacgctgatttccagtatttgaagcaagttctcggccagatggtgattgatgaggagcttctgggagatggacacagctatagtcctagagctattcattcatggctgaccagggccatgtacagccggcgctcgaagatgaaccctttgtggaacaccatggtcatcggaggctatgctgatggagagaggttcatatgaatacaaataacttatttcctttaccacccaacctagtacctgtgtagtatctcttctgtctcttctccccaagtgaatcccactttaactcagaccccatggtccccttcttcagctaagatgaacctaaggtgaaatgagttttgacccattgtgtcctgttagcttcctcggttatgtggacatgcttggtgtagcctatgaagccccttcgctggccactggttatggtgcatacttggctcaggtaagtagtaagtctagaggtgggggaaagggaagacaaaaggaaatggattagtggttgtctgcttttctcctgaaattctgatatgagggatgggctgggatcgctattactgggcagatggttttctttgtagtctgggggctgtaggtgttgacactgattccagtgacaagatgacatgactgggagtcagtagacatgcaaagagaggacaccctagaacttcttcctgaagtggctcttagcttattttctaagcagagttcattctgcctctgctgcgagaagttctggagaagcagccagtgctaagccagaccgaggcccgcgacttagtagaacgctgcatgcgagtgctgtactaccgagatgcccgttcttacaaccggtttcaaatcgccactgtcaccgaaaaaggtgttgaaatagagggaccattgtctacagagaccaactgggatattgcccacatgatcagtggctttgaatgaaatacagatgcattatccagaactgaagttgccctacttttaactttgaacttggctagttcaaagatagactcttcttttgtaaagtaaataaattcttcaaaatgc

SEQ ID NO: 307889 - DNA, 1515 bp, Homo sapiens
agcgctttcattttttctgctaccgtgactaagatggaagcgtttttggggtcgcggtccggactttgggcggggggtccggccccaggacagttttaccgcattccatccactcccgattccttcatggatccggcgtctgcactttacagaggtccaatcacgcggacccagaaccccatggtgaccgggacctcagtcctcggcgttaagttcgagggcggagtggtgattgccgcagacatgctgggatcctacggctccttggctcgtttccgcaacatctctcgcattatgcgagtcaacaacagtaccatgctgggtgcctctggcgactacgctgatttccagtatttgaagcaagttctcggccagatggtgattgatgaggagcttctgggagatggacacagctatagtcctagagctattcattcatggctgaccagggccatgtacagccggcgctcgaagatgaaccctttgtggaacaccatggtcatcggaggctatgctgatggagagagcttcctcggttatgtggacatgcttggtgtagcctatgaagccccttcgctggccactggttatggtgcatacttggctcaggtaagtagtaagtctagaggtgggggaaagggaagacaaaaggaaatggattagtggttgtctgcttttctcctgaaattctgatatgagggatgggctgggatcgctattactgggcagatggttttctttgtagtctgggggctgtaggtgttgacactgattccagtgacaagatgacatgactgggagtcagtagacatgcaaagagaggacaccctagaacttcttcctgaagtggctcttagcttattttctaagcagagttcattctggtgaggcaagaagtagaatgtcatctttcactctaatgctttttataccatagatttgagacaactagcctgttattcagcccaatatccccccatggttttcccccaatctccctagcctctgctgcgagaagttctggagaagcagccagtgctaagccagaccgaggcccgcgacttagtagaacgctgcatgcgagtgctgtactaccgagatgcccgttcttacaaccggtttcaaatcgccactgtcaccgaaaaaggtgttgaaatagagggaccattgtctacagagaccaactgggatattgcccacatgatcaggtgagtaatagggaaaaaattggtgacagacttgggaggtctttggcttacactaagctgggcttttctgggaggctcacccaggaaaattttctgggtggaaagttttggttggacagtacagctatttttaggaattgatccctttatgcttcacaattttattattctgtcttccttttttagtggctttgaatgaaatacagatgcattatccagaactgaagttgccctacttttaactttgaacttggctagttcaaagatagactcttcttttgtaaagtaaataaattcttcaaaatgc

SEQ ID NO: 307890 - DNA, 1357 bp, Homo sapiens
agcgctttcattttttctgctaccgtgactaagatggaagcgtttttggggtcgcggtccggactttgggcggggggtccggccccaggacagttttaccgcattccatccactcccgattccttcatggatccggcgtctgcactttacagaggtccaatcacgcggacccagaaccccatggtgaccgggacctcagtcctcggcgttaagttcgagggcggagtggtgattgccgcagacatgctgggatcctacggctccttggctcgtttccgcaacatctctcgcattatgcgagtcaacaacagtaccatgctgggtgcctctggcgactacgctgatttccagtatttgaagcaagttctcggccagatggtgattgatgaggagcttctgggagatggacacagctatagtcctagagctattcattcatggctgaccagggccatgtacagccggcgctcgaagatgaaccctttgtggaacaccatggtcatcggaggctatgctgatggagagagcttcctcggttatgtggacatgcttggtgtagcctatgaagccccttcgctggccactggttatggtgcatacttggctcaggtaagtagtaagtctagaggtgggggaaagggaagacaaaaggaaatggattagtggttgtctgcttttctcctgaaattctgatatgagggatgggctgggatcgctattactgggcagatggttttctttgtagtctgggggctgtaggtgttgacactgattccagtgacaagatgacatgactgggagtcagtagacatgcaaagagaggacaccctagaacttcttcctgaagtggctcttagcttattttctaagcagagttcattctggtgaggcaagaagtagaatgtcatctttcactctaatgctttttataccatagatttgagacaactagcctgttattcagcccaatatccccccatggttttcccccaatctccctagcctctgctgcgagaagttctggagaagcagccagtgctaagccagaccgaggcccgcgacttagtagaacgctgcatgcgagtgctgtactaccgagatgcccgttcttacaaccggtttcaaatcgccactgtcaccgaaaaaggtgttgaaatagagggaccattgtctacagagaccaactgggatattgcccacatgatcagtggctttgaatgaaatacagatgcattatccagaactgaagttgccctacttttaactttgaacttggctagttcaaagatagactcttcttttgtaaagtaaataaattcttcaaaatgcacacaaaatccaacctcctcacctcaac

SEQ ID NO: 307891 - DNA, 1701 bp, Homo sapiens
agcgctttcattttttctgctaccgtgactaagatggaagcgtttttggggtcgcggtccggactttgggcggggggtccggccccaggacagttttaccgcattccatccactcccgattccttcatggatccggcgtctgcactttacagaggtccaatcacgcggacccagaaccccatggtgaccgggacctcagtcctcggcgttaagttcgagggcggagtggtgattgccgcagacatgctgggatcctacggctccttggctcgtttccgcaacatctctcgcattatgcgagtcaacaacagtaccatgctgggtgcctctggcgactacgctgatttccagtatttgaagcaagttctcggccagatggtgattgatgaggagcttctgggagatggacacagctatagtcctagagctattcattcatggctgaccagggccatgtacagccggcgctcgaagatgaaccctttgtggaacaccatggtcatcggaggctatgctgatggagagagcttcctcggttatgtggacatgcttggtgtagcctatgaagccccttcgctggccactggttatggtgcatacttggctcaggtaagtagtaagtctagaggtgggggaaagggaagacaaaaggaaatggattagtggttgtctgcttttctcctgaaattctgatatgagggatgggctgggatcgctattactgggcagatggttttctttgtagtctgggggctgtaggtgttgacactgattccagtgacaagatgacatgactgggagtcagtagacatgcaaagagaggacaccctagaacttcttcctgaagtggctcttagcttattttctaagcagagttcattctggtgaggcaagaagtagaatgtcatctttcactctaatgctttttataccatagatttgagacaactagcctgttattcagcccaatatccccccatggttttcccccaatctccctagcctctgctgcgagaagttctggagaagcagccagtgctaagccagaccgaggcccgcgacttagtagaacgctgcatgcgagtgctgtactaccgagatgcccgttcttacaaccgggtgagggatgtgctgggaacctaattggcgggctctggctacttgcaatccctgggtctctatgctttgaagaacagattgccttacttgtgtgactcctattttcacattggggaagacctccacctgacctttcatttaaggacttaaggcgtgggcattattgaatgctctgctttcttccagtttcaaatcgccactgtcaccgaaaaaggtgttgaaatagagggaccattgtctacagagaccaactgggatattgcccacatgatcaggtgagtaatagggaaaaaattggtgacagacttgggaggtctttggcttacactaagctgggcttttctgggaggctcacccaggaaaattttctgggtggaaagttttggttggacagtacagctatttttaggaattgatccctttatgcttcacaattttattattctgtcttccttttttagtggctttgaatgaaatacagatgcattatccagaactgaagttgccctacttttaactttgaacttggctagttcaaagatagactcttcttttgtaaagtaaataaattcttcaaaatgc

SEQ ID NO: 307892 - DNA, 1244 bp, Homo sapiens
agcgctttcattttttctgctaccgtgactaagatggaagcgtttttggggtcgcggtccggactttgggcggggggtccggccccaggacagttttaccgcattccatccactcccgattccttcatggatccggcgtctgcactttacagaggtccaatcacgcggacccagaaccccatggtgaccgggacctcagtcctcggcgttaagttcgagggcggagtggtgattgccgcagacatgctgggatcctacggctccttggctcgtttccgcaacatctctcgcattatgcgagtcaacaacagtaccatgctgggtgcctctggcgactacgctgatttccagtatttgaagcaagttctcggccagatggtgattgatgaggagcttctgggagatggacacagctatagtcctagagctattcattcatggctgaccagggccatgtacagccggcgctcgaagatgaaccctttgtggaacaccatggtcatcggaggctatgctgatggagagagcttcctcggttatgtggacatgcttggtgtagcctatgaagccccttcgctggccactggttatggtgcatacttggctcaggtaagtagtaagtctagaggtgggggaaagggaagacaaaaggaaatggattagtggttgtctgcttttctcctgaaattctgatatgagggatgggctgggatcgctattactgggcagatggttttctttgtagtctgggggctgtaggtgttgacactgattccagtgacaagatgacatgactgggagtcagtagacatgcaaagagaggacaccctagaacttcttcctgaagtggctcttagcttattttctaagcagagttcattctgcctctgctgcgagaagttctggagaagcagccagtgctaagccagaccgaggcccgcgacttagtagaacgctgcatgcgagtgctgtactaccgagatgcccgttcttacaaccggtttcaaatcgccactgtcaccgaaaaaggtgttgaaatagagggaccattgtctacagagaccaactgggatattgcccacatgatcagtggctttgaatgaaatacagatgcattatccagaactgaagttgccctacttttaactttgaacttggctagttcaaagatagactcttcttttgtaaagtaaataaattcttcaaaatgcaaaaaaaaaacaaaacgaaaaaaaaacaacctc

SEQ ID NO: 307893 - DNA, 1365 bp, Homo sapiens
agcgctttcattttttctgctaccgtgactaagatggaagcgtttttggggtcgcggtccggactttgggcggggggtccggccccaggacagttttaccgcattccatccactcccgattccttcatggatccggcgtctgcactttacagaggtccaatcacgcggacccagaaccccatggtgaccgggacctcagtcctcggcgttaagttcgagggcggagtggtgattgccgcagacatgctgggatcctacggctccttggctcgtttccgcaacatctctcgcattatgcgagtcaacaacagtaccatgctgggtgcctctggcgactacgctgatttccagtatttgaagcaagttctcggccagatggtgtaagtcatccagagaacaggagagtggttcccaagtagagaggggagtcccctgttttttattcccttcgatgggatggggggacttgttgcagcgggggactggaagagttgttggaggtgggcgatctgtgtttgcaataaagtttttggcattaggtgtaaaatgggggaaggtgtggtaacttcttttggggatgggtggagaccccgacttaattctctcccttttctcacaaccaattccttttaaggattgatgaggagcttctgggagatggacacagctatagtcctagagctattcattcatggctgaccagggccatgtacagccggcgctcgaagatgaaccctttgtggaacaccatggtcatcggaggctatgctgatggagagaggttcatatgaatacaaataacttatttcctttaccacccaacctagtacctgtgtagtatctcttctgtctcttctccccaagtgaatcccactttaactcagaccccatggtccccttcttcagctaagatgaacctaaggtgaaatgagttttgacccattgtgtcctgttagcttcctcggttatgtggacatgcttggtgtagcctatgaagccccttcgctggccactggttatggtgcatacttggctcagcctctgctgcgagaagttctggagaagcagccagtgctaagccagaccgaggcccgcgacttagtagaacgctgcatgcgagtgctgtactaccgagatgcccgttcttacaaccggtttcaaatcgccactgtcaccgaaaaaggtgttgaaatagagggaccattgtctacagagaccaactgggatattgcccacatgatcagtggctttgaatgaaatacagatgcattatccagaactgaagttgccctacttttaactttgaacttggctagttcaaagatagactcttcttttgtaaagtaaataaattcttcaaaatgc

SEQ ID NO: 307894 - DNA, 569 bp, Homo sapiens
agcgctttcattttttctgctaccgtgactaagatggaagcgtttttggggtcgcggtccggactttgggcggggggtccggccccaggacagttttaccgcattccatccactcccgattccttcatggatccggcgtctgcactttacagaggtccaatcacgcggacccagaaccccatggtgaccgggacctcagtcctcggcgttaagttcgagggcggagtggtgattgccgcagacatgctgggatcctacggctccttggctcgtttccgcaacatctctcgcattatgcgagtcaacaacagtaccatgctgggtgcctctggcgactacgctgatttccagtatttgaagcaagttctcggccagatggtgattgatgaggagcttctgggagatggacacagctatagtcctagagctattcattcatggctgaccagggccatgtacagccggcgctcgaagatgaaccctttgtggaacaccatggtcatcggaggctatgctgatggagagagcttcctcggttatgtgacacgaatgtaacaggtgccgagctc

SEQ ID NO: 307895 - DNA, 665 bp, Homo sapiens
  misc_feature (543)..(543): n is a, c, g, or t
agcgctttcattttttctgctaccgtgactaagatggaagcgtttttggggtcgcggtccggactttgggcggggggtccggccccaggacagttttaccgcattccatccactcccgattccttcatggatccggcgtctgcactttacagaggtccaatcacgcggacccagaaccccatggtgaccgggacctcagtcctcggcgttaagttcgagggcggagtggtgattgccgcagacatgctgggatcctacggctccttggctcgtttccgcaacatctctcgcattatgcgagtcaacaacagtaccatgctgggtgcctctggcgactacgctgatttccagtatttgaagcaagttctcggccagatggtgattgatgaggagcttctgggagatggacacagctatagtcctagagctattcattcatggctgaccagggccatgtacagccggcgctcgaagatgaaccctttgtggaacaccatggtcatcggaggctatgctgatggagagagcttcctcggttatgtngcgacattgctttttggtggttaaggcccccttaaatttggaaaaagggcccccccccttttttccgggccttgggggggccccaaaccttgggggttttttaaattgggggggttgggcca

SEQ ID NO: 307896 - DNA, 557 bp, Homo sapiens
agcgctttcattttttctgctaccgtgactaagatggaagcgtttttggggtcgcggtccggactttgggcggggggtccggccccaggacagttttaccgcattccatccactcccgattccttcatggatccggcgtctgcactttacagaggtccaatcacgcggacccagaaccccatggtgaccgggacctcagtcctcggcgttaagttcgagggcggagtggtgattgccgcagacatgctgggatcctacggctccttggctcgtttccgcaacatctctcgcattatgcgagtcaacaacagtaccatgctgggtgcctctggcgactacgctgatttccagtatttgaagcaagttctcggccagatggtgattgatgaggagcttctgggagatggacacagctatagtcctagagctattcattcatggctgaccagggccatgtacagccggcgctcgaagatgaaccctttgtggaacaccatggtcatcggaggctatgctgatggagagagcatcctcgctcctgatatcgcgttcctccg

SEQ ID NO: 307897 - DNA, 239 bp, Homo sapiens
ggacgcaagaacataacaggaatgggcaactatggaagtatttgtgtgtggaaggccctaacctggccctgtcctccctgtctctacatttggaataacttgttcctatttcaggaaagggaaatggtgtcactcaggccctgggactgcttctccagccaggctggggccacaggtcccactctagtgaaggtcaatgtctcagaataaaagctgtatttttacaaaaaaaaaaaagt

SEQ ID NO: 307898 - DNA, 2531 bp, Homo sapiens
ggatgggctactggaggagctcctgggagttgggcctcaggtaaggagagccgtgctgggtttgggggtggcatggagtcaagggtggacagggcctcctggtcctgagtcacaatgctgtgcctacaggtggaggagttctctgtggagccacccctggatgacctgtctctggatgaggcacagtttgtcttggcccccagctgctgttccgtggactccgctggccccaggcctgaagttgaggaggaaaatggggaggaagttttcctgagtgcctatgatgacctaagtccccttctgggacctaaacccccaatctggaagggttcagggagtctggagggagaggcagcaggatgtggaaggcaggctctgggacagggtggggaagagcaggcatgctgggaagttggggaggacaagcaggctgagcctggaggcaggctagacatcagggaagaggcagagggaagtccagagaccaaggtggaggctggaaaggccagtgaggatagaggggaggctgggggaagccaagagacaaaagtcagattgagagaagggagtagggaagagacagaggccaaggaagagaagtccaaaggtcagaagaaggctgacagtatggaggctaaaggtgtggaggaaccaggaggagatgagtatacagatgagaaggaaaaagaaattgagagagaagaggatgaacaaagagaggaagcccaggtagaagctggaagggacctagagcaaggggcccaggaagatcaagttgctgaggagaaatgggaagttgtacagaaacaagaggctgagggagtcagagaggatgaggacaaaggacagagggagaaggggtaccatgaagcaagaaaagaccaaggagatggtgaagacagcagaagcccagaagcagcaactgaaggaggagcaggggaggtcagcaaggaacgggagagtggggatggagaggctgagggagaccagagggctggagggtactatttagaagaggacaccctctctgaaggttcaggtgtagcgtccctggaggttgactgtgccaaagagggcaatcctcactcttctgagatggaagaggtagccccacagccacctcagccagaggagatggagcctgaggggcagcccagtccagacggctgtctatgcccctgttctcttggcctgggtggcgtgggcatgcgtctagcttccactctggttcaggtccaacaggtccgctctgtgcctgtggtgccccccaagccacagtttgccaagatgcccagtgcaatgtgtagcaagattcatgtggcacctgcaaatccatgcccgaggcctggccggcttgatgggactcctggagaaagggcttgggggtcccgagcttctcgatcctcttggaggaatgggggtagtctttcctttgatgctgctgtggccctagcccgggaccgccaaaggactgaggctcaaggagttcggcgaacccagacctgtactgagggtggggattactgcctcatccccagaacctccccttgtagcatgatctctgcccattctcctcggccccttagctgcctggagctcccatctgaaggtgcagaagggtctggatcccggagtcgtcttagtctgccccccagagaaccccaggttcctgaccccctgttgtcctctcagcgcaggtcatatgcatttgaaacacaggctaaccctgggaaaggtgaaggactgtgattaggaccacagccctgggcaaaggggaccagcaagttgtcttgaatctccagggttcctgactagctgtctcctctgcagcatgagcagctgtagtgcccaactctataggctttggccctccagcttctctctttgactgtgggaggcactgccttggttggtttacctgaacttgtctccgacacaaagcacttatctcttaggagattcccaagaaagtcaacaagatcttgttcccagggagtgggtcattggccaaagggaacataaggtaggcagaaaacttaaaagagtttgttaaagtgaagactggagaaattcctcccttcctctgagctgtgaatctctcttcatgaaagccaaaggtagagacagggaggacagggccaggttagggccttccacacacaaacacttctagagttgcccattcctgttatgttcttggaccctaagatacctcctgtcccttttaaatccagattaagagaaacgtccaggaagagctctttgaagccctcaatatttgttggagggactggactcctctccagctccccaccctctgcctccagtcaccatgtgcaagagaggtcctgtacagatctctctgggctctcctttctcctttggaataacttgttcctatttcaggaaagggaaatggtgtcactcaggccctgggactgcttctccagccaggctggggccacaggtcccactctagtgaaggtcaatgtctcagaataaaagctgtatttttacaaaaaaaaaaaagt

SEQ ID NO: 307899 - DNA, 2442 bp, Homo sapiens
ggatgggctactggaggagctcctgggagttgggcctcaggtggaggagttctctgtggagccacccctggatgacctgtctctggatgaggcacagtttgtcttggcccccagctgctgttccgtggactccgctggccccaggcctgaagttgaggaggaaaatggggaggaagttttcctgagtgcctatgatgacctaagtccccttctgggacctaaacccccaatctggaagggttcagggagtctggagggagaggcagcaggatgtggaaggcaggctctgggacagggtggggaagagcaggcatgctgggaagttggggaggacaagcaggctgagcctggaggcaggctagacatcagggaagaggcagagggaagtccagagaccaaggtggaggctggaaaggccagtgaggatagaggggaggctgggggaagccaagagacaaaagtcagattgagagaagggagtagggaagagacagaggccaaggaagagaagtccaaaggtcagaagaaggctgacagtatggaggctaaaggtgtggaggaaccaggaggagatgagtatacagatgagaaggaaaaagaaattgagagagaagaggatgaacaaagagaggaagcccaggtagaagctggaagggacctagagcaaggggcccaggaagatcaagttgctgaggagaaatgggaagttgtacagaaacaagaggctgagggagtcagagaggatgaggacaaaggacagagggagaaggggtaccatgaagcaagaaaagaccaaggagatggtgaagacagcagaagcccagaagcagcaactgaaggaggagcaggggaggtcagcaaggaacgggagagtggggatggagaggctgagggagaccagagggctggagggtactatttagaagaggacaccctctctgaaggttcaggtgtagcgtccctggaggttgactgtgccaaagagggcaatcctcactcttctgagatggaagaggtagccccacagccacctcagccagaggagatggagcctgaggggcagcccagtccagacggctgtctatgcccctgttctcttggcctgggtggcgtgggcatgcgtctagcttccactctggttcaggtccaacaggtccgctctgtgcctgtggtgccccccaagccacagtttgccaagatgcccagtgcaatgtgtagcaagattcatgtggcacctgcaaatccatgcccgaggcctggccggcttgatgggactcctggagaaagggcttgggggtcccgagcttctcgatcctcttggaggaatgggggtagtctttcctttgatgctgctgtggccctagcccgggaccgccaaaggactgaggctcaaggagttcggcgaacccagacctgtactgagggtggggattactgcctcatccccagaacctccccttgtagcatgatctctgcccattctcctcggccccttagctgcctggagctcccatctgaaggtgcagaagggtctggatcccggagtcgtcttagtctgccccccagagaaccccaggttcctgaccccctgttgtcctctcagcgcaggtcatatgcatttgaaacacaggctaaccctgggaaaggtgaaggactgtgattaggaccacagccctgggcaaaggggaccagcaagttgtcttgaatctccagggttcctgactagctgtctcctctgcagcatgagcagctgtagtgcccaactctataggctttggccctccagcttctctctttgactgtgggaggcactgccttggttggtttacctgaacttgtctccgacacaaagcacttatctcttaggagattcccaagaaagtcaacaagatcttgttcccagggagtgggtcattggccaaagggaacataaggtaggcagaaaacttaaaagagtttgttaaagtgaagactggagaaattcctcccttcctctgagctgtgaatctctcttcatgaaagccaaaggtagagacagggaggacagggccaggttagggccttccacacacaaacacttctagagttgcccattcctgttatgttcttggaccctaagatacctcctgtcccttttaaatccagattaagagaaacgtccaggaagagctctttgaagccctcaatatttgttggagggactggactcctctccagctccccaccctctgcctccagtcaccatgtgcaagagaggtcctgtacagatctctctgggctctcctttctcctttggaataacttgttcctatttcaggaaagggaaatggtgtcactcaggccctgggactgcttctccagccaggctggggccacaggtcccactctagtgaaggtcaatgtctcagaataaaagctgtatttttacaaaaaaaaaaaagt

SEQ ID NO: 307900 - DNA, 1747 bp, Homo sapiens
tgtggttgcaaagatgctctaacaggaagtgggttaaggagctgcactgcttcctgccccctaaagctgagcggggcgaggagggcgagtgccaggctgggccacgagacacaggacacaatttcttgccagggtcctggtagcttcctcttcaacagccacttccgtgtggccggggccccaggggcaggagctgctgcccgttgcccaggccaccctccacccccaattgggagccctgcccccctggggccgggccaagcccagcagctggctgggatcccatgggggactggtagggcacaggtcttgggggatagaggtgaccgggccagtgccctggggctctggccatgaagtctcggcagaaaggaaagaagaagggcagcgcaaaggagcgggtttttgggtgcgacttgcaggagcacctgcagcactcaggccaggaggtgccccaggtgctaaagagctgtgcagaatttgtggaggagtatggagtggtggatgggatctaccgcctctcaggggtctcctccaacatccagaagcttcggcaggaatttgagtcagagcggaagccagacctgcgtcgggatgtttacctccaagacattcactgcgtctcctccctgtgcaaggcctatttcagagaactgccggatcccctgctcacttaccggctctatgacaagtttgctgaggctgtaggagtgcaattggaacctgagcgcttggtcaagatcctagaggtgcttcgggaactccctgtcccaaactacaggaccctggagttcctcatgaggcacttggtacacatggcctcattcagtgcccagaccaacatgcatgctcgcaacctggccatcgtgtgggctcccaacctgctgaggtctaaggacatagaggcctcaggcttcaatgggacagcggccttcatggaggtgcgggtacaatccatcgtcgtggagttcatcctcacacacgtggaccagctctttgggggtgctgccctctctggtggtgaggtggagagtgggtggcgatcgcttccagggacccgggcatcaggcagccccgaggaccttatgcccaggccactgccttatcacctgcctagcatactgcaggctggcgatggacccccacagatgcggccctaccatactatcatcgagattgcagagcacaagaggaaggggtctttgaaggtcaggaagtggaggtctatcttcaatttaggtcgctctggccatgagactaagcgtaaacttccacggggggctgaggacagggaggataaatccaacaaggggacactgcggccagccaaaagcatggactcactgagtgctgcagctggggccagtgatgagccagaggggctggtggggcccagcagcccccggccaagcccattgctgcctgagagcttggagaacgattctatagaggcagcagagggtgaacaggagcctgaggcagaagcactgggtggcacaaactctgaaccaggcacaccacgagctgggcggtcagccatccgggctgggggcagcagccgtgcagaacgctgtgctggtgtccacatctcagacccctacaatgtcaacctcccgctacacatcacctctatcctcagtgtgcccccgaacatcatctctaacgtttccttggccaggctcacccgtggccttgagtgccctgctctacagcaccggccaagccctgcctctggccctggccctgg

SEQ ID NO: 307901 - DNA, 1812 bp, Homo sapiens
tgtggttgcaaagatgctctaacaggaagtgggttaaggagctgcactgcttcctgccccctaaagctgagcggggcgaggagggcgagtgccaggctgggccacgagacacaggacacaatttcttgccagggtcctggtagcttcctcttcaacagccacttccgtgtggccggggccccaggggcaggagctgctgcccgttgcccaggccaccctccacccccaattgggagccctgcccccctggggccgggccaagcccagcagctggctgggatcccatgggggactggtagggcacaggtcttgggggatagaggtgaccgggccagtgccctggggctctggccatgaagtctcggcagaaaggaaagaagaagggcagcgcaaaggagcgggtttttgggtgcgacttgcaggagcacctgcagcactcaggccaggaggtgccccaggtgctaaagagctgtgcagaatttgtggaggagtatggagtggtggatgggatctaccgcctctcaggggtctcctccaacatccagaagcttcggcaggaatttgagtcagagcggaagccagacctgcgtcgggatgtttacctccaagacattcactgcgtctcctccctgtgcaaggcctatttcagagaactgccggatcccctgctcacttaccggctctatgacaagtttgctgaggctgtaggagtgcaattggaacctgagcgcttggtcaagatcctagaggtgcttcgggaactccctgtcccaaactacaggaccctggagttcctcatgaggcacttggtacacatggcctcattcagtgcccagaccaacatgcatgctcgcaacctggccatcgtgtgggctcccaacctgctgaggtctaaggacatagaggcctcaggcttcaatgggacagcggccttcatggaggtgcgggtacaatccatcgtcgtggagttcatcctcacacacgtggaccagctctttgggggtgctgccctctctggtggtgaggtggagagtgggtggcgatcgcttccagggacccgggcatcaggcagccccgaggaccttatgcccaggccactgccttatcacctgcctagcatactgcaggctggcgatggacccccacagatgcggccctaccatactatcatcgagattgcagagcacaagaggaaggggtctttgaaggtcaggaagtggaggtctatcttcaatttaggtcgctctggccatgagactaagcgtaaacttccacggggggctgaggacagggaggataaatccaacaaggggacactgcggccagccaaaagcatggactcactgagtgctgcagctggggccagtgatgagccagaggggctggtggggcccagcagcccccggccaagcccattgctgcctgagagcttggagaacgattctatagaggcagcagagggtgaacaggagcctgaggcagaagcactgggtggcacaaactctgaaccaggcacaccacgagctgggcggtcagccatccgggctgggggcagcagccgtgcagaacgctgtgctggtgtccacatctcagaccctctgcctccagtcaccatgtgcaagagaggtcctgtacagatctctctgggctctcctttctcctttggaataacttgttcctatttcaggaaagggaaatggtgtcactcaggccctgggactgcttctccagccaggctggggccacaggtcccactctagtgaaggtcaatgtctcagaataaaagctgtatttttacaaaaaaaaaaaagt

SEQ ID NO: 307902 - DNA, 1724 bp, Homo sapiens
acaccccatttgtgtttgtattttttgtagagacagagtttcagcatgttactcagtctgatcttgaactcctgggctcaagcaactcacccgccttggcctctcaaggtgctggcttacaggggtgagccactgcacccagcctgacaaatttcactttaacaaaggcagaactttctaacaaagagctgattgggtagtttggagaggcagtgagctcccaggacctttaggacccactaagcagagatactgtagaggggttggcaggttgaagctgatgatctgtaagaattgttctgacaagtttttattccatgagctttgctcgtcgtggtctccccaaattccatttctcagacccagtgcagtctttgaccacccagatcctctgatttctatgtctctgccccgtctgtgtccccagtgccccaggtgctaaagagctgtgcagaatttgtggaggagtatggagtggtggatgggatctaccgcctctcaggggtctcctccaacatccagaagcttcggcaggaatttgagtcagagcggaagccagacctgcgtcgggatgtttacctccaagacattcactgcgtctcctccctgtgcaaggcctatttcagagaactgccggatcccctgctcacttaccggctctatgacaagtttgctgaggctgtaggagtgcaattggaacctgagcgcttggtcaagatcctagaggtgcttcgggaactccctgtcccaaactacaggaccctggagttcctcatgaggcacttggtacacatggcctcattcagtgcccagaccaacatgcatgctcgcaacctggccatcgtgtgggctcccaacctgctgaggtctaaggacatagaggcctcaggcttcaatgggacagcggccttcatggaggtgcgggtacaatccatcgtcgtggagttcatcctcacacacgtggaccagctctttgggggtgctgccctctctggtggtgaggtggagagtgggtggcgatcgcttccagggacccgggcatcaggcagccccgaggaccttatgcccaggccactgccttatcacctgcctagcatactgcaggctggcgatggacccccacagatgcggccctaccatactatcatcgagattgcagagcacaagaggaaggggtctttgaaggtcaggaagtggaggtctatcttcaatttaggtcgctctggccatgagactaagcgtaaacttccacggggggctgaggacagggaggataaatccaacaaggggacactgcggccagccaaaagcatggactcactgagtgctgcagctggggccagtgatgagccagaggggctggtggggcccagcagcccccggccaagcccattgctgcctgagagcttggagaacgattctatagaggcagcagagggtgaacaggagcctgaggcagaagcactgggtggcacaaactctgaaccaggcacaccacgagctgggcggtcagccatccgggctgggggcagcagccgtgcagaacgctgtgctggtgtccacatctcagacccctacaatgtcaacctcccgctacacatcacctctatcctcagtgtgcccccgaacatcatctctaacgtttccttggccaggctcacccgtggccttgagtgccctgctctacagcaccggccaagccctgcctctggccctggccctgg

SEQ ID NO: 307903 - DNA, 873 bp, Homo sapiens
  misc_feature (790)..(790): n is a, c, g, or t
  misc_feature (829)..(829): n is a, c, g, or t
  misc_feature (859)..(859): n is a, c, g, or t
  misc_feature (873)..(873): n is a, c, g, or t
ggatgggctactggaggagctcctgggagttgggcctcaggtaaggagagccgtgctgggtttgggggtggcatggagtcaagggtggacagggcctcctggtcctgagtcacaatgctgtgcctacaggtggaggagttctctgtggagccacccctggatgacctgtctctggatgaggcacagtttgtcttggcccccagctgctgttccgtggactccgctggccccaggcctgaagttgaggaggaaaatggggaggaagttttcctgagtgcctatgatgacctaagtccccttctgggacctaaacccccaatctggaagggttcagggagtctggagggagaggcagcaggatgtggaaggcaggctctgggacagggtggggaagagcaggcatgctgggaagttggggaggacaagcaggctgagcctggaggcaggctagacatcagggaagaggcagagggaagtccagagaccaaggtggaggctggaaaggccagtgaggatagaggggaggctgggggaagccaagagacaaaagtcagattgagagaagggagtagggaagagacagaggccaaggaagagaagtccaaaggtcagaagaaggctgacagtatggaggctaaaggtgtggaggaaccaggaggagatgagtatacagatgagaaggaaaaagaaattgagagagaagaggatgaacaaagagaggaagcccaggtagaagctggaagggacctagagcaaggggcccaggaagatcaagttgctgaggcagganaatcgcttgagcctgggagacagaggttgcagtgagccnaggtcatgccactgcactccagcctgggtnacaaagactgtctn

SEQ ID NO: 307904 - DNA, 2975 bp, Homo sapiens
agttttaaacgcgcagccgagggccgcgcgcaggagtagggagggcctagggcggcggagccgactcgtcgcggccgaggcgcgcgcggtccgtgccggcgtcagtctgggattggccggcccgcgacttcctccgccccctgccaatcgccggggacgacttccgtgggtttttccggctcccccgcgtcgctaaggagcgacgggctgtcggccagaccccgagttctcggtgcgctcagcggccgccgacgctaggaggccgcgctccgcccccgctaccatgaggccccggaaagccttcctgctcctgctgctcttggggctggtgcagctgctggccgtggcgggtgccgagggcccggacgaggattcttctaacagagaaaatgccattgaggatgaagaggaggaggaggaggaagatgatgatgaggaagaagacgacttggaagttaaggaagaaaatggagtcttggtcctaaatgatgcaaactttgataattttgtggctgacaaagacacagtgctgctggagttttatgctccatggtgtggacattgcaagcagtttgctccggaatatgaaaaaattgccaacatattaaaggataaagatcctcccattcctgttgccaagatcgatgcaacctcagcgtctgtgctggccagcaggtttgatgtgagtggctaccccaccatcaagatccttaagaaggggcaggctgtagactacgagggctccagaacccaggaagaaattgttgccaaggtcagagaagtctcccagcccgactggacgcctccaccagaagtcacgcttgtgttgaccaaagagaactttgatgaagttgtgaatgatgcagatatcattctggtggagttttatgccccatggtgtggacactgcaagaaacttgcccccgagtatgagaaggccgccaaggagctcagcaagcgttctcctccaattcccctggcaaaggtcgacgccaccgcagaaacagacctggccaagaggtttgatgtctctggctatcccaccctgaaaattttccgcaaaggaaggccttatgactacaacggcccacgagaaaaatatggaatcgttgattacatgatcgagcagtccgggcctccctccaaggagattctgaccctgaagcaggtccaggagttcctgaaggatggagacgatgtcatcatcatcggggtctttaagggggagagtgacccagcctaccagcaataccaggatgccgctaacaacctgagagaagattacaaatttcaccacactttcagcacagaaatagcaaagttcttgaaagtctcccaggggcagttggttgtaatgcagcctgagaaattccagtccaagtatgagccccggagccacatgatggacgtccagggctccacccaggactcggccatcaaggacttcgtgctgaagtacgccctgcccctggttggccaccgcaaggtgtcaaacgatgctaagcgctacaccaggcgccccctggtggtcgtctactacagtgtggacttcagctttgattacagagctgcaactcagttttggcggagcaaagtcctagaggtggccaaggacttccctgagtacacctttgccattgcggacgaagaggactatgctggggaggtgaaggacctggggctcagcgagagtggggaggatgtcaatgccgccatcctggacgagagtgggaagaagttcgccatggagccagaggagtttgactctgacaccctccgcgagtttgtcactgctttcaaaaaaggaaaactgaagccagtcatcaaatcccagccagtgcccaagaacaacaagggacccgtcaaggtcgtggtgggaaagacctttgactccattgtgatggaccccaagaaggacgtcctcatcgagttctacgcgccatggtgcgggcactgcaagcagctagagcccgtgtacaacagcctggccaagaagtacaagggccaaaagggcctggtcatcgccaagatggacgccactgccaacgacgtccccagcgaccgctataaggtggagggcttccccaccatctacttcgcccccagtggggacaaaaagaacccagttaaatttgagggtggagacagagatctggagcatttgagcaagtttatagaagaacatgccacaaaactgagcaggaccaaggaagagctttgaaggcctgaggtctgcggaaggtgggaggaggcagacgccctgcgtggcccatggtcggggcgtccacgccgaggccggcaacaaacgacagtatctcggattcctttttttttttttttaattttttatactttggtgtttcacttcatgctctgaatactgaataaccatgaatgactgaatagtttagtccagatttttacagaggatacatctatttttatcattatttggggtttgaaaaatttttttttacaccttctaatttctttatttctcaaagcagataattcttctgtgtgaaaatgttttctttttttaatttaaggtttaaaattccttttccaaatcatgttgattttgctctttgctttttcgttgtctgagaaattgttggcgtagatttggcttctggtatgtgtttctgattgcttcctgttgagcacaaagtgagagctgccactgagcagccctgccaggggtgctgtttcaggctgggcatcgccaggcggcctccctgcaaaccaagggctgggggcaaaggggcatgatccagggtcccccagggtgggctcagctccagggagaggccacccacgtggcagccccacctcttgagagcccccagtgccggagcagaaaggaccctggacccagaggcagatactgcggggtggtagaaaaggtagagtaggctgtggcaatggaataaaacacgattaaaaacgttaagaactgcgttaaaaaaaaaaaa

SEQ ID NO: 307905 - DNA, 799 bp, Homo sapiens
agttttaaacgcgcagccgagggccgcgcgcaggagtagggagggcctagggcggcggagccgactcgtcgcggccgaggcgcgcgcggtccgtgccggcgtcagtctgggattggccggcccgcgacttcctccgccccctgccaatcgccggggacgacttccgtgggtttttccggctcccccgcgtcgctaaggagcgacgggctgtcggccagaccccgagttctcggtgcgctcagcggccgccgacgctaggaggccgcgctccgcccccgctaccatgaggccccggaaagccttcctgctcctgctgctcttggggctggtgcagctgctggccgtggcgggtgccgagggcccggacgaggattcttctaacagagaaaatgccattgaggatgaagaggaggaggaggaggaagatgatgatgaggaagaagacgacttggaagttaaggaagaaaatggagtcttggtcctaaatgatgcaaactttgataattttgtggctgacaaagacacagtgctgctggagttttatgctccatggtgtggacattgcaagcagtttgctccggaatatgaaaaaattgccaacatattaaaggataaagatcctcccattcctgttgccaagatcgatgcaacctcagcgtctgtgctggccagcaggtttgatgtgagtggctaccccaccatcaagatccttaagaaggggcaggctgtagactacgagggctccagaacccaggaagaaattgtgcctaagttcagaccgagatctctagatcaccca

SEQ ID NO: 307906 - DNA, 594 bp, Homo sapiens
agttttaaacgcgcagccgagggccgcgcgcaggagtagggagggcctagggcggcggagccgactcgtcgcggccgaggcgcgcgcggtccgtgccggcgtcagtctgggattggccggcccgcgacttcctccgccccctgccaatcgccggggacgacttccgtgggtttttccggctcccccgcgtcgctaaggagcgacgggctgtcggccagaccccgagttctcggtgcgctcagcggccgccgacgctaggaggccgcgctccgcccccgctaccatgaggccccggaaagccttcctgctcctgctgctcttggggctggtgcagctgctggccgtggcgggtgccgagggcccggacgaggattcttctaacagagaaaatgccattgaggatgaagaggaggaggaggaggaagatgatgatgaggaagaagacgacttggaagttaaggaagaaaacggtttgtttggaccccgatgaactttactttgataaatctgaggatttcaggggcgcaccggggcccgagtttgcctattcaaaggtgtttacatagccaagcggggggtggccgaaaaaggata

SEQ ID NO: 307907 - DNA, 799 bp, Homo sapiens
atgtctttcccagtgggtggaacccccaccccctgtatcaagtgtggaagtgccggtctttcatctatgaccctggggaatccattctttcccctcccctccccccattgtttctccagaagaaaagggaaaaggggaaacttcttgctctcctttaaattttaaatgttttactcacccgataaattttggaatatcctcctcgccgttttggatatcccggcctttttgtgtgggttttttttttccaattttgtgttggttttttttttttgtatttcagcccccggaaaagaaaaggtgagtgccacctcaggaagaaattgttgccaaggtcagagaagtctcccagcccgactggacgcctccaccagaagtcacgcttgtgttgaccaaagagaactttgatgaagttgtgaatgatgcagatatcattctggtggagttttatgccccatggtgtggacactgcaagaaacttgcccccgagtatgagaaactatgacaatggagaaaaacagctttaaagagcttagataatcctctgaattaaaggcatacttactacttctgaacacagaaaacgcctggggattgtactggcaagagaccacctattctaaacctcaggtacaaagtgtccacttgcctccagacaatactgaattgtactttctccttggtacttcccattcgatgaagcagtctctctctgtggtctctgaaccactatttataaaagtgatgactccaggaccacagcccataccacctgaggcaatccctaagttcagagaca

SEQ ID NO: 307908 - DNA, 225 bp, Homo sapiens
aattcaagcttctaacgatgtacggggagtcccccagggtgggctcagctccagggagaggccacccacgtggcagccccacctcttgagagcccccagtgccggagcagaaaggaccctggacccagaggcagatactgcggggtggtagaaaaggtagagtaggctgtggcaatggaataaaacacgattaaaaacgttaagaactgcgttaaaaaaaaaaaa

SEQ ID NO: 307909 - DNA, 556 bp, Homo sapiens
agttttaaacgcgcagccgagggccgcgcgcaggagtagggagggcctagggcggcggagccgactcgtcgcggccgaggcgcgcgcggtccgtgccggcgtcagtctgggattggccggcccgcgacttcctccgccccctgccaatcgccggggacgacttccgtgggtttttccggctcccccgcgtcgctaaggagcgacgggctgtcggccagaccccgagttctcggtgcgctcagcggccgccgacgctaggaggccgcgctccgcccccgctaccatgaggccccggaaagccttcctgctcctgctgctcttggggctggtgcagctgctggccgtggcgggtgccgagggcccggacgaggattttcgtcaggtccaggctaactccaggcgaacgcgcccaggcagtgggaagggagagggagagccactggagagaaggggcgagggcgtgaagcaagtgcgagttctttggaacagcaagcattccttttctgtgattcttctaacagagaagacgacctgtaagtcaagggcgctggcgtcc

SEQ ID NO: 307910 - DNA, 2927 bp, Homo sapiens
agttttaaacgcgcagccgagggccgcgcgcaggagtagggagggcctagggcggcggagccgactcgtcgcggccgaggcgcgcgcggtccgtgccggcgtcagtctgggattggccggcccgcgacttcctccgccccctgccaatcgccggggacgacttccgtgggtttttccggctcccccgcgtcgctaaggagcgacgggctgtcggccagaccccgagttctcggtgcgctcagcggccgccgacgctaggaggccgcgctccgcccccgctaccatgaggccccggaaagccttcctgctcctgctgctcttggggctggtgcagctgctggccgtggcgggtgccgagggcccggacgaggattcttctaacagagaaaatgccattgaggatgaagaggaggaggaggaggaagatgatgatgaggaagaagacgacttggaagttaaggaagaaaatggagtcttggtcctaaatgatgcaaactttgataattttgtggctgacaaagacacagtgctgctggagttttatgctccatggtgtggacattgcaagcagtttgctccggaatatgaaaaaattgccaacatattaaaggataaagatcctcccattcctgttgccaagatcgatgcaacctcagcgtctgtgctggccagcaggtttgatgtgagtggctaccccaccatcaagatccttaagaaggggcaggctgtagactacgagggctccagaacccaggaagaaattgttgccaaggtcagagaagtctcccagcccgactggacgcctccaccagaagtcacgcttgtgttgaccaaagagaactttgatgaagttgtgaatgatgcagatatcattctggtggagttttatgccccatggtgtggacactgcaagaaacttgcccccgagtatgagaaggccgccaaggagctcagcaagcgttctcctccaattcccctggcaaaggtcgacgccaccgcagaaacagacctggccaagaggtttgatgtctctggctatcccaccctgaaaattttccgcaaaggaaggccttatgactacaacggcccacgagaaaaatatggaatcgttgattacatgatcgagcagtccgggcctccctccaaggagattctgaccctgaagcaggtccaggagttcctgaaggatggagacgatgtcatcatcatcggggtctttaagggggagagtgacccagcctaccagcaataccaggatgccgctaacaacctgagagaagattacaaatttcaccacactttcagcacagaaatagcaaagttcttgaaagtctcccaggggcagttggttgtaatgcagcctgagaaattccagtccaagtatgagccccggagccacatgatggacgtccagggctccacccaggactcggccatcaaggacttcgtgctgaagtacgccctgcccctggttggccaccgcaaggtgtcaaacgatgctaagcgctacaccaggcgccccctggtggtcgtctactacagtgtggacttcagctttgattacagagctgcaactcagttttggcggagcaaagtcctagaggtggccaaggacttccctgagtacacctttgccattgcggacgaagaggactatgctggggaggtgaaggacctggggctcagcgagagtggggaggatgtcaatgccgccatcctggacgagagtgggaagaagttcgccatggagccagaggagtttgactctgacaccctccgcgagtttgtcactgctttcaaaaaaggaaaactgaagccagtcatcaaatcccagccagtgcccaagaacaacaagggacccgtcaaggtcgtggtgggaaagacctttgactccattgtgatggaccccaagaaggacgtcctcatcgagttctacgcgccatggtgcgggcactgcaagcagctagagcccgtgtacaacagcctggccaagaagtacaagggccaaaagggcctggtcatcgccaagatggacgccactgccaacgacgtccccagcgaccgctataaggtggagggcttccccaccatctacttcgcccccagtggggacaaaaagaacccagttaaatttgagggtggagacagagatctggagcatttgagcaagtttatagaagaacatgccacaaaactgagcaggaccaaggaagagctttgaaggcctgaggtctgcggaaggtgggaggaggcagacgccctgcgtggcccatggtcggggcgtccacgccgaggccggcaacaaacgacagtatctcggattcctttttttttttttttaattttttatactttggtgtttcacttcatgctctgaatactgaataaccatgaatgactgaatagtttagtccagatttttacagaggatacatctatttttatcattatttggggtttgaaaaatttttttttacaccttctaatttctttatttctcaaagcagataattcttctgtgtgaaaatgttttctttttttaatttaaggtttaaaattccttttccaaatcatgttgattttgctctttgctttttcgttgtctgagaaattgttggcgtagatttggcttctggtatgtgtttctgattgcttcctgttgagcacaaagtgagagctgccactgagcagccctgccaggggtgctgtttcaggctgggcatcgccaggcggcctccctgcaaaccaagggctgggggcaaaggggcatgatccaggccccacctcttgagagcccccagtgccggagcagaaaggaccctggacccagaggcagatactgcggggtggtagaaaaggtagagtaggctgtggcaatggaataaaacacgattaaaaacgttaagaactgcgttaaaaaaaaaaaa

SEQ ID NO: 307911 - DNA, 3059 bp, Homo sapiens
agttttaaacgcgcagccgagggccgcgcgcaggagtagggagggcctagggcggcggagccgactcgtcgcggccgaggcgcgcgcggtccgtgccggcgtcagtctgggattggccggcccgcgacttcctccgccccctgccaatcgccggggacgacttccgtgggtttttccggctcccccgcgtcgctaaggagcgacgggctgtcggccagaccccgagttctcggtgcgctcagcggccgccgacgctaggaggccgcgctccgcccccgctaccatgaggccccggaaagccttcctgctcctgctgctcttggggctggtgcagctgctggccgtggcgggtgccgagggcccggacgaggattcttctaacagagaaaatgccattgaggatgaagaggaggaggaggaggaagatgatgatgaggaagaagacgacttggaagttaaggaagaaaatggagtcttggtcctaaatgatgcaaactttgataattttgtggctgacaaagacacagtgctgctggagttttatgctccatggtgtggacattgcaagcagtttgctccggaatatgaaaaaattgccaacatattaaaggataaagatcctcccattcctgttgccaagatcgatgcaacctcagcgtctgtgctggccagcaggtttgatgtgagtggctaccccaccatcaagatccttaagaaggggcaggctgtagactacgagggctccagaacccaggaagatggagtcttcctctgtctcccaggctggagtgtgcagtggtgcaatcttggctcaccgaacagcctccacctccggggttcagaaattgttgccaaggtcagagaagtctcccagcccgactggacgcctccaccagaagtcacgcttgtgttgaccaaagagaactttgatgaagttgtgaatgatgcagatatcattctggtggagttttatgccccatggtgtggacactgcaagaaacttgcccccgagtatgagaaggccgccaaggagctcagcaagcgttctcctccaattcccctggcaaaggtcgacgccaccgcagaaacagacctggccaagaggtttgatgtctctggctatcccaccctgaaaattttccgcaaaggaaggccttatgactacaacggcccacgagaaaaatatggaatcgttgattacatgatcgagcagtccgggcctccctccaaggagattctgaccctgaagcaggtccaggagttcctgaaggatggagacgatgtcatcatcatcggggtctttaagggggagagtgacccagcctaccagcaataccaggatgccgctaacaacctgagagaagattacaaatttcaccacactttcagcacagaaatagcaaagttcttgaaagtctcccaggggcagttggttgtaatgcagcctgagaaattccagtccaagtatgagccccggagccacatgatggacgtccagggctccacccaggactcggccatcaaggacttcgtgctgaagtacgccctgcccctggttggccaccgcaaggtgtcaaacgatgctaagcgctacaccaggcgccccctggtggtcgtctactacagtgtggacttcagctttgattacagagctgcaactcagttttggcggagcaaagtcctagaggtggccaaggacttccctgagtacacctttgccattgcggacgaagaggactatgctggggaggtgaaggacctggggctcagcgagagtggggaggatgtcaatgccgccatcctggacgagagtgggaagaagttcgccatggagccagaggagtttgactctgacaccctccgcgagtttgtcactgctttcaaaaaaggaaaactgaagccagtcatcaaatcccagccagtgcccaagaacaacaagggacccgtcaaggtcgtggtgggaaagacctttgactccattgtgatggaccccaagaaggacgtcctcatcgagttctacgcgccatggtgcgggcactgcaagcagctagagcccgtgtacaacagcctggccaagaagtacaagggccaaaagggcctggtcatcgccaagatggacgccactgccaacgacgtccccagcgaccgctataaggtggagggcttccccaccatctacttcgcccccagtggggacaaaaagaacccagttaaatttgagggtggagacagagatctggagcatttgagcaagtttatagaagaacatgccacaaaactgagcaggaccaaggaagagctttgaaggcctgaggtctgcggaaggtgggaggaggcagacgccctgcgtggcccatggtcggggcgtccacgccgaggccggcaacaaacgacagtatctcggattcctttttttttttttttaattttttatactttggtgtttcacttcatgctctgaatactgaataaccatgaatgactgaatagtttagtccagatttttacagaggatacatctatttttatcattatttggggtttgaaaaatttttttttacaccttctaatttctttatttctcaaagcagataattcttctgtgtgaaaatgttttctttttttaatttaaggtttaaaattccttttccaaatcatgttgattttgctctttgctttttcgttgtctgagaaattgttggcgtagatttggcttctggtatgtgtttctgattgcttcctgttgagcacaaagtgagagctgccactgagcagccctgccaggggtgctgtttcaggctgggcatcgccaggcggcctccctgcaaaccaagggctgggggcaaaggggcatgatccagggtcccccagggtgggctcagctccagggagaggccacccacgtggcagccccacctcttgagagcccccagtgccggagcagaaaggaccctggacccagaggcagatactgcggggtggtagaaaaggtagagtaggctgtggcaatggaataaaacacgattaaaaacgttaagaactgcgttaaaaaaaaaaaa

SEQ ID NO: 307912 - DNA, 2537 bp, Homo sapiens
atgtctttcccagtgggtggaacccccaccccctgtatcaagtgtggaagtgccggtctttcatctatgaccctggggaatccattctttcccctcccctccccccattgtttctccagaagaaaagggaaaaggggaaacttcttgctctcctttaaattttaaatgttttactcacccgataaattttggaatatcctcctcgccgttttggatatcccggcctttttgtgtgggttttttttttccaattttgtgttggttttttttttttgtatttcagcccccggaaaagaaaaggtgagtgccacctcaggaagaaattgttgccaaggtcagagaagtctcccagcccgactggacgcctccaccagaagtcacgcttgtgttgaccaaagagaactttgatgaagttgtgaatgatgcagatatcattctggtggagttttatgccccatggtgtggacactgcaagaaacttgcccccgagtatgagaaggccgccaaggagctcagcaagcgttctcctccaattcccctggcaaaggtcgacgccaccgcagaaacagacctggccaagaggtttgatgtctctggctatcccaccctgaaaattttccgcaaaggaaggccttatgactacaacggcccacgagaaaaatatggaatcgttgattacatgatcgagcagtccgggcctccctccaaggagattctgaccctgaagcaggtccaggagttcctgaaggatggagacgatgtcatcatcatcggggtctttaagggggagagtgacccagcctaccagcaataccaggatgccgctaacaacctgagagaagattacaaatttcaccacactttcagcacagaaatagcaaagttcttgaaagtctcccaggggcagttggttgtaatgcagcctgagaaattccagtccaagtatgagccccggagccacatgatggacgtccagggctccacccaggactcggccatcaaggacttcgtgctgaagtacgccctgcccctggttggccaccgcaaggtgtcaaacgatgctaagcgctacaccaggcgccccctggtggtcgtctactacagtgtggacttcagctttgattacagagctgcaactcagttttggcggagcaaagtcctagaggtggccaaggacttccctgagtacacctttgccattgcggacgaagaggactatgctggggaggtgaaggacctggggctcagcgagagtggggaggatgtcaatgccgccatcctggacgagagtgggaagaagttcgccatggagccagaggagtttgactctgacaccctccgcgagtttgtcactgctttcaaaaaaggaaaactgaagccagtcatcaaatcccagccagtgcccaagaacaacaagggacccgtcaaggtcgtggtgggaaagacctttgactccattgtgatggaccccaagaaggacgtcctcatcgagttctacgcgccatggtgcgggcactgcaagcagctagagcccgtgtacaacagcctggccaagaagtacaagggccaaaagggcctggtcatcgccaagatggacgccactgccaacgacgtccccagcgaccgctataaggtggagggcttccccaccatctacttcgcccccagtggggacaaaaagaacccagttaaatttgagggtggagacagagatctggagcatttgagcaagtttatagaagaacatgccacaaaactgagcaggaccaaggaagagctttgaaggcctgaggtctgcggaaggtgggaggaggcagacgccctgcgtggcccatggtcggggcgtccacgccgaggccggcaacaaacgacagtatctcggattcctttttttttttttttaattttttatactttggtgtttcacttcatgctctgaatactgaataaccatgaatgactgaatagtttagtccagatttttacagaggatacatctatttttatcattatttggggtttgaaaaatttttttttacaccttctaatttctttatttctcaaagcagataattcttctgtgtgaaaatgttttctttttttaatttaaggtttaaaattccttttccaaatcatgttgattttgctctttgctttttcgttgtctgagaaattgttggcgtagatttggcttctggtatgtgtttctgattgcttcctgttgagcacaaagtgagagctgccactgagcagccctgccaggggtgctgtttcaggctgggcatcgccaggcggcctccctgcaaaccaagggctgggggcaaaggggcatgatccagggtcccccagggtgggctcagctccagggagaggccacccacgtggcagccccacctcttgagagcccccagtgccggagcagaaaggaccctggacccagaggcagatactgcggggtggtagaaaaggtagagtaggctgtggcaatggaataaaacacgattaaaaacgttaagaactgcgttaaaaaaaaaaaa

SEQ ID NO: 307913 - DNA, 2117 bp, Homo sapiens
gaccgaggagactattggagcatttgagcaagtttataggtgtggacactgcaagaaacttgcccccgagtatgagaaggccgccaaggagctcagcaagcgttctcctccaattcccctggcaaaggtcgacgccaccgcagaaacagacctggccaagaggtttgatgtctctggctatcccaccctgaaaattttccgcaaaggaaggccttatgactacaacggcccacgagaaaaatatggaatcgttgattacatgatcgagcagtccgggcctccctccaaggagattctgaccctgaagcaggtccaggagttcctgaaggatggagacgatgtcatcatcatcggggtctttaagggggagagtgacccagcctaccagcaataccaggatgccgctaacaacctgagagaagattacaaatttcaccacactttcagcacagaaatagcaaagttcttgaaagtctcccaggggcagttggttgtaatgcagcctgagaaattccagtccaagtatgagccccggagccacatgatggacgtccagggctccacccaggactcggccatcaaggacttcgtgctgaagtacgccctgcccctggttggccaccgcaaggtgtcaaacgatgctaagcgctacaccaggcgccccctggtggtcgtctactacagtgtggacttcagctttgattacagagctgcaactcagttttggcggagcaaagtcctagaggtggccaaggacttccctgagtacacctttgccattgcggacgaagaggactatgctggggaggtgaaggacctggggctcagcgagagtggggaggatgtcaatgccgccatcctggacgagagtgggaagaagttcgccatggagccagaggagtttgactctgacaccctccgcgagtttgtcactgctttcaaaaaaggaaaactgaagccagtcatcaaatcccagccagtgcccaagaacaacaagggacccgtcaaggtcgtggtgggaaagacctttgactccattgtgatggaccccaagaaggacgtcctcatcgagttctacgcgccatggtgcgggcactgcaagcagctagagcccgtgtacaacagcctggccaagaagtacaagggccaaaagggcctggtcatcgccaagatggacgccactgccaacgacgtccccagcgaccgctataaggtggagggcttccccaccatctacttcgcccccagtggggacaaaaagaacccagttaaatttgagggtggagacagagatctggagcatttgagcaagtttatagaagaacatgccacaaaactgagcaggaccaaggaagagctttgaaggcctgaggtctgcggaaggtgggaggaggcagacgccctgcgtggcccatggtcggggcgtccacgccgaggccggcaacaaacgacagtatctcggattcctttttttttttttttaattttttatactttggtgtttcacttcatgctctgaatactgaataaccatgaatgactgaatagtttagtccagatttttacagaggatacatctatttttatcattatttggggtttgaaaaatttttttttacaccttctaatttctttatttctcaaagcagataattcttctgtgtgaaaatgttttctttttttaatttaaggtttaaaattccttttccaaatcatgttgattttgctctttgctttttcgttgtctgagaaattgttggcgtagatttggcttctggtatgtgtttctgattgcttcctgttgagcacaaagtgagagctgccactgagcagccctgccaggggtgctgtttcaggctgggcatcgccaggcggcctccctgcaaaccaagggctgggggcaaaggggcatgatccagggtcccccagggtgggctcagctccagggagaggccacccacgtggcagccccacctcttgagagcccccagtgccggagcagaaaggaccctggacccagaggcagatactgcggggtggtagaaaaggtagagtaggctgtggcaatggaataaaacacgattaaaaacgttaagaactgcgttaaaaaaaaaaaa

SEQ ID NO: 307914 - DNA, 2651 bp, Homo sapiens
agttttaaacgcgcagccgagggccgcgcgcaggagtagggagggcctagggcggcggagccgactcgtcgcggccgaggcgcgcgcggtccgtgccggcgtcagtctgggattggccggcccgcgacttcctccgccccctgccaatcgccggggacgacttccgtgggtttttccggctcccccgcgtcgctaaggagcgacgggctgtcggccagaccccgagttctcggtgcgctcagcggccgccgacgctaggaggccgcgctccgcccccgctaccatgaggccccggaaagccttcctgctcctgctgctcttggggctggtgcagctgctggccgtggcgggtgccgagggcccggacgaggattcttctaacagagaaaatgccattgaggatgaagaggaggaggaggaggaagatgatgatgaggaagaagacgacttggaagttaaggaagaaaatggagtcttggtcctaaatgatgcaaactttgataattttgtggctgacaaagacacagtgctgctggagttttatgctccatggtgtggacattgcaagcagtttgctccggaatatgaaaaaattgccaacatattaaaggataaagatcctcccattcctgttgccaagatcgatgcaacctcagcgtctgtgctggccaccgcagaaacagacctggccaagaggtttgatgtctctggctatcccaccctgaaaattttccgcaaaggaaggccttatgactacaacggcccacgagaaaaatatggaatcgttgattacatgatcgagcagtccgggcctccctccaaggagattctgaccctgaagcaggtccaggagttcctgaaggatggagacgatgtcatcatcatcggggtctttaagggggagagtgacccagcctaccagcaataccaggatgccgctaacaacctgagagaagattacaaatttcaccacactttcagcacagaaatagcaaagttcttgaaagtctcccaggggcagttggttgtaatgcagcctgagaaattccagtccaagtatgagccccggagccacatgatggacgtccagggctccacccaggactcggccatcaaggacttcgtgctgaagtacgccctgcccctggttggccaccgcaaggtgtcaaacgatgctaagcgctacaccaggcgccccctggtggtcgtctactacagtgtggacttcagctttgattacagagctgcaactcagttttggcggagcaaagtcctagaggtggccaaggacttccctgagtacacctttgccattgcggacgaagaggactatgctggggaggtgaaggacctggggctcagcgagagtggggaggatgtcaatgccgccatcctggacgagagtgggaagaagttcgccatggagccagaggagtttgactctgacaccctccgcgagtttgtcactgctttcaaaaaaggaaaactgaagccagtcatcaaatcccagccagtgcccaagaacaacaagggacccgtcaaggtcgtggtgggaaagacctttgactccattgtgatggaccccaagaaggacgtcctcatcgagttctacgcgccatggtgcgggcactgcaagcagctagagcccgtgtacaacagcctggccaagaagtacaagggccaaaagggcctggtcatcgccaagatggacgccactgccaacgacgtccccagcgaccgctataaggtggagggcttccccaccatctacttcgcccccagtggggacaaaaagaacccagttaaatttgagggtggagacagagatctggagcatttgagcaagtttatagaagaacatgccacaaaactgagcaggaccaaggaagagctttgaaggcctgaggtctgcggaaggtgggaggaggcagacgccctgcgtggcccatggtcggggcgtccacgccgaggccggcaacaaacgacagtatctcggattcctttttttttttttttaattttttatactttggtgtttcacttcatgctctgaatactgaataaccatgaatgactgaatagtttagtccagatttttacagaggatacatctatttttatcattatttggggtttgaaaaatttttttttacaccttctaatttctttatttctcaaagcagataattcttctgtgtgaaaatgttttctttttttaatttaaggtttaaaattccttttccaaatcatgttgattttgctctttgctttttcgttgtctgagaaattgttggcgtagatttggcttctggtatgtgtttctgattgcttcctgttgagcacaaagtgagagctgccactgagcagccctgccaggggtgctgtttcaggctgggcatcgccaggcggcctccctgcaaaccaagggctgggggcaaaggggcatgatccagggtcccccagggtgggctcagctccagggagaggccacccacgtggcagccccacctcttgagagcccccagtgccggagcagaaaggaccctggacccagaggcagatactgcggggtggtagaaaaggtagagtaggctgtggcaatggaataaaacacgattaaaaacgttaagaactgcgttaaaaaaaaaaaa

SEQ ID NO: 307915 - DNA, 2105 bp, Homo sapiens
agttttaaacgcgcagccgagggccgcgcgcaggagtagggagggcctagggcggcggagccgactcgtcgcggccgaggcgcgcgcggtccgtgccggcgtcagtctgggattggccggcccgcgacttcctccgccccctgccaatcgccggggacgacttccgtgggtttttccggctcccccgcgtcgctaaggagcgacgggctgtcggccagaccccgagttctcggtgcgctcagcggccgccgacgctaggaggccgcgctccgcccccgctaccatgaggccccggaaagccttcctgctcctgctgctcttggggctggtgcagctgctggccgtggcgggtgccgagggcccggacgaggattcttctaacagagaaaatgccattgaggatgaagaggaggaggaggaggaagatgatgatgaggaagaagacgacttggaagttaaggaagaaaatggagtcttggtcctaaatgatgcaaactttgataattttgtggctgacaaagacacagtgctgctggagttttatgctccatggtgtggacattgcaagcagtttgctccggaatatgaaaaaattgccaacatattaaaggataaagatcctcccattcctgttgccaagatcgatgcaacctcagcgtctgtgctggccagcaggtttgatgtgagtggctaccccaccatcaagatccttaagaaggggcaggctgtagactacgagggctccagaacccaggaagaaattgttgccaaggtcagagaagtctcccagcccgactggacgcctccaccagaagtcacgcttgtgttgaccaaagagaactttgatgaagttgtgaatgatgcagatatcattctggtggagttttatgccccatggtgtggacactgcaagaaacttgcccccgagtatgagaaggccgccaaggagctcagcaagcgttctcctccaattcccctggcaaaggtcgacgccaccgcagaaacagacctggccaagaggtttgatgtctctggctatcccaccctgaaaattttccgcaaaggaaggccttatgactacaacggcccacgagaaaaatatggaatcgttgattacatgatcgagcagtccgggcctccctccaaggagattctgaccctgaagcaggtccaggagttcctgaaggatggagacgatgtcatcatcatcggggtctttaagggggagagtgacccagcctaccagcaataccaggatgccgctaacaacctgagagaagattacaaatttcaccacactttcagcacagaaatagcaaagttcttgaaagtctcccaggggcagttggttgtaatgcagcctgagaaattccagtccaagtatgagccccggagccacatgatggacgtccagggctccacccaggactcggccatcaaggacttcgtgctgaagtacgccctgcccctggttggccaccgcaaggtgtcaaacgatgctaagcgctacaccaggcgccccctggtggtcgtctactacagtgtggacttcagctttgattacagagctgcaactcagttttggcggagcaaagtcctagaggtggccaaggacttccctgagtacacctttgccattgcggacgaagaggactatgctggggaggtgaaggacctggggctcagcgagagtggggaggatgtcaatgccgccatcctggacgagagtgggaagaagttcgccatggagccagaggagtttgactctgacaccctccgcgagtttgtcactgctttcaaaaaaggaaaactgaagccagtcatcaaatcccagccagtgcccaagaacaacaagggacccgtcaaggtcgtggtgggaaagacctttgactccattgtgatggaccccaagaaggacgtcctcatcgagttctacgcgccatggtgcgggcactgcaagcagctagagcccgtgtacaacagcctggccaagaagtacaagggccaaaagggcctggtcatcgccaagatggacgccactgccaacgacgttcccccagacgggaaaaaaaaaccccggggggggcgggggttttttttttttt

SEQ ID NO: 307916 - DNA, 2098 bp, Homo sapiens
agttttaaacgcgcagccgagggccgcgcgcaggagtagggagggcctagggcggcggagccgactcgtcgcggccgaggcgcgcgcggtccgtgccggcgtcagtctgggattggccggcccgcgacttcctccgccccctgccaatcgccggggacgacttccgtgggtttttccggctcccccgcgtcgctaaggagcgacgggctgtcggccagaccccgagttctcggtgcgctcagcggccgccgacgctaggaggccgcgctccgcccccgctaccatgaggccccggaaagccttcctgctcctgctgctcttggggctggtgcagctgctggccgtggcgggtgccgagggcccggacgaggattcttctaacagagaaaatgccattgaggatgaagaggaggaggaggaggaagatgatgatgaggaagaagacgacttggaagttaaggaagaaaatggagtcttggtcctaaatgatgcaaactttgataattttgtggctgacaaagacacagtgctgctggagttttatgctccatggtgtggacattgcaagcagtttgctccggaatatgaaaaaattgccaacatattaaaggataaagatcctcccattcctgttgccaagatcgatgcaacctcagcgtctgtgctggccagcaggtttgatgtgagtggctaccccaccatcaagatccttaagaaggggcaggctgtagactacgagggctccagaacccaggaagaaattgttgccaaggtcagagaagtctcccagcccgactggacgcctccaccagaagtcacgcttgtgttgaccaaagagaactttgatgaagttgtgaatgatgcagatatcattctggtggagttttatgccccatggtgtggacactgcaagaaacttgcccccgagtatgagaaggccgccaaggagctcagcaagcgttctcctccaattcccctggcaaaggtcgacgccaccgcagaaacagacctggccaagaggtttgatgtctctggctatcccaccctgaaaattttccgcaaaggaaggccttatgactacaacggcccacgagaaaaatatggaatcgttgattacatgatcgagcagtccgggcctccctccaaggagattctgaccctgaagcaggtccaggagttcctgaaggatggagacgatgtcatcatcatcggggtctttaagggggagagtgacccagcctaccagcaataccaggatgccgctaacaacctgagagaagattacaaatttcaccacactttcagcacagaaatagcaaagttcttgaaagtctcccaggggcagttggttgtaatgcagcctgagaaattccagtccaagtatgagccccggagccacatgatggacgtccagggctccacccaggactcggccatcaaggacttcgtgctgaagtacgccctgcccctggttggccaccgcaaggtgtcaaacgatgctaagcgctacaccaggcgccccctggtggtcgtctactacagtgtggacttcagctttgattacagagctgcaactcagttttggcggagcaaagtcctagaggtggccaaggacttccctgagtacacctttgccattgcggacgaagaggactatgctggggaggtgaaggacctggggctcagcgagagtggggaggatgtcaatgccgccatcctggacgagagtgggaagaagttcgccatggagccagaggagtttgactctgacaccctccgcgagtttgtcactgctttcaaaaaaggaaaactgaagccagtcatcaaatcccagccagtgcccaagaacaacaagggacccgtcaaggtcgtggtgggaaagacctttgactccattgtgatggaccccaagaaggacgtcctcatcgagttctacgcgccatggtgcgggcactgcaagcagctagagcccgtgtacaacagcctggccaagaagtacaagggccaaaagggcctggtcatcgccaagatggacgccactgccaacgaagtttccccaaggccggggtccaccccccgggggcgcccccctcttttt

SEQ ID NO: 307917 - DNA, 913 bp, Homo sapiens
tggcacactctagagtatccccactcctaccccacggttgctggtgacagcaaaaagaacccagttaaatttgagggtggagacagagatctggagcatttgagcaagtttatagaagaacatgccacaaaactgagcaggaccaaggaagagctttgaaggcctgaggtctgcggaaggtgggaggaggcagacgccctgcgtggcccatggtcggggcgtccacgccgaggccggcaacaaacgacagtatctcggattcctttttttttttttttaattttttatactttggtgtttcacttcatgctctgaatactgaataaccatgaatgactgaatagtttagtccagatttttacagaggatacatctatttttatcattatttggggtttgaaaaatttttttttacaccttctaatttctttatttctcaaagcagataattcttctgtgtgaaaatgttttctttttttaatttaaggtttaaaattccttttccaaatcatgttgattttgctctttgctttttcgttgtctgagaaattgttggcgtagatttggcttctggtatgtgtttctgattgcttcctgttgagcacaaagtgagagctgccactgagcagccctgccaggggtgctgtttcaggctgggcatcgccaggcggcctccctgcaaaccaagggctgggggcaaaggggcatgatccagggtcccccagggtgggctcagctccagggagaggccacccacgtggcagccccacctcttgagagcccccagtgccggagcagaaaggaccctggacccagaggcagatactgcggggtggtagaaaaggtagagtaggctgtggcaatggaataaaacacgattaaaaacgttaagaactgcgttaaaaaaaaaaaa

SEQ ID NO: 307918 - DNA, 1414 bp, Homo sapiens
agttttaaacgcgcagccgagggccgcgcgcaggagtagggagggcctagggcggcggagccgactcgtcgcggccgaggcgcgcgcggtccgtgccggcgtcagtctgggattggccggcccgcgacttcctccgccccctgccaatcgccggggacgacttccgtgggtttttccggctcccccgcgtcgctaaggagcgacgggctgtcggccagaccccgagttctcggtgcgctcagcggccgccgacgctaggaggccgcgctccgcccccgctaccatgaggccccggaaagccttcctgctcctgctgctcttggggctggtgcagctgctggccgtggcgggtgccgagggcccggacgaggattcttctaacagagaaaatgccattgaggatgaagaggaggaggaggaggaagatgatgatgaggaagaagacgacttggaagttaaggaagaaaatggagtcttggtcctaaatgatgcaaactttgataattttgtggctgacaaagacacagtgctgctggagttttatgctccatggtgtggacattgcaagcagtttgctccggaatatgaaaaaattgccaacatattaaaggataaagatcctcccattcctgttgccaagatcgatgcaacctcagcgtctgtgctggccagcaggtttgatgtgagtggctaccccaccatcaagatccttaagaaggggcaggctgtagactacgagggctccagaacccaggaagaaattgttgccaaggtcagagaagtctcccagcccgactggacgcctccaccagaagtcacgcttgtgttgaccaaagagaactttgatgaagttgtgaatgatgcagatatcattctggtggagttttatgccccatggtgtggacactgcaagaaacttgcccccgagtatgagaaggccgccaaggagctcagcaagcgttctcctccaattcccctggcaaaggtcgacgccaccgcagaaacagacctggccaagaggtttgatgtctctggctatcccaccctgaaaattttccgcaaaggaaggccttatgactacaacggcccacgagaaaaatatgaatcgttgattacgcgggttcaggaggtacccaaactgaaggtatgtgcactgcgcgtgaccagccgggccgcagcgcatcctcagggcagggggcaagatcctcactttcgaccagctggccctggactcccctaagggctgtggcactgtcctgctctccggtcctcgcaagggccgagaggtgtaccggcatttcggcaagcccaggaacccgcacagcacacaaacctacgtcgtccaaggccgaagtcgagcgtgcagaggcgagggcagcggggtaaaaaaatacccggatctatctttttaaag

SEQ ID NO: 307919 - DNA, 614 bp, Homo sapiens
aattcaagcttctaacgatgtacggggacatgaatgactgaatagtttagtccagatttttacagaggatacatctatttttatcattatttggggtttgaaaaatttttttttacaccttctaatttctttatttctcaaagcagataattcttctgtgtgaaaatgttttctttttttaatttaaggtttaaaattccttttccaaatcatgttgattttgctctttgctttttcgttgtctgagaaattgttggcgtagatttggcttctggtatgtgtttctgattgcttcctgttgagcacaaagtgagagctgccactgagcagccctgccaggggtgctgtttcaggctgggcatcgccaggcggcctccctgcaaaccaagggctgggggcaaaggggcatgatccagggtcccccagggtgggctcagctccagggagaggccacccacgtggcagccccacctcttgagagcccccagtgccggagcagaaaggaccctggacccagaggcagatactgcggggtggtagaaaaggtagagtaggctgtggcaatggaataaaacacgattaaaaacgttaagaactgcgttaaaaaaaaaaaa

SEQ ID NO: 307920 - DNA, 1351 bp, Homo sapiens
agttttaaacgcgcagccgagggccgcgcgcaggagtagggagggcctagggcggcggagccgactcgtcgcggccgaggcgcgcgcggtccgtgccggcgtcagtctgggattggccggcccgcgacttcctccgccccctgccaatcgccggggacgacttccgtgggtttttccggctcccccgcgtcgctaaggagcgacgggctgtcggccagaccccgagttctcggtgcgctcagcggccgccgacgctaggaggccgcgctccgcccccgctaccatgaggccccggaaagccttcctgctcctgctgctcttggggctggtgcagctgctggccgtggcgggtgccgagggcccggacgaggattcttctaacagagaaaatgccattgaggatgaagaggaggaggaggaggaagatgatgatgaggaagaagacgacttggaagttaaggaagaaaatggagtcttggtcctaaatgatgcaaactttgataattttgtggctgacaaagacacagtgctgctggagttttatgctccatggtgtggacattgcaagcagtttgctccggaatatgaaaaaattgccaacatattaaaggataaagatcctcccattcctgttgccaagatcgatgcaacctcagcgtctgtgctggccagcaggtttgatgtgagtggctaccccaccatcaagatccttaagaaggggcaggctgtagactacgagggctccagaacccaggaagatggagtcttcctctgtctcccaggctggagtgtgcagtggtgcaatcttggctcaccgaacagcctccacctccggggttcagaaattgttgccaaggtcagagaagtctcccagcccgactggacgcctccaccagaagtcacgcttgtgttgaccaaagagaactttgatgaagttgtgaatgatgcagatatcattctggtggagttttatgccccatggtgtggacactgcaagaaacttgcccccgagtatgagaaggccgccaaggagctcagcaagcgttctcctccaattcccctggcaaaggtcgacgccaccgcagaaacagacctggccaagaggtttgatgtctctggctatcccaccctgaaaattttccgcaaaggaaggccttatgactacaacggcccacgagaaaaatatggaatcgttgattacatgatcgagcagtccgggcctccctccaaggagattctgaccctgaagcaggtccaggagttcctgaaggatggagacgatgtcatcatcatcggggtctttaagggggagatttccaatttaacccacttttcgcccgtggccgtcttg

SEQ ID NO: 307921 - DNA, 875 bp, Homo sapiens
agttttaaacgcgcagccgagggccgcgcgcaggagtagggagggcctagggcggcggagccgactcgtcgcggccgaggcgcgcgcggtccgtgccggcgtcagtctgggattggccggcccgcgacttcctccgccccctgccaatcgccggggacgacttccgtgggtttttccggctcccccgcgtcgctaaggagcgacgggctgtcggccagaccccgagttctcggtgcgctcagcggccgccgacgctaggaggccgcgctccgcccccgctaccatgaggccccggaaagccttcctgctcctgctgctcttggggctggtgcagctgctggccgtggcgggtgccgagggcccggacgaggattcttctaacagagaaaatgccattgaggatgaagaggaggaggaggaggaagatgatgatgaggaagaagacgacttggaagttaaggaagaaaatggagtcttggtcctaaatgatgcaaactttgataattttgtggctgacaaagacacagtgctgctggagttttatgctccatggtgtggacattgcaagcagtttgctccggaatatgaaaaaattgccaacatattaaaggataaagatcctcccattcctgttgccaagatcgatgcaacctcagcgtctgtgctggccagcaggtttgatgtgagtggctaccccaccatcaagatccttaagaaggggcaggctgtagactacgagggctccagaacccaggaagacggagttttgcttctgtggcccaggctgcagtacgatggcgcaatctcagctcaccgcaacctccacctcccggattcaagtgattctcctgcctcagcctccagagtagctgtga

SEQ ID NO: 307922 - DNA, 3095 bp, Homo sapiens
agttttaaacgcgcagccgagggccgcgcgcaggagtagggagggcctagggcggcggagccgactcgtcgcggccgaggcgcgcgcggtccgtgccggcgtcagtctgggattggccggcccgcgacttcctccgccccctgccaatcgccggggacgacttccgtgggtttttccggctcccccgcgtcgctaaggagcgacgggctgtcggccagaccccgagttctcggtgcgctcagcggccgccgacgctaggaggccgcgctccgcccccgctaccatgaggccccggaaagccttcctgctcctgctgctcttggggctggtgcagctgctggccgtggcgggtgccgagggcccggacgaggattcttctaacagagaaaatgccattgaggatgaagaggaggaggaggaggaagatgatgatgaggaagaagacgacttggaagttaaggaagaaaatggagtcttggtcctaaatgatgcaaactttgataattttgtggctgacaaagacacagtgctgctggagttttatgctccatggtgtggacattgcaagcagtttgctccggaatatgaaaaaattgccaacatattaaaggataaagatcctcccattcctgttgccaagatcgatgcaacctcagcgtctgtgctggccagcaggtttgatgtgagtggctaccccaccatcaagatccttaagaaggggcaggctgtagactacgagggctccagaacccaggaagaaattgttgccaaggtcagagaagtctcccagcccgactggacgcctccaccagaagtcacgcttgtgttgaccaaagagaactttgatgaagttgtgaatgatgcagatatcattctggtggagttttatgccccatggtgtggacactgcaagaaacttgcccccgagtatgagaaggccgccaaggagctcagcaagcgttctcctccaattcccctggcaaaggtcgacgccaccgcagaaacagacctggccaagaggtttgatgtctctggctatcccaccctgaaaattttccgcaaaggaaggccttatgactacaacggcccacgagaaaaatatggaatcgttgattacatgatcgagcagtccgggcctccctccaaggagattctgaccctgaagcaggtccaggagttcctgaaggatggagacgatgtcatcatcatcggggtctttaagggggagagtgacccagcctaccagcaataccaggatgccgctaacaacctgagagaagattacaaatttcaccacactttcagcacagaaatagcaaagttcttgaaagtctcccaggggcagttggttgtaatgcagcctgagaaattccagtccaagtatgagccccggagccacatgatggacgtccagggctccacccaggactcggccatcaaggacttcgtgctgaagtacgccctgcccctggttggccaccgcaaggtgtcaaacgatgctaagcgctacaccaggcgccccctggtggtcgtctactacagtgtggacttcagctttgattacagagctgcaactcagttttggcggagcaaagtcctagaggtggccaaggacttccctgagtacacctttgccattgcggacgaagaggactatgctggggaggtgaaggacctggggctcagcgagagtggggaggatgtcaatgccgccatcctggacgagagtgggaagaagttcgccatggagccagaggagtttgactctgacaccctccgcgagtttgtcactgctttcaaaaaaggaaaactgaagccagtcatcaaatcccagccagtgcccaagaacaacaagggacccgtcaaggtcgtggtgggaaagacctttgactccattgtgatggaccccaagaaggacgtcctcatcgagttctacgcgccatggtgcgggcactgcaagcagctagagcccgtgtacaacagcctggccaagaagtacaagggccaaaagggcctggtcatcgccaagatggacgccactgccaacgacgtccccagcgaccgctataaggtggagggcttccccaccatctacttcgcccccagtggggacaaaaagaacccagttaaatttgagggtggagacagagatctggagcatttgagcaagtttatagaagaacatgccacaaaactgagcaggaccaaggaagagctttgaaggcctgaggtctgcggaaggtgggaggaggcagacgccctgcgtggcccatggtcggggcgtccacgccgaggccggcaacaaacgacagtatctcggattcctttttttttttttttaattttttatactttggtgtttcacttcatgctctgaatactgaataaccatgaatgactgaatagtttagtccagatttttacagaggatacatctatttttatcattatttggggtttgaaaaatttttttttacaccttctaatttctttatttctcaaagcagataattcttctgtgtgaaaatgttttctttttttaatttaaggtttaaaattccttttccaaatcatgttgattaaaaaaaaaaaaaaaaaaaaaaaaaaaaaaaaaaaaagaagggctgggaccaaccgggtgagatccacaagtctctggatgtggctgaaggcaaatacacaattgaagtactttctgttttgaagtgctttcccttttgaatctggtttgaaacatgcagcttctgtctctagcccaaggaaagaccaaaacatagggaaataaaagcatttatctttgtcttggaagtaattgttgaagttgtgcagttgatcagtgcacagttagctgcaatgtttatagaaattgattgttaaaccaaatttacactggcatgtgtggtgtagtttctaaaaggcacttcacatttgaaatttttcttaccttagaaagtttctagtgatctaaatgtctagttttgtattcttttgtgtgtgttcactgtttctcagtattaccacttgaataattctctgtacaggggggtttgtgctatacactgggatgtctaattgcagcaataaagcctttcttt

SEQ ID NO: 307923 - DNA, 767 bp, Homo sapiens
agttttaaacgcgcagccgagggccgcgcgcaggagtagggagggcctagggcggcggagccgactcgtcgcggccgaggcgcgcgcggtccgtgccggcgtcagtctgggattggccggcccgcgacttcctccgccccctgccaatcgccggggacgacttccgtgggtttttccggctcccccgcgtcgctaaggagcgacgggctgtcggccagaccccgagttctcggtgcgctcagcggccgccgacgctaggaggccgcgctccgcccccgctaccatgaggccccggaaagccttcctgctcctgctgctcttggggctggtgcagctgctggccgtggcgggtgccgagggcccggacgaggattttcgtcaggtccaggctaactccaggcgaacgcgcccaggcagtgggaagggagagggagagccactggagagaaggggcgagggcgtgaagcaagtgcgagttctttggaacagcaagcattccttttctgtgattcttctaacagagcccgtctctttccccgccatcccatctccccacctctccctcctcccaccctctctcccctctctcctctcccctccctccaccccctactcccccatctctcctaccttcctatccgccctcccacacctgttctcactccactaccctcctcccccccccctcacccccatcctcacccctctctccccacgccctctccccctcatccatccccccccgctcctcctcctttcttcctcct

SEQ ID NO: 307924 - DNA, 3196 bp, Homo sapiens
  misc_feature (2598)..(2598): n is a, c, g, or t
agttttaaacgcgcagccgagggccgcgcgcaggagtagggagggcctagggcggcggagccgactcgtcgcggccgaggcgcgcgcggtccgtgccggcgtcagtctgggattggccggcccgcgacttcctccgccccctgccaatcgccggggacgacttccgtgggtttttccggctcccccgcgtcgctaaggagcgacgggctgtcggccagaccccgagttctcggtgcgctcagcggccgccgacgctaggaggccgcgctccgcccccgctaccatgaggccccggaaagccttcctgctcctgctgctcttggggctggtgcagctgctggccgtggcgggtgccgagggcccggacgaggattcttctaacagagaaaatgccattgaggatgaagaggaggaggaggaggaagatgatgatgaggaagaagacgacttggaagttaaggaagaaaatggagtcttggtcctaaatgatgcaaactttgataattttgtggctgacaaagacacagtgctgctggagttttatgctccatggtgtggacattgcaagcagtttgctccggaatatgaaaaaattgccaacatattaaaggataaagatcctcccattcctgttgccaagatcgatgcaacctcagcgtctgtgctggccagcaggtttgatgtgagtggctaccccaccatcaagatccttaagaaggggcaggctgtagactacgagggctccagaacccaggaagaaattgttgccaaggtcagagaagtctcccagcccgactggacgcctccaccagaagtcacgcttgtgttgaccaaagagaactttgatgaagttgtgaatgatgcagatatcattctggtggagttttatgccccatggtgtggacactgcaagaaacttgcccccgagtatgagaaggccgccaaggagctcagcaagcgttctcctccaattcccctggcaaaggtcgacgccaccgcagaaacagacctggccaagaggtttgatgtctctggctatcccaccctgaaaattttccgcaaaggaaggccttatgactacaacggcccacgagaaaaatatggaatcgttgattacatgatcgagcagtccgggcctccctccaaggagattctgaccctgaagcaggtccaggagttcctgaaggatggagacgatgtcatcatcatcggggtctttaagggggagagtgacccagcctaccagcaataccaggatgccgctaacaacctgagagaagattacaaatttcaccacactttcagcacagaaatagcaaagttcttgaaagtctcccaggggcagttggttgtaatgcagcctgagaaattccagtccaagtatgagccccggagccacatgatggacgtccagggctccacccaggactcggccatcaaggacttcgtgctgaagtacgccctgcccctggttggccaccgcaaggtgtcaaacgatgctaagcgctacaccaggcgccccctggtggtcgtctactacagtgtggacttcagctttgattacagagctgcaactcagttttggcggagcaaagtcctagaggtggccaaggacttccctgagtacacctttgccattgcggacgaagaggactatgctggggaggtgaaggacctggggctcagcgagagtggggaggatgtcaatgccgccatcctggacgagagtgggaagaagttcgccatggagccagaggagtttgactctgacaccctccgcgagtttgtcactgctttcaaaaaaggaaaactgaagccagtcatcaaatcccagccagtgcccaagaacaacaagggacccgtcaaggtcgtggtgggaaagacctttgactccattgtgatggaccccaagaaggacgtcctcatcgagttctacgcgccatggtgcgggcactgcaagcagctagagcccgtgtacaacagcctggccaagaagtacaagggccaaaagggcctggtcatcgccaagatggacgccactgccaacgacgtccccagcgaccgctataaggtggagggcttccccaccatctacttcgcccccagtggggacaaaaagaacccagttaaatttgagggtggagacagagatctggagcatttgagcaagtttatagaagaacatgccacaaaactgagcaggaccaaggaagagctttgaaggcctgaggtctgcggaaggtgggaggaggcagacgccctgcgtggcccatggtcggggcgtccacgccgaggccggcaacaaacgacagtatctcggattcctttttttttttttttaattttttatactttggtgtttcacttcatgctctgaatactgaataaccatgaatgactgaatagtttagtccagatttttacagaggatacatctatttttatcattatttggggtttgaaaaatttttttttacaccttctaatttctttatttctcaaagcagataattcttctgtgtgaaaatgttttctttttttaatttaaggtttaaaattccttttccaaatcatgttgattaaaaaaaaaaaacaaanaaaaaaaaaaaaaaaaaaaaaaaaaaaaaaaaaaaaaaaaaaaaaaaaaaaaaaaaaaaaaaaaaaaaaaaacaaaaaaagaaaaaaaaaaaaaaaaaaaaaaaaaaaaaaaaagaagaagggggggcggggcgcagcatacattcccggcgcggggggggcacaaagcatgccagcacacctcttcagatgaggaaggagggggcacaaaagggggggattaaatagagacgggcggatctgagggggcatagataaaaacaaaagcaaggttgacggagaaaaggacaacacacaagtgtaccggcgctcgtagacaactatgaagagcgaaaacaaacacaacaacatcatagatggaggcgggggaccgacaacatacataagaagtgacaaccaacccaaccaccagaaaagacccaagccaacgcaagagagagagaacataaaaaacaacataaggagtcgttagagatggagataataccaaccaagtagcaccaacgcgcacgagagaccaaaaaacaccgcaacacaacaagatcacaacaaaaacacacaaacacacgcgagcgcgcacaacaacaaagggaacaaa

SEQ ID NO: 307925 - DNA, 2936 bp, Homo sapiens
agttttaaacgcgcagccgagggccgcgcgcaggagtagggagggcctagggcggcggagccgactcgtcgcggccgaggcgcgcgcggtccgtgccggcgtcagtctgggattggccggcccgcgacttcctccgccccctgccaatcgccggggacgacttccgtgggtttttccggctcccccgcgtcgctaaggagcgacgggctgtcggccagaccccgagttctcggtgcgctcagcggccgccgacgctaggaggccgcgctccgcccccgctaccatgaggccccggaaagccttcctgctcctgctgctcttggggctggtgcagctgctggccgtggcgggtgccgagggcccggacgaggattcttctaacagagaaaatgccattgaggatgaagaggaggaggaggaggaagatgatgatgaggaagaagacgacttggaagttaaggaagaaaatggagtcttggtcctaaatgatgcaaactttgataattttgtggctgacaaagacacagtgctgctggagttttatgctccatggtgtggacattgcaagcagtttgctccggaatatgaaaaaattgccaacatattaaaggataaagatcctcccattcctgttgccaagatcgatgcaacctcagcgtctgtgctggccagcaggtttgatgtgagtggctaccccaccatcaagatccttaagaaggggcaggctgtagactacgagggctccagaacccaggaagaaattgttgccaaggtcagagaagtctcccagcccgactggacgcctccaccagaagtcacgcttgtgttgaccaaagagaactttgatgaagttgtgaatgatgcagatatcattctggtggagttttatgccccatgggccgccaaggagctcagcaagcgttctcctccaattcccctggcaaaggtcgacgccaccgcagaaacagacctggccaagaggtttgatgtctctggctatcccaccctgaaaattttccgcaaaggaaggccttatgactacaacggcccacgagaaaaatatggaatcgttgattacatgatcgagcagtccgggcctccctccaaggagattctgaccctgaagcaggtccaggagttcctgaaggatggagacgatgtcatcatcatcggggtctttaagggggagagtgacccagcctaccagcaataccaggatgccgctaacaacctgagagaagattacaaatttcaccacactttcagcacagaaatagcaaagttcttgaaagtctcccaggggcagttggttgtaatgcagcctgagaaattccagtccaagtatgagccccggagccacatgatggacgtccagggctccacccaggactcggccatcaaggacttcgtgctgaagtacgccctgcccctggttggccaccgcaaggtgtcaaacgatgctaagcgctacaccaggcgccccctggtggtcgtctactacagtgtggacttcagctttgattacagagctgcaactcagttttggcggagcaaagtcctagaggtggccaaggacttccctgagtacacctttgccattgcggacgaagaggactatgctggggaggtgaaggacctggggctcagcgagagtggggaggatgtcaatgccgccatcctggacgagagtgggaagaagttcgccatggagccagaggagtttgactctgacaccctccgcgagtttgtcactgctttcaaaaaaggaaaactgaagccagtcatcaaatcccagccagtgcccaagaacaacaagggacccgtcaaggtcgtggtgggaaagacctttgactccattgtgatggaccccaagaaggacgtcctcatcgagttctacgcgccatggtgcgggcactgcaagcagctagagcccgtgtacaacagcctggccaagaagtacaagggccaaaagggcctggtcatcgccaagatggacgccactgccaacgacgtccccagcgaccgctataaggtggagggcttccccaccatctacttcgcccccagtggggacaaaaagaacccagttaaatttgagggtggagacagagatctggagcatttgagcaagtttatagaagaacatgccacaaaactgagcaggaccaaggaagagctttgaaggcctgaggtctgcggaaggtgggaggaggcagacgccctgcgtggcccatggtcggggcgtccacgccgaggccggcaacaaacgacagtatctcggattcctttttttttttttttaattttttatactttggtgtttcacttcatgctctgaatactgaataaccatgaatgactgaatagtttagtccagatttttacagaggatacatctatttttatcattatttggggtttgaaaaatttttttttacaccttctaatttctttatttctcaaagcagataattcttctgtgtgaaaatgttttctttttttaatttaaggtttaaaattccttttccaaatcatgttgattttgctctttgctttttcgttgtctgagaaattgttggcgtagatttggcttctggtatgtgtttctgattgcttcctgttgagcacaaagtgagagctgccactgagcagccctgccaggggtgctgtttcaggctgggcatcgccaggcggcctccctgcaaaccaagggctgggggcaaaggggcatgatccagggtcccccagggtgggctcagctccagggagaggccacccacgtggcagccccacctcttgagagcccccagtgccggagcagaaaggaccctggacccagaggcagatactgcggggtggtagaaaaggtagagtaggctgtggcaatggaataaaacacgattaaaaacgttaagaactgcgttaaaaaaaaaaaa

SEQ ID NO: 307926 - DNA, 2931 bp, Homo sapiens
agttttaaacgcgcagccgagggccgcgcgcaggagtagggagggcctagggcggcggagccgactcgtcgcggccgaggcgcgcgcggtccgtgccggcgtcagtctgggattggccggcccgcgacttcctccgccccctgccaatcgccggggacgacttccgtgggtttttccggctcccccgcgtcgctaaggagcgacgggctgtcggccagaccccgagttctcggtgcgctcagcggccgccgacgctaggaggccgcgctccgcccccgctaccatgaggccccggaaagccttcctgctcctgctgctcttggggctggtgcagctgctggccgtggcgggtgccgagggcccggacgaggattcttctaacagagaaaatgccattgaggatgaagaggaggaggaggaggaagatgatgatgaggaagaagacgacttggaagttaaggaagaaaatggagtcttggtcctaaatgatgcaaactttgataattttgtggctgacaaagacacagtgctgctggagttttatgctccatggtgtggacattgcaagcagtttgctccggaatatgaaaaaattgccaacatattaaaggataaagatcctcccattcctgttgccaagatcgatgcaacctcagcgtctgtgctggccagcaggtttgatgtgagtggctaccccaccatcaagatccttaagaaggggcaggctgtagactacgagggctccagaacccaggaagaaattgttgccaaggtcagagaagtctcccagcccgactggacgcctccaccagaagtcacgcttgtgttgaccaaagagaactttgatgaagttgtgaatgatgcagatatcattctggtggagttttatgccccatggtgtggacactgcaagaaacttgcccccgagtatgagaaggccgccaaggagctcagcaagcgttctcctccaattcccctggcaaaggtcgacgccaccgcagaaacagacctggccaagaggtttgatgtctctggctatcccaccctgaaaattttccgcaaaggaaggccttatgactacaacggcccacgagaaaaatatggaatcgttgattacatgatcgagcagtccgggcctccctccaaggagattctgaccctgaagcaggtccaggagttcctgaaggatggagacgatgtcatcatcatcggggtctttaagggggagagtgacccagcctaccagcaataccaggatgccgctaacaacctgagagaagattacaaatttcaccacactttcagcacagaaatagcaaagttcttgaaagtctcccaggggcagttggttgtaatgcagcctgagaaattccagtccaagtatgagccccggagccacatgatggacgtccagggctccacccaggactcggccatcaaggacttcgtgctgaagtacgccctgcccctggttggccaccgcaaggtgtcaaacgatgctaagcgctacaccaggcgccccctggtggtcgtctactacagtgtggacttcagctttgattacagagctgcaactcagttttggcggagcaaagtcctagaggtggccaaggacttccctgagtacacctttgccattgcggacgaagaggactatgctggggaggtgaaggacctggggctcagcgagagtggggaggatgtcaatgccgccatcctggacgagagtgggaagaagttcgccatggagccagaggagtttgactctgacaccctccgcgagtttgtcactgctttcaaaaaaggaaaactgaagccagtcatcaaatcccagccagtgcccaagaacaacaagggacccgtcaaggtcgtggtgggaaagacctttgactccattgtgatggaccccaagaaggacgtcctcatcgagttctacgcgccatggtgcgggcactgcaagcagctagagcccgtgtacaacagcctggccaagaagtacaagggccgtccccagcgaccgctataaggtggagggcttccccaccatctacttcgcccccagtggggacaaaaagaacccagttaaatttgagggtggagacagagatctggagcatttgagcaagtttatagaagaacatgccacaaaactgagcaggaccaaggaagagctttgaaggcctgaggtctgcggaaggtgggaggaggcagacgccctgcgtggcccatggtcggggcgtccacgccgaggccggcaacaaacgacagtatctcggattcctttttttttttttttaattttttatactttggtgtttcacttcatgctctgaatactgaataaccatgaatgactgaatagtttagtccagatttttacagaggatacatctatttttatcattatttggggtttgaaaaatttttttttacaccttctaatttctttatttctcaaagcagataattcttctgtgtgaaaatgttttctttttttaatttaaggtttaaaattccttttccaaatcatgttgattttgctctttgctttttcgttgtctgagaaattgttggcgtagatttggcttctggtatgtgtttctgattgcttcctgttgagcacaaagtgagagctgccactgagcagccctgccaggggtgctgtttcaggctgggcatcgccaggcggcctccctgcaaaccaagggctgggggcaaaggggcatgatccagggtcccccagggtgggctcagctccagggagaggccacccacgtggcagccccacctcttgagagcccccagtgccggagcagaaaggaccctggacccagaggcagatactgcggggtggtagaaaaggtagagtaggctgtggcaatggaataaaacacgattaaaaacgttaagaactgcgttaaaaaaaaaaaa

SEQ ID NO: 307927 - DNA, 2083 bp, Homo sapiens
gaggtcacgctcatatctctccatctctttgcttaattctctccggccgccaaggagctcagcaagcgttctcctccaattcccctggcaaaggtcgacgccaccgcagaaacagacctggccaagaggtttgatgtctctggctatcccaccctgaaaattttccgcaaaggaaggccttatgactacaacggcccacgagaaaaatatggaatcgttgattacatgatcgagcagtccgggcctccctccaaggagattctgaccctgaagcaggtccaggagttcctgaaggatggagacgatgtcatcatcatcggggtctttaagggggagagtgacccagcctaccagcaataccaggatgccgctaacaacctgagagaagattacaaatttcaccacactttcagcacagaaatagcaaagttcttgaaagtctcccaggggcagttggttgtaatgcagcctgagaaattccagtccaagtatgagccccggagccacatgatggacgtccagggctccacccaggactcggccatcaaggacttcgtgctgaagtacgccctgcccctggttggccaccgcaaggtgtcaaacgatgctaagcgctacaccaggcgccccctggtggtcgtctactacagtgtggacttcagctttgattacagagctgcaactcagttttggcggagcaaagtcctagaggtggccaaggacttccctgagtacacctttgccattgcggacgaagaggactatgctggggaggtgaaggacctggggctcagcgagagtggggaggatgtcaatgccgccatcctggacgagagtgggaagaagttcgccatggagccagaggagtttgactctgacaccctccgcgagtttgtcactgctttcaaaaaaggaaaactgaagccagtcatcaaatcccagccagtgcccaagaacaacaagggacccgtcaaggtcgtggtgggaaagacctttgactccattgtgatggaccccaagaaggacgtcctcatcgagttctacgcgccatggtgcgggcactgcaagcagctagagcccgtgtacaacagcctggccaagaagtacaagggccaaaagggcctggtcatcgccaagatggacgccactgccaacgacgtccccagcgaccgctataaggtggagggcttccccaccatctacttcgcccccagtggggacaaaaagaacccagttaaatttgagggtggagacagagatctggagcatttgagcaagtttatagaagaacatgccacaaaactgagcaggaccaaggaagagctttgaaggcctgaggtctgcggaaggtgggaggaggcagacgccctgcgtggcccatggtcggggcgtccacgccgaggccggcaacaaacgacagtatctcggattcctttttttttttttttaattttttatactttggtgtttcacttcatgctctgaatactgaataaccatgaatgactgaatagtttagtccagatttttacagaggatacatctatttttatcattatttggggtttgaaaaatttttttttacaccttctaatttctttatttctcaaagcagataattcttctgtgtgaaaatgttttctttttttaatttaaggtttaaaattccttttccaaatcatgttgattttgctctttgctttttcgttgtctgagaaattgttggcgtagatttggcttctggtatgtgtttctgattgcttcctgttgagcacaaagtgagagctgccactgagcagccctgccaggggtgctgtttcaggctgggcatcgccaggcggcctccctgcaaaccaagggctgggggcaaaggggcatgatccagggtcccccagggtgggctcagctccagggagaggccacccacgtggcagccccacctcttgagagcccccagtgccggagcagaaaggaccctggacccagaggcagatactgcggggtggtagaaaaggtagagtaggctgtggcaatggaataaaacacgattaaaaacgttaagaactgcgttaaaaaaaaaaaa

SEQ ID NO: 307928 - DNA, 1791 bp, Homo sapiens
ggctgatgtgggtaacgaattaaatctcagacatttaggcaattttcaaaattacatcttattctgttaacgtttcagctaacaacctgagagaagattacaaatttcaccacactttcagcacagaaatagcaaagttcttgaaagtctcccaggggcagttggttgtaatgcagcctgagaaattccagtccaagtatgagccccggagccacatgatggacgtccagggctccacccaggactcggccatcaaggacttcgtgctgaagtacgccctgcccctggttggccaccgcaaggtgtcaaacgatgctaagcgctacaccaggcgccccctggtggtcgtctactacagtgtggacttcagctttgattacagagctgcaactcagttttggcggagcaaagtcctagaggtggccaaggacttccctgagtacacctttgccattgcggacgaagaggactatgctggggaggtgaaggacctggggctcagcgagagtggggaggatgtcaatgccgccatcctggacgagagtgggaagaagttcgccatggagccagaggagtttgactctgacaccctccgcgagtttgtcactgctttcaaaaaaggaaaactgaagccagtcatcaaatcccagccagtgcccaagaacaacaagggacccgtcaaggtcgtggtgggaaagacctttgactccattgtgatggaccccaagaaggacgtcctcatcgagttctacgcgccatggtgcgggcactgcaagcagctagagcccgtgtacaacagcctggccaagaagtacaagggccaaaagggcctggtcatcgccaagatggacgccactgccaacgacgtccccagcgaccgctataaggtggagggcttccccaccatctacttcgcccccagtggggacaaaaagaacccagttaaatttgagggtggagacagagatctggagcatttgagcaagtttatagaagaacatgccacaaaactgagcaggaccaaggaagagctttgaaggcctgaggtctgcggaaggtgggaggaggcagacgccctgcgtggcccatggtcggggcgtccacgccgaggccggcaacaaacgacagtatctcggattcctttttttttttttttaattttttatactttggtgtttcacttcatgctctgaatactgaataaccatgaatgactgaatagtttagtccagatttttacagaggatacatctatttttatcattatttggggtttgaaaaatttttttttacaccttctaatttctttatttctcaaagcagataattcttctgtgtgaaaatgttttctttttttaatttaaggtttaaaattccttttccaaatcatgttgattttgctctttgctttttcgttgtctgagaaattgttggcgtagatttggcttctggtatgtgtttctgattgcttcctgttgagcacaaagtgagagctgccactgagcagccctgccaggggtgctgtttcaggctgggcatcgccaggcggcctccctgcaaaccaagggctgggggcaaaggggcatgatccagggtcccccagggtgggctcagctccagggagaggccacccacgtggcagccccacctcttgagagcccccagtgccggagcagaaaggaccctggacccagaggcagatactgcggggtggtagaaaaggtagagtaggctgtggcaatggaataaaacacgattaaaaacgttaagaactgcgttaaaaaaaaaaaa

SEQ ID NO: 307929 - DNA, 1264 bp, Homo sapiens
gactctagcaggatctctcataggttcgcaggcatggagccagaggagtttgactctgacaccctccgcgagtttgtcactgctttcaaaaaaggaaaactgaagccagtcatcaaatcccagccagtgcccaagaacaacaagggacccgtcaaggtcgtggtgggaaagacctttgactccattgtgatggaccccaagaaggacgtcctcatcgagttctacgcgccatggtgcgggcactgcaagcagctagagcccgtgtacaacagcctggccaagaagtacaagggccaaaagggcctggtcatcgccaagatggacgccactgccaacgacgtccccagcgaccgctataaggtggagggcttccccaccatctacttcgcccccagtggggacaaaaagaacccagttaaatttgagggtggagacagagatctggagcatttgagcaagtttatagaagaacatgccacaaaactgagcaggaccaaggaagagctttgaaggcctgaggtctgcggaaggtgggaggaggcagacgccctgcgtggcccatggtcggggcgtccacgccgaggccggcaacaaacgacagtatctcggattcctttttttttttttttaattttttatactttggtgtttcacttcatgctctgaatactgaataaccatgaatgactgaatagtttagtccagatttttacagaggatacatctatttttatcattatttggggtttgaaaaatttttttttacaccttctaatttctttatttctcaaagcagataattcttctgtgtgaaaatgttttctttttttaatttaaggtttaaaattccttttccaaatcatgttgattttgctctttgctttttcgttgtctgagaaattgttggcgtagatttggcttctggtatgtgtttctgattgcttcctgttgagcacaaagtgagagctgccactgagcagccctgccaggggtgctgtttcaggctgggcatcgccaggcggcctccctgcaaaccaagggctgggggcaaaggggcatgatccagggtcccccagggtgggctcagctccagggagaggccacccacgtggcagccccacctcttgagagcccccagtgccggagcagaaaggaccctggacccagaggcagatactgcggggtggtagaaaaggtagagtaggctgtggcaatggaataaaacacgattaaaaacgttaagaactgcgttaaaaaaaaaaaa

SEQ ID NO: 307930 - DNA, 1090 bp, Homo sapiens
agttttaaacgcgcagccgagggccgcgcgcaggagtagggagggcctagggcggcggagccgactcgtcgcggccgaggcgcgcgcggtccgtgccggcgtcagtctgggattggccggcccgcgacttcctccgccccctgccaatcgccggggacgacttccgtgggtttttccggctcccccgcgtcgctaaggagcgacgggctgtcggccagaccccgagttctcggtgcgctcagcggccgccgacgctaggaggccgcgctccgcccccgctaccatgaggccccggaaagccttcctgctcctgctgctcttggggctggtgcagctgctggccgtggcgggtgccgagggcccggacgaggattcttctaacagagaaaatgccattgaggatgaagaggaggaggaggaggaagatgatgatgaggaagaagacgacttggaagttaaggaagaaaatggagtcttggtcctaaatgatgcaaactttgataattttgtggctgacaaagacacagtgctgctggagttttatgctccatggtgtggacattgcaagcagtttgctccggaatatgaaaaaattgccaacatattaaaggataaagatcctcccattcctgttgccaagatcgatgcaacctcagcgtctgtgctggccagcaggtttgatgtgagtggctaccccaccatcaagatccttaagaaggggcaggctgtagactacgagggctccagaacccaggaagaaattgttgccaaggtcagagaagtctcccagcccgactggacgcctccaccagaagtcacgcttgtgttgaccaaagagaactttgatgaagttgtgaatgatgcagatatcattctggtggagttttatgccccatggtgtggacactgcaagaaacttgcccccgagtatgagaaggccgccaaggagctcagcaagcgttctcctccaattcccctggcaaaggtcgacgccaccgcagaaacagacctggccaagaggtttgatgtctctggctatcccaccctgaaaattttctcgtgggccgttgtagtcataaggcccctcgtg

SEQ ID NO: 307931 - DNA, 1336 bp, Homo sapiens
  misc_feature (1325)..(1325): n is a, c, g, or t
agttttaaacgcgcagccgagggccgcgcgcaggagtagggagggcctagggcggcggagccgactcgtcgcggccgaggcgcgcgcggtccgtgccggcgtcagtctgggattggccggcccgcgacttcctccgccccctgccaatcgccggggacgacttccgtgggtttttccggctcccccgcgtcgctaaggagcgacgggctgtcggccagaccccgagttctcggtgcgctcagcggccgccgacgctaggaggccgcgctccgcccccgctaccatgaggccccggaaagccttcctgctcctgctgctcttggggctggtgcagctgctggccgtggcgggtgccgagggcccggacgaggattcttctaacagagaaaatgccattgaggatgaagaggaggaggaggaggaagatgatgatgaggaagaagacgacttggaagttaaggaagaaaatggagtcttggtcctaaatgatgcaaactttgataattttgtggctgacaaagacacagtgctgctggagttttatgctccatggtgtggacattgcaagcagtttgctccggaatatgaaaaaattgccaacatattaaaggataaagatcctcccattcctgttgccaagatcgatgcaacctcagcgtctgtgctggccagcaggtttgatgtgagtggctaccccaccatcaagatccttaagaaggggcaggctgtagactacgagggctccagaacccaggaagatggagtcttcctctgtctcccaggctggagtgtgcagtggtgcaatcttggctcaccgaacagcctccacctccggggttcagaaattgttgccaaggtcagagaagtctcccagcccgactggacgcctccaccagaagtcacgcttgtgttgaccaaagagaactttgatgaagttgtgaatgatgcagatatcattctggtggagttttatgccccatggtgtggacactgcaagaaacttgcccccgagtatgagaaggccgccaaggagctcagcaagcgttctcctccaattcccctggcaaaggtcgacgccaccgcagaaacagacctggccaagaggtttgatgtctctggctatcccaccctgaaaattttccgcaaaggaaggccttatgactacaacggcccacgagaaaaatatggagattctgaccctgaagcaggtccaggagttcctgaaggatggagacgatgtcatcatcatcggggtctttaagggggagagtgacccagcctaccagcaataccaggatgccgttaacaacctgagaggataccanatttcacccct

SEQ ID NO: 307932 - DNA, 2937 bp, Homo sapiens
  misc_feature (49)..(49): n is a, c, g, or t
gcttctgggaggaggccttttcttgacagtttagggtagcgggggaatngatgatccgggagtcccctgcggatgtcgtcccgcaccaggccgggaccgatttctggctccagtttccccagaattgcggagtgcgcacacctggaaggacccaagtcccgttttatagttgagaaactcaagactcagacaagtgaaacgacttttgcttcatgacagctggaactggaacccagttcccttttagactatggcgacatacctggagttcatccagcagaatgaagaacgggatggtgtgcgttttagttggaacgtgtggccttccagccggctggaggctacaagaatggttgtacccctggcttgtctccttactcctttgaaagaacgtccagacctacctcctgtacaatatgaacctgtgctttgcagcaggccaacttgtaaagctgttctcaacccactttgtcaggttgattatcgagcaaaactttgggcctgtaatttctgttttcaaagaaatcagtttcctccagcttatggaggcatatctgaggtgaatcaacctgccgaattgatgccccagttttctacaattgagtacgtgatacagcgaggtgctcagtcccctctgatctttctctatgtggttgacacatgcctggaggaagatgaccttcaagcactcaaagagtccctgcagatgtccctgagtcttcttcctccagatgctctggtgggtctgatcacatttggaaggatggtgcaggttcatgagctaagctgtgaaggaatctccaaaagttatgtcttccgagggaccaaggatttaactgcaaagcaaatacaggatatgttgggcctgaccaagccagccatgcccatgcagcaagcacgacctgcacaaccacaggagcacccttttgcttcaagcagatttctgcagcctgttcacaagattgatatgaacctcactgatcttcttggggagctacagagggacccatggccagtaactcaggggaagagacctttgcgatccactggtgtggctttgtccattgctgttggcttgctggagggcacttttccaaacacaggagccaggatcatgctgtttactggaggtccccctacccaagggcctggcatggtggttggagatgaattaaagattcctattcgttcttggcatgatattgagaaagataatgcacgattcatgaaaaaggcaaccaagcactatgagatgcttgctaatcgaacagctgcaaatggtcactgcattgatatttatgcttgtgcccttgatcaaactggacttttggagatgaagtgttgtgcaaatcttactggaggctacatggtaatgggagattctttcaacacttctctcttcaagcagacattccaaagaatctttactaaagattttaatggagatttccgaatggcatttggtgctactttggacgtaaagacctctcgggaactgaagattgcaggagccattggtccatgcgtatctctgaatgtgaaaggaccgtgtgtgtcagaaaatgagcttggtgttggtggcacgagtcagtggaaaatctgtggcctagatcctacatctacacttggcatctattttgaagttgtcaatcagcacaacaccccgatcccccaaggaggcagaggagccatccagtttgtcacgcattatcagcactccagcacccagagacgcatccgcgtgaccaccatcgcccgaaattgggcagatgtacagagtcagctcaggcacatagaagcagcatttgaccaggaggctgcggcagtgttgatggcacggcttggggtgttccgagcggagtcagaggaggggcccgatgtgctccggtggctggaccgacaactcatccgactgtgtcaaaagtttggacagtataacaaagaagaccccacttcttttaggttatcagattccttttctctatatcctcagtttatgttccatctgagaagatctccatttcttcaagtgtttaacaacagtcctgatgagtcgtcatattacagacatcattttgcccggcaggacctgacccagtccctcatcatgatccagcccattctctactcttactcctttcatgggccaccagagccagtactcttggatagcagcagcattctagctgacagaattttgctgatggatactttctttcaaattgtcatttatcttggtgagaccatagcccagtggcgtaaagctggctaccaggacatgcccgagtatgaaaacttcaagcaccttctgcaggcaccactggatgatgctcaagaaattctgcaagcacgcttcccgatgccacgttacatcaacacggagcatggaggcagtcaggctcgattccttttgtccaaagtgaacccatctcagacacacaataacctgtatgcttggggacaggaaactggagcacccatcctaactgatgatgttagcctgcaggtgttcatggaccatttgaagaagctggctgtctccagtgcctgttaagctgaggatacaaccaggaaatgcaacggtgtcagattgtgttcaaaatgtctagaaaggcttgataacattcctgttacttttctagcagattttaacaaataatcaaggacattttatatgtaactctttagattataatttatttgtattcctgtctttgtcctttttcttgcactataaaattataaggtcataaatgttttggtacttgtagatgtttatgtgctttttgtatcctaacttttagaatctaaataaaatcagaggtaatgtattttggcagcttgtttaggtgagaatcttaatgatcataaaaggaaataaatctagatgcagaaagtactggctaaaatattgctaatacaaatgtgatttcctga

SEQ ID NO: 307933 - DNA, 2776 bp, Homo sapiens
aatgccttcttccggcagccttagtttcttccaaccagtgcagctccctgttccgcgagcatacgtcatcgttctcgctttccggtagctaaggcgatcagcgggacttcccactgagacgagcggatgtcatattgtatcagggcgaacctctgaggagcgctggctgcgcttaggcaacgttcccttttagactatggcgacatacctggagttcatccagcagaatgaagaacgggatggtgtgcgttttagttggaacgtgtggccttccagccggctggaggctacaagaatggttgtacccctggcttgtctccttactcctttgaaagaacgtccagacctacctcctgtacaatatgaacctgtgctttgcagcaggccaacttgtaaagctgttctcaacccactttgtcaggttgattatcgagcaaaactttgggcctgtaatttctgttttcaaagaaatcagtttcctccagcttatggaggcatatctgaggtgaatcaacctgccgaattgatgccccagttttctacaattgagtacgtgatacagcgaggtgctcagtcccctctgatctttctctatgtggttgacacatgcctggaggaagatgaccttcaagcactcaaagagtccctgcagatgtccctgagtcttcttcctccagatgctctggtgggtctgatcacatttggaaggatggtgcaggttcatgagctaagctgtgaaggaatctccaaaagttatgtcttccgagggaccaaggatttaactgcaaagcaaatacaggatatgttgggcctgaccaagccagccatgcccatgcagcaagcacgacctgcacaaccacaggagcacccttttgcttcaagcagatttctgcagcctgttcacaagattgatatgaacctcactgatcttcttggggagctacagagggacccatggccagtaactcaggggaagagacctttgcgatccactggtgtggctttgtccattgctgttggcttgctggagggcacttttccaaacacaggagccaggatcatgctgtttactggaggtccccctacccaagggcctggcatggtggttggagatgaattaaagattcctattcgttcttggcatgatattgagaaagataatgcacgattcatgaaaaaggcaaccaagcactatgagatgcttgctaatcgaacagctgcaaatggtcactgcattgatatttatgcttgtgcccttgatcaaactggacttttggagatgaagtgttgtgcaaatcttactggaggctacatggtaatgggagattctttcaacacttctctcttcaagcagacattccaaagaatctttactaaagattttaatggagatttccgaatggcatttggtgctactttggacgtaaagacctctcgggaactgaagattgcaggagccattggtccatgcgtatctctgaatgtgaaaggaccgtgtgtgtcagaaaatgagcttggtgttggtggcacgagtcagtggaaaatctgtggcctagatcctacatctacacttggcatctattttgaagttgtcaatcagcacaacaccccgatcccccaaggaggcagaggagccatccagtttgtcacgcattatcagcactccagcacccagagacgcatccgcgtgaccaccatcgcccgaaattgggcagatgtacagagtcagctcaggcacatagaagcagcatttgaccaggaggctgcggcagtgttgatggcacggcttggggtgttccgagcggagtcagaggaggggcccgatgtgctccggtggctggaccgacaactcatccgactgtgtcaaaagtttggacagtataacaaagaagaccccacttcttttaggttatcagattccttttctctatatcctcagtttatgttccatctgagaagatctccatttcttcaagtgtttaacaacagtcctgatgagtcgtcatattacagacatcattttgcccggcaggacctgacccagtccctcatcatgatccagcccattctctactcttactcctttcatgggccaccagagccagtactcttggatagcagcagcattctagctgacagaattttgctgatggatactttctttcaaattgtcatttatcttggtgagaccatagcccagtggcgtaaagctggctaccaggacatgcccgagtatgaaaacttcaagcaccttctgcaggcaccactggatgatgctcaagaaattctgcaagcacgcttcccgatgccacgttacatcaacacggagcatggaggcagtcaggctcgattccttttgtccaaagtgaacccatctcagacacacaataacctgtatgcttggggacaggaaactggagcacccatcctaactgatgatgttagcctgcaggtgttcatggaccatttgaagaagctggctgtctccagtgcctgttaagctgaggatacaaccaggaaatgcaacggtgtcagattgtgttcaaaatgtctagaaaggcttgataacattcctgttacttttctagcagattttaacaaataatcaaggacattttatatgtaactctttagattataatttatttgtattcctgtctttgtcctttttcttgcactataaaattataaggtcataaatgttttggtacttgtagatgtttatgtgctttttgtatcctaacttttagaatctaaataaaatcagaggtaatgt

SEQ ID NO: 307934 - DNA, 715 bp, Homo sapiens
gcctgatgctcaaaactagcaggcggtggtggcctgatctcggcgtaccaggaaaggattttgtgaggaaattgtgctttagtcaaaagaagttgttcgtgaggcagaggatggggtgatgggagtactcgtagcagaggggacaacacctgtgaatgttctgagggaaggtgcttgacagctcatgaattctaatcagcttctaagatatctgccaactaatctttatcattacatttcaggaaactggagcacccatcctaactgatgatgttagcctgcaggtgttcatggaccatttgaagaagctggctgtctccagtgcctgttaagctgaggatacaaccaggaaatgcaacggtgtcagattgtgttcaaaatgtctagaaaggcttgataacattcctgttacttttctagcagattttaacaaataatcaaggacattttatatgtaactctttagattataatttatttgtattcctgtctttgtcctttttcttgcactataaaattataaggtcataaatgttttggtacttgtagatgtttatgtgctttttgtatcctaacttttagaatctaaataaaatcagaggtaatgtattttggcagcttgtttaggtgagaatcttaatgatcataaaaggaaataaatctagatgcagaaagtactggctaaaatattgctaatacaaatgtgatttcctga

SEQ ID NO: 307935 - DNA, 1014 bp, Homo sapiens
gcctgatgctcaaaactagcaggcggtggtggcctgatctcggcgtaccaggaaaggattttgtgaggaaattgtgctttagtcaaaagaagttgttcgtgaggcagaggatggggtgatgggagtactcgtagcagaggggacaacacctgtgaatgttctgagggaaggtgcttgacagctcatgaattctaatcagcttctaagatatctgccaactaatctttatcattacatttcaggaaactggagcacccatcctaactgatgatgttagcctgcaggtgttcatggaccatttgaagaagctggctgtctccagtgcctgttaagctgaggatacaaccaggaaatgcaacggtgtcagattgtgttcaaaatgtctagaaaggcttgataacattcctgttacttttctagcagattttaacaaataatcaaggacattttatatgtaactctttagattataatttatttgtattcctgtctttgtcctttttcttgcactataaaattataaggtcataaatgttttggtacttgtagatgtttatgtgctttttgtatcctaacttttagaatctaaataaaatcagaggtaatgtattttggcagcttgtttaggtgagaatcttaatgatcataaaaggaaataaatctagatgcagaaagtactggctaaaatattgctaatacaaatgtgatttcctgaggtctctgtgtgagtgtgtatgtgttttaagtgacttccttaagaggtgtttcctgaacctaattctcataattaaagtaatgtatatgcaggatcaaaatgaaacaaatataccttatcctaaagagctcataacaaataagttacctccactctataaactcagacctactttttgaagataactgcttttaacctctccttacaagatttttgttgttgatgtatttaattttagcccatgtctcaattctcattttcaaagaatcaatatattaatatacctttggtcaaatttg

SEQ ID NO: 307936 - DNA, 1069 bp, Homo sapiens
tagtatagtgcgggcgggtgtatcagcacggggctggcttatgtgaggggagcggagcctgcttgttgcagctgtgggtgaggacggctctagctaggtgagcggctccggccagttcccttttagactatggcgacatacctggagttcatccagcagaatgaagaacgggatggtgtgcgttttagttggaacgtgtggccttccagccggctggaggctacaagaatggttgtacccctggcttgtctccttactcctttgaaagaacgtccagacctacctcctgtacaatatgaacctgtgctttgcagcaggccaacttgtaaagctgttctcaacccactttgtcaggttgattatcgagcaaaactttgggcctgtaatttctgttttcaaagaaatcagtttcctccagcttatggaggcatatctgaggtgaatcaacctgccgaattgatgccccagttttctacaattgagtacgtgatacagcgaggtgctcagtcccctctgatctttctctatgtggttgacacatgcctggaggaagatgaccttcaagcactcaaagagtccctgcagatgtccctgagtcttcttcctccagatgctctggtgggtctgatcacatttggaaggatggtgcaggttcatgagctaagctgtgaaggaatctccaaaagttatgtcttccgagggaccaaggatttaactgcaaagcaaatacaggatatgttgggcctgaccaagccagccatgcccatgcagcaagcacgacctgcacaaccacaggagcacccttttgcttcaagcagattctgacggctgtcccagatgtatgaactcactgatcttctgggggagctacagggggccaggcagcaccaagggaaggaccttggagccagggggcttggcctggcgcggcgagggcttacaaccggagcgccgggtcggggcccacaggcgacgggggagaacaaacacacgcggaatgaaaacgcgcggaaggacgaagaataaagagcggcaacggcacacgagagggcgggagtccaactccggg

SEQ ID NO: 307937 - DNA, 1035 bp, Homo sapiens
tgtttaactacatgtagtttggagatgatcaggtgattgtaaacctcccactcctttgatttatttttaagtgcttgaaaggagaggtgagaaaggagcagtgatcaatgataactgtgcggttaactgacttttgggtatcagatggaaaagaaatactgtcattctacagcaacaggttcttcccaagtatttaagaaacactgtgttagttgggccgggtacagtgggtcacgcctgtaatcccagcactttggaaggccaaggcgggtggatcacctgaggtcaggagtttgagaccagcctggccaacatggtgaaaccctgcctctactaaaaatacaaaaaattagccgggcttggtggcacaggcttgtaatcccagctacttgggaggctgtggcaggagaatcgcttgaacccgggaggtggaggctgcagtgagctgagatgggaaaaaaagagaaacactgtgttacatgacccatcttctttttttgacatttagttcagaatttcacataccattaaggtaattaaagttttatcttcagttcccttttagactatggcgacatacctggagttcatccagcagaatgaagaacgggatggtgtgcgttttagttggaacgtgtggccttccagccggctggaggatacaaccaggaaatgcaacggtgtcagattgtgttcaaaatgtctagaaaggcttgataacattcctgttacttttctagcagattttaacaaataatcaaggacattttatatgtaactctttagattataatttatttgtattcctgtctttgtcctttttcttgcactataaaattataaggtcataaatgttttggtacttgtagatgtttatgtgctttttgtatcctaacttttagaatctaaataaaatcagaggtaatgtattttggcagcttgtttaggtgagaatcttaatgatcataaaaggaaataaatctagatgcagaaagtactggctaaaatattgctaatacaaatgtgatttcctga

SEQ ID NO: 307938 - DNA, 608 bp, Homo sapiens
gcctgatgctcaaaactagcaggcggtggtggcctgatctcggcgtaccaggaaaggattttgtgaggaaattgtgctttagtcaaaagaagttgttcgtgaggcagaggatggggtgatgggagtactcgtagcagaggggacaacacctgtgaatgttctgagggaaggtgcttgacagctcatgaattctaatcagcttctaagatatctgccaactaatctttatcattacatttcaggaaactggagcacccatcctaactgatgatgttagcctgcaggtgttcatggaccatttgaagaagctggctgtctccagtgcctgttaagctgaggatacaaccaggaaatgcaacggtgtcagattgtgttcaaaatgtctagaaaggcttgataacattcctgttacttttctagcagattttaacaaataatcaaggacattttatatgtaactctttagattataatttatttgtattcctgtctttgtcctttttcttgcactataaaattataaggtcataaatgttttggtacttgtagatgtttatgtgctttttgtatcctaacttttagaatctaaataaaatcagaggtaatgt

SEQ ID NO: 307939 - DNA, 639 bp, Homo sapiens
  misc_feature (237)..(237): n is a, c, g, or t
  misc_feature (249)..(249): n is a, c, g, or t
  misc_feature (258)..(261): n is a, c, g, or t
  misc_feature (265)..(265): n is a, c, g, or t
  misc_feature (273)..(273): n is a, c, g, or t
  misc_feature (280)..(280): n is a, c, g, or t
  misc_feature (285)..(285): n is a, c, g, or t
  misc_feature (331)..(331): n is a, c, g, or t
  misc_feature (347)..(347): n is a, c, g, or t
cccgcgccgcgggggtgcccgctgaacgcgccgtccagctgcagctgcagtcgctctagagatcccgaggcgtccgaatggcattggtgctactttggacgtaagacttctcgggaactgaagattgcaggagccattggtccatgcgtatctctgaatgtgaaaggaccgtgtgtgtcagaaaatgagcttggtgttggtggcacgagtcagtggaaaatctgtggcctagatccnacatctacactnggcatctannnngaanttgtcaancagcacnacacnccgatcccccaaggaggcagaggagccatccagtttgtcacgcatnatcagcactccagcanccagagacgcatccgcgtgaccaccatcgcccgaaagagcttggtgttggtggcacgagtcagtggaaaatctgtggcctagatcctacatctacacttggcatctattttgaagttgtcaatcagcacaacaccccgatcccccaaggaggcagaggagccatccagtttgtcacgcattatcagcactccagcacccagagacgcatccgcgtgaccaccatcgcccgaaagagcttggtgttggtggcacgagtcagtggaaaatctgtggcctagatcctaatctaca

SEQ ID NO: 307940 - DNA, 385 bp, Homo sapiens
  misc_feature (49)..(49): n is a, c, g, or t
gcttctgggaggaggccttttcttgacagtttagggtagcgggggaatngatgatccgggagtcccctgcggatgtcgtcccgcaccaggccgggaccgatttctggctccagtttccccagaattgcggagtgcgcacacctggaaggacccaagtcccgttttatagttgagaaactcaagactcagacaagtgaaacgacttttgcttcatgacagctggaactggaacccaggtccttggactcccttcaaggattaaacctcacttattcttacatacacatggtcactgtgtcctgagaagttacgagttggcgcgataagggtggttcagattttttggcatattctcctgttatctttccaggcctttcattcattc

SEQ ID NO: 307941 - DNA, 2749 bp, Homo sapiens
gcaagcacagacgcgcgacacaagggatgtagacgtgcgtcgccgggttgtaatttcatcacgagagctgagctggacttggcggtgggagccggagcctgcttgttgcagctgtgggtgaggacggctctagctaggtgagcggctccggccagttcccttttagactatggcgacatacctggagttcatccagcagaatgaagaacgggatggtgtgcgttttagttggaacgtgtggccttccagccggctggaggctacaagaatggttgtacccctggcttgtctccttactcctttgaaagaacgtccagacctacctcctgtacaatatgaacctgtgctttgcagcaggccaacttgtaaagctgttctcaacccactttgtcaggttgattatcgagcaaaactttgggcctgtaatttctgttttcaaagaaatcagtttcctccagcttatggaggcatatctgaggtgaatcaacctgccgaattgatgccccagttttctacaattgagtacgtgatacagcgaggtgctcagtcccctctgatctttctctatgtggttgacacatgcctggaggaagatgaccttcaagcactcaaagagtccctgcagatgtccctgagtcttcttcctccagatgctctggtgggtctgatcacatttggaaggatggtgcaggttcatgagctaagctgtgaaggaatctccaaaagttatgtcttccgagggaccaaggatttaactgcaaagcaaatacaggatatgttgggcctgaccaagccagccatgcccatgcagcaagcacgacctgcacaaccacaggagcacccttttgcttcaagcagatttctgcagcctgttcacaagattgatatgaacctcactgatcttcttggggagctacagagggacccatggccagtaactcaggggaagagacctttgcgatccactggtgtggctttgtccattgctgttggcttgctggagggcacttttccaaacacaggagccaggatcatgctgtttactggaggtccccctacccaagggcctggcatggtggttggagatgaattaaagattcctattcgttcttggcatgatattgagaaagataatgcacgattcatgaaaaaggcaaccaagcactatgagatgcttgctaatcgaacagctgcaaatggtcactgcattgatatttatgcttgtgcccttgatcaaactggacttttggagatgaagtgttgtgcaaatcttactggaggctacatggtaatgggagattctttcaacacttctctcttcaagcagacattccaaagaatctttactaaagattttaatggagatttccgaatggcatttggtgctactttggacgtaaagacctctcgggaactgaagattgcaggagccattggtccatgcgtatctctgaatgtgaaaggaccgtgtgtgtcagaaaatgagcttggtgttggtggcacgagtcagtggaaaatctgtggcctagatcctacatctacacttggcatctattttgaagttgtcaatcagcacaacaccccgatcccccaaggaggcagaggagccatccagtttgtcacgcattatcagcactccagcacccagagacgcatccgcgtgaccaccatcgcccgaaattgggcagatgtacagagtcagctcaggcacatagaagcagcatttgaccaggaggctgcggcagtgttgatggcacggcttggggtgttccgagcggagtcagaggaggggcccgatgtgctccggtggctggaccgacaactcatccgactgtgtcaaaagtttggacagtataacaaagaagaccccacttcttttaggttatcagattccttttctctatatcctcagtttatgttccatctgagaagatctccatttcttcaagtgtttaacaacagtcctgatgagtcgtcatattacagacatcattttgcccggcaggacctgacccagtccctcatcatgatccagcccattctctactcttactcctttcatgggccaccagagccagtactcttggatagcagcagcattctagctgacagaattttgctgatggatactttctttcaaattgtcatttatcttggtgagaccatagcccagtggcgtaaagctggctaccaggacatgcccgagtatgaaaacttcaagcaccttctgcaggcaccactggatgatgctcaagaaattctgcaagcacgcttcccgatgccacgttacatcaacacggagcatggaggcagtcaggctcgattccttttgtccaaagtgaacccatctcagacacacaataacctgtatgcttggggacaggaaactggagcacccatcctaactgatgatgttagcctgcaggtgttcatggaccatttgaagaagctggctgtctccagtgcctgttaagctgaggatacaaccaggaaatgcaacggtgtcagattgtgttcaaaatgtctagaaaggcttgataacattcctgttacttttctagcagattttaacaaataatcaaggacattttatatgtaactctttagattataatttatttgtattcctgtctttgtcctttttcttgcactataaaattataaggtcataaatgttttggtacttgtagatgtttatgtgctttttgtatcctaacttttagaatctaaataaaatcagaggtaatgt

SEQ ID NO: 307942 - DNA, 3186 bp, Homo sapiens
aatgccttcttccggcagccttagtttcttccaaccagtgcagctccctgttccgcgagcatacgtcatcgttctcgctttccggtagctaaggcgatcagcgggacttcccactgagacgagcggatgtcatattgtatcagggcgaacctctgaggagcgctggctgcgcttaggcaacggtgcggcaggcgccggggttttctgaaacagaaacgtttaggggtggggaaacgtgttccgaggaactctcgttttgaagtgcgagatacacctgtcttgccctgttccaagatggtggcagagcttctctgagtctctcgcttcctccagtccgtcggagaagcgctctttgattggccagtggacagcgccgtggcatgacgcgctggggcgctggccaatcggttgagagctgagctggacttggcggtgggagccggagcctgcttgttgcagctgtgggtgaggacggctctagctagttcccttttagactatggcgacatacctggagttcatccagcagaatgaagaacgggatggtgtgcgttttagttggaacgtgtggccttccagccggctggaggctacaagaatggttgtacccctggcttgtctccttactcctttgaaagaacgtccagacctacctcctgtacaatatgaacctgtgctttgcagcaggccaacttgtaaagctgttctcaacccactttgtcaggttgattatcgagcaaaactttgggcctgtaatttctgttttcaaagaaatcagtttcctccagcttatggaggcatatctgaggtgaatcaacctgccgaattgatgccccagttttctacaattgagtacgtgatacagcgaggtgctcagtcccctctgatctttctctatgtggttgacacatgcctggaggaagatgaccttcaagcactcaaagagtccctgcagatgtccctgagtcttcttcctccagatgctctggtgggtctgatcacatttggaaggatggtgcaggttcatgagctaagctgtgaaggaatctccaaaagttatgtcttccgagggaccaaggatttaactgcaaagcaaatacaggatatgttgggcctgaccaagccagccatgcccatgcagcaagcacgacctgcacaaccacaggagcacccttttgcttcaagcagatttctgcagcctgttcacaagattgatatgaacctcactgatcttcttggggagctacagagggacccatggccagtaactcaggggaagagacctttgcgatccactggtgtggctttgtccattgctgttggcttgctggagggcacttttccaaacacaggagccaggatcatgctgtttactggaggtccccctacccaagggcctggcatggtggttggagatgaattaaagattcctattcgttcttggcatgatattgagaaagataatgcacgattcatgaaaaaggcaaccaagcactatgagatgcttgctaatcgaacagctgcaaatggtcactgcattgatatttatgcttgtgcccttgatcaaactggacttttggagatgaagtgttgtgcaaatcttactggaggctacatggtaatgggagattctttcaacacttctctcttcaagcagacattccaaagaatctttactaaagattttaatggagatttccgaatggcatttggtgctactttggacgtaaagacctctcgggaactgaagattgcaggagccattggtccatgcgtatctctgaatgtgaaaggaccgtgtgtgtcagaaaatgagcttggtgttggtggcacgagtcagtggaaaatctgtggcctagatcctacatctacacttggcatctattttgaagttgtcaatcagcacaacaccccgatcccccaaggaggcagaggagccatccagtttgtcacgcattatcagcactccagcacccagagacgcatccgcgtgaccaccatcgcccgaaattgggcagatgtacagagtcagctcaggcacatagaagcagcatttgaccaggaggctgcggcagtgttgatggcacggcttggggtgttccgagcggagtcagaggaggggcccgatgtgctccggtggctggaccgacaactcatccgactgtgtcaaaagtttggacagtataacaaagaagaccccacttcttttaggttatcagattccttttctctatatcctcagtttatgttccatctgagaagatctccatttcttcaagtgtttaacaacagtcctgatgagtcgtcatattacagacatcattttgcccggcaggacctgacccagtccctcatcatgatccagcccattctctactcttactcctttcatgggccaccagagccagtactcttggatagcagcagcattctagctgacagaattttgctgatggatactttctttcaaattgtcatttatcttggtgagaccatagcccagtggcgtaaagctggctaccaggacatgcccgagtatgaaaacttcaagcaccttctgcaggcaccactggatgatgctcaagaaattctgcaagcacgcttcccgatgccacgttacatcaacacggagcatggaggcagtcaggctcgattccttttgtccaaagtgaacccatctcagacacacaataacctgtatgcttggggacaggaaactggagcacccatcctaactgatgatgttagcctgcaggtgttcatggaccatttgaagaagctggctgtctccagtgcctgttaagctgaggatacaaccaggaaatgcaacggtgtcagattgtgttcaaaatgtctagaaaggcttgataacattcctgttacttttctagcagattttaacaaataatcaaggacattttatatgtaactctttagattataatttatttgtattcctgtctttgtcctttttcttgcactataaaattataaggtcataaatgttttggtacttgtagatgtttatgtgctttttgtatcctaacttttagaatctaaataaaatcagaggtaatgtattttggcagcttgtttaggtgagaatcttaatgatcataaaaggaaataaatctagatgcagaaagtactggctaaaatattgctaatacaaatgtgatttcctga

SEQ ID NO: 307943 - DNA, 3485 bp, Homo sapiens
aatgccttcttccggcagccttagtttcttccaaccagtgcagctccctgttccgcgagcatacgtcatcgttctcgctttccggtagctaaggcgatcagcgggacttcccactgagacgagcggatgtcatattgtatcagggcgaacctctgaggagcgctggctgcgcttaggcaacggtgcggcaggcgccggggttttctgaaacagaaacgtttaggggtggggaaacgtgttccgaggaactctcgttttgaagtgcgagatacacctgtcttgccctgttccaagatggtggcagagcttctctgagtctctcgcttcctccagtccgtcggagaagcgctctttgattggccagtggacagcgccgtggcatgacgcgctggggcgctggccaatcggttgagagctgagctggacttggcggtgggagccggagcctgcttgttgcagctgtgggtgaggacggctctagctagttcccttttagactatggcgacatacctggagttcatccagcagaatgaagaacgggatggtgtgcgttttagttggaacgtgtggccttccagccggctggaggctacaagaatggttgtacccctggcttgtctccttactcctttgaaagaacgtccagacctacctcctgtacaatatgaacctgtgctttgcagcaggccaacttgtaaagctgttctcaacccactttgtcaggttgattatcgagcaaaactttgggcctgtaatttctgttttcaaagaaatcagtttcctccagcttatggaggcatatctgaggtgaatcaacctgccgaattgatgccccagttttctacaattgagtacgtgatacagcgaggtgctcagtcccctctgatctttctctatgtggttgacacatgcctggaggaagatgaccttcaagcactcaaagagtccctgcagatgtccctgagtcttcttcctccagatgctctggtgggtctgatcacatttggaaggatggtgcaggttcatgagctaagctgtgaaggaatctccaaaagttatgtcttccgagggaccaaggatttaactgcaaagcaaatacaggatatgttgggcctgaccaagccagccatgcccatgcagcaagcacgacctgcacaaccacaggagcacccttttgcttcaagcagatttctgcagcctgttcacaagattgatatgaacctcactgatcttcttggggagctacagagggacccatggccagtaactcaggggaagagacctttgcgatccactggtgtggctttgtccattgctgttggcttgctggagggcacttttccaaacacaggagccaggatcatgctgtttactggaggtccccctacccaagggcctggcatggtggttggagatgaattaaagattcctattcgttcttggcatgatattgagaaagataatgcacgattcatgaaaaaggcaaccaagcactatgagatgcttgctaatcgaacagctgcaaatggtcactgcattgatatttatgcttgtgcccttgatcaaactggacttttggagatgaagtgttgtgcaaatcttactggaggctacatggtaatgggagattctttcaacacttctctcttcaagcagacattccaaagaatctttactaaagattttaatggagatttccgaatggcatttggtgctactttggacgtaaagacctctcgggaactgaagattgcaggagccattggtccatgcgtatctctgaatgtgaaaggaccgtgtgtgtcagaaaatgagcttggtgttggtggcacgagtcagtggaaaatctgtggcctagatcctacatctacacttggcatctattttgaagttgtcaatcagcacaacaccccgatcccccaaggaggcagaggagccatccagtttgtcacgcattatcagcactccagcacccagagacgcatccgcgtgaccaccatcgcccgaaattgggcagatgtacagagtcagctcaggcacatagaagcagcatttgaccaggaggctgcggcagtgttgatggcacggcttggggtgttccgagcggagtcagaggaggggcccgatgtgctccggtggctggaccgacaactcatccgactgtgtcaaaagtttggacagtataacaaagaagaccccacttcttttaggttatcagattccttttctctatatcctcagtttatgttccatctgagaagatctccatttcttcaagtgtttaacaacagtcctgatgagtcgtcatattacagacatcattttgcccggcaggacctgacccagtccctcatcatgatccagcccattctctactcttactcctttcatgggccaccagagccagtactcttggatagcagcagcattctagctgacagaattttgctgatggatactttctttcaaattgtcatttatcttggtgagaccatagcccagtggcgtaaagctggctaccaggacatgcccgagtatgaaaacttcaagcaccttctgcaggcaccactggatgatgctcaagaaattctgcaagcacgcttcccgatgccacgttacatcaacacggagcatggaggcagtcaggctcgattccttttgtccaaagtgaacccatctcagacacacaataacctgtatgcttggggacaggaaactggagcacccatcctaactgatgatgttagcctgcaggtgttcatggaccatttgaagaagctggctgtctccagtgcctgttaagctgaggatacaaccaggaaatgcaacggtgtcagattgtgttcaaaatgtctagaaaggcttgataacattcctgttacttttctagcagattttaacaaataatcaaggacattttatatgtaactctttagattataatttatttgtattcctgtctttgtcctttttcttgcactataaaattataaggtcataaatgttttggtacttgtagatgtttatgtgctttttgtatcctaacttttagaatctaaataaaatcagaggtaatgtattttggcagcttgtttaggtgagaatcttaatgatcataaaaggaaataaatctagatgcagaaagtactggctaaaatattgctaatacaaatgtgatttcctgaggtctctgtgtgagtgtgtatgtgttttaagtgacttccttaagaggtgtttcctgaacctaattctcataattaaagtaatgtatatgcaggatcaaaatgaaacaaatataccttatcctaaagagctcataacaaataagttacctccactctataaactcagacctactttttgaagataactgcttttaacctctccttacaagatttttgttgttgatgtatttaattttagcccatgtctcaattctcattttcaaagaatcaatatattaatatacctttggtcaaatttg

SEQ ID NO: 307944 - DNA, 2816 bp, Homo sapiens
tagtatagtgcgggcgggtgtatcagcacggggctggcttatgtgaggggagcggagcctgcttgttgcagctgtgggtgaggacggctctagctaggtgagcggctccggccagttcccttttagactatggcgacatacctggagttcatccagcagaatgaagaacgggatggtgtgcgttttagttggaacgtgtggccttccagccggctggaggctacaagaatggttgtacccctggcttgtctccttactcctttgaaagaacgtccagacctacctcctgtacaatatgaacctgtgctttgcagcaggccaacttgtaaagctgttctcaacccactttgtcaggttgattatcgagcaaaactttgggcctgtaatttctgttttcaaagaaatcagtttcctccagcttatggaggcatatctgaggtgaatcaacctgccgaattgatgccccagttttctacaattgagtacgtgatacagcgaggtgctcagtcccctctgatctttctctatgtggttgacacatgcctggaggaagatgaccttcaagcactcaaagagtccctgcagatgtccctgagtcttcttcctccagatgctctggtgggtctgatcacatttggaaggatggtgcaggttcatgagctaagctgtgaaggaatctccaaaagttatgtcttccgagggaccaaggatttaactgcaaagcaaatacaggatatgttgggcctgaccaagccagccatgcccatgcagcaagcacgacctgcacaaccacaggagcacccttttgcttcaagcagatttctgcagcctgttcacaagattgatatgaacctcactgatcttcttggggagctacagagggacccatggccagtaactcaggggaagagacctttgcgatccactggtgtggctttgtccattgctgttggcttgctggagggcacttttccaaacacaggagccaggatcatgctgtttactggaggtccccctacccaagggcctggcatggtggttggagatgaattaaagattcctattcgttcttggcatgatattgagaaagataatgcacgattcatgaaaaaggcaaccaagcactatgagatgcttgctaatcgaacagctgcaaatggtcactgcattgatatttatgcttgtgcccttgatcaaactggacttttggagatgaagtgttgtgcaaatcttactggaggctacatggtaatgggagattctttcaacacttctctcttcaagcagacattccaaagaatctttactaaagattttaatggagatttccgaatggcatttggtgctactttggacgtaaagacctctcgggaactgaagattgcaggagccattggtccatgcgtatctctgaatgtgaaaggaccgtgtgtgtcagaaaatgagcttggtgttggtggcacgagtcagtggaaaatctgtggcctagatcctacatctacacttggcatctattttgaagttgtcaatcagcacaacaccccgatcccccaaggaggcagaggagccatccagtttgtcacgcattatcagcactccagcacccagagacgcatccgcgtgaccaccatcgcccgaaattgggcagatgtacagagtcagctcaggcacatagaagcagcatttgaccaggaggctgcggcagtgttgatggcacggcttggggtgttccgagcggagtcagaggaggggcccgatgtgctccggtggctggaccgacaactcatccgactgtgtcaaaagtttggacagtataacaaagaagaccccacttcttttaggttatcagattccttttctctatatcctcagtttatgttccatctgagaagatctccatttcttcaagtgtttaacaacagtcctgatgagtcgtcatattacagacatcattttgcccggcaggacctgacccagtccctcatcatgatccagcccattctctactcttactcctttcatgggccaccagagccagtactcttggatagcagcagcattctagctgacagaattttgctgatggatactttctttcaaattgtcatttatcttggtgagaccatagcccagtggcgtaaagctggctaccaggacatgcccgagtatgaaaacttcaagcaccttctgcaggcaccactggatgatgctcaagaaattctgcaagcacgcttcccgatgccacgttacatcaacacggagcatggaggcagtcaggctcgattccttttgtccaaagtgaacccatctcagacacacaataacctgtatgcttggggacaggaaactggagcacccatcctaactgatgatgttagcctgcaggtgttcatggaccatttgaagaagctggctgtctccagtgcctgttaagctgaggatacaaccaggaaatgcaacggtgtcagattgtgttcaaaatgtctagaaaggcttgataacattcctgttacttttctagcagattttaacaaataatcaaggacattttatatgtaactctttagattataatttatttgtattcctgtctttgtcctttttcttgcactataaaattataaggtcataaatgttttggtacttgtagatgtttatgtgctttttgtatcctaacttttagaatctaaataaaatcagaggtaatgtattttggcagcttgtttaggtgagaatcttaatgatcataaaaggaaataaatctagatgcagaaagtactggctaaaatattgctaatacaaatgtgatttcctga

SEQ ID NO: 307945 - DNA, 3079 bp, Homo sapiens
aatgccttcttccggcagccttagtttcttccaaccagtgcagctccctgttccgcgagcatacgtcatcgttctcgctttccggtagctaaggcgatcagcgggacttcccactgagacgagcggatgtcatattgtatcagggcgaacctctgaggagcgctggctgcgcttaggcaacggtgcggcaggcgccggggttttctgaaacagaaacgtttaggggtggggaaacgtgttccgaggaactctcgttttgaagtgcgagatacacctgtcttgccctgttccaagatggtggcagagcttctctgagtctctcgcttcctccagtccgtcggagaagcgctctttgattggccagtggacagcgccgtggcatgacgcgctggggcgctggccaatcggttgagagctgagctggacttggcggtgggagccggagcctgcttgttgcagctgtgggtgaggacggctctagctagttcccttttagactatggcgacatacctggagttcatccagcagaatgaagaacgggatggtgtgcgttttagttggaacgtgtggccttccagccggctggaggctacaagaatggttgtacccctggcttgtctccttactcctttgaaagaacgtccagacctacctcctgtacaatatgaacctgtgctttgcagcaggccaacttgtaaagctgttctcaacccactttgtcaggttgattatcgagcaaaactttgggcctgtaatttctgttttcaaagaaatcagtttcctccagcttatggaggcatatctgaggtgaatcaacctgccgaattgatgccccagttttctacaattgagtacgtgatacagcgaggtgctcagtcccctctgatctttctctatgtggttgacacatgcctggaggaagatgaccttcaagcactcaaagagtccctgcagatgtccctgagtcttcttcctccagatgctctggtgggtctgatcacatttggaaggatggtgcaggttcatgagctaagctgtgaaggaatctccaaaagttatgtcttccgagggaccaaggatttaactgcaaagcaaatacaggatatgttgggcctgaccaagccagccatgcccatgcagcaagcacgacctgcacaaccacaggagcacccttttgcttcaagcagatttctgcagcctgttcacaagattgatatgaacctcactgatcttcttggggagctacagagggacccatggccagtaactcaggggaagagacctttgcgatccactggtgtggctttgtccattgctgttggcttgctggagggcacttttccaaacacaggagccaggatcatgctgtttactggaggtccccctacccaagggcctggcatggtggttggagatgaattaaagattcctattcgttcttggcatgatattgagaaagataatgcacgattcatgaaaaaggcaaccaagcactatgagatgcttgctaatcgaacagctgcaaatggtcactgcattgatatttatgcttgtgcccttgatcaaactggacttttggagatgaagtgttgtgcaaatcttactggaggctacatggtaatgggagattctttcaacacttctctcttcaagcagacattccaaagaatctttactaaagattttaatggagatttccgaatggcatttggtgctactttggacgtaaagacctctcgggaactgaagattgcaggagccattggtccatgcgtatctctgaatgtgaaaggaccgtgtgtgtcagaaaatgagcttggtgttggtggcacgagtcagtggaaaatctgtggcctagatcctacatctacacttggcatctattttgaagttgtcaatcagcacaacaccccgatcccccaaggaggcagaggagccatccagtttgtcacgcattatcagcactccagcacccagagacgcatccgcgtgaccaccatcgcccgaaattgggcagatgtacagagtcagctcaggcacatagaagcagcatttgaccaggaggctgcggcagtgttgatggcacggcttggggtgttccgagcggagtcagaggaggggcccgatgtgctccggtggctggaccgacaactcatccgactgtgtcaaaagtttggacagtataacaaagaagaccccacttcttttaggttatcagattccttttctctatatcctcagtttatgttccatctgagaagatctccatttcttcaagtgtttaacaacagtcctgatgagtcgtcatattacagacatcattttgcccggcaggacctgacccagtccctcatcatgatccagcccattctctactcttactcctttcatgggccaccagagccagtactcttggatagcagcagcattctagctgacagaattttgctgatggatactttctttcaaattgtcatttatcttggtgagaccatagcccagtggcgtaaagctggctaccaggacatgcccgagtatgaaaacttcaagcaccttctgcaggcaccactggatgatgctcaagaaattctgcaagcacgcttcccgatgccacgttacatcaacacggagcatggaggcagtcaggctcgattccttttgtccaaagtgaacccatctcagacacacaataacctgtatgcttggggacaggaaactggagcacccatcctaactgatgatgttagcctgcaggtgttcatggaccatttgaagaagctggctgtctccagtgcctgttaagctgaggatacaaccaggaaatgcaacggtgtcagattgtgttcaaaatgtctagaaaggcttgataacattcctgttacttttctagcagattttaacaaataatcaaggacattttatatgtaactctttagattataatttatttgtattcctgtctttgtcctttttcttgcactataaaattataaggtcataaatgttttggtacttgtagatgtttatgtgctttttgtatcctaacttttagaatctaaataaaatcagaggtaatgt

SEQ ID NO: 307946 - DNA, 2883 bp, Homo sapiens
aatgccttcttccggcagccttagtttcttccaaccagtgcagctccctgttccgcgagcatacgtcatcgttctcgctttccggtagctaaggcgatcagcgggacttcccactgagacgagcggatgtcatattgtatcagggcgaacctctgaggagcgctggctgcgcttaggcaacgttcccttttagactatggcgacatacctggagttcatccagcagaatgaagaacgggatggtgtgcgttttagttggaacgtgtggccttccagccggctggaggctacaagaatggttgtacccctggcttgtctccttactcctttgaaagaacgtccagacctacctcctgtacaatatgaacctgtgctttgcagcaggccaacttgtaaagctgttctcaacccactttgtcaggttgattatcgagcaaaactttgggcctgtaatttctgttttcaaagaaatcagtttcctccagcttatggaggcatatctgaggtgaatcaacctgccgaattgatgccccagttttctacaattgagtacgtgatacagcgaggtgctcagtcccctctgatctttctctatgtggttgacacatgcctggaggaagatgaccttcaagcactcaaagagtccctgcagatgtccctgagtcttcttcctccagatgctctggtgggtctgatcacatttggaaggatggtgcaggttcatgagctaagctgtgaaggaatctccaaaagttatgtcttccgagggaccaaggatttaactgcaaagcaaatacaggatatgttgggcctgaccaagccagccatgcccatgcagcaagcacgacctgcacaaccacaggagcacccttttgcttcaagcagatttctgcagcctgttcacaagattgatatgaacctcactgatcttcttggggagctacagagggacccatggccagtaactcaggggaagagacctttgcgatccactggtgtggctttgtccattgctgttggcttgctggagggcacttttccaaacacaggagccaggatcatgctgtttactggaggtccccctacccaagggcctggcatggtggttggagatgaattaaagattcctattcgttcttggcatgatattgagaaagataatgcacgattcatgaaaaaggcaaccaagcactatgagatgcttgctaatcgaacagctgcaaatggtcactgcattgatatttatgcttgtgcccttgatcaaactggacttttggagatgaagtgttgtgcaaatcttactggaggctacatggtaatgggagattctttcaacacttctctcttcaagcagacattccaaagaatctttactaaagattttaatggagatttccgaatggcatttggtgctactttggacgtaaagacctctcgggaactgaagattgcaggagccattggtccatgcgtatctctgaatgtgaaaggaccgtgtgtgtcagaaaatgagcttggtgttggtggcacgagtcagtggaaaatctgtggcctagatcctacatctacacttggcatctattttgaagttgtcaatcagcacaacaccccgatcccccaaggaggcagaggagccatccagtttgtcacgcattatcagcactccagcacccagagacgcatccgcgtgaccaccatcgcccgaaattgggcagatgtacagagtcagctcaggcacatagaagcagcatttgaccaggaggctgcggcagtgttgatggcacggcttggggtgttccgagcggagtcagaggaggggcccgatgtgctccggtggctggaccgacaactcatccgactgtgtcaaaagtttggacagtataacaaagaagaccccacttcttttaggttatcagattccttttctctatatcctcagtttatgttccatctgagaagatctccatttcttcaagtgtttaacaacagtcctgatgagtcgtcatattacagacatcattttgcccggcaggacctgacccagtccctcatcatgatccagcccattctctactcttactcctttcatgggccaccagagccagtactcttggatagcagcagcattctagctgacagaattttgctgatggatactttctttcaaattgtcatttatcttggtgagaccatagcccagtggcgtaaagctggctaccaggacatgcccgagtatgaaaacttcaagcaccttctgcaggcaccactggatgatgctcaagaaattctgcaagcacgcttcccgatgccacgttacatcaacacggagcatggaggcagtcaggctcgattccttttgtccaaagtgaacccatctcagacacacaataacctgtatgcttggggacaggaaactggagcacccatcctaactgatgatgttagcctgcaggtgttcatggaccatttgaagaagctggctgtctccagtgcctgttaagctgaggatacaaccaggaaatgcaacggtgtcagattgtgttcaaaatgtctagaaaggcttgataacattcctgttacttttctagcagattttaacaaataatcaaggacattttatatgtaactctttagattataatttatttgtattcctgtctttgtcctttttcttgcactataaaattataaggtcataaatgttttggtacttgtagatgtttatgtgctttttgtatcctaacttttagaatctaaataaaatcagaggtaatgtattttggcagcttgtttaggtgagaatcttaatgatcataaaaggaaataaatctagatgcagaaagtactggctaaaatattgctaatacaaatgtgatttcctga

SEQ ID NO: 307947 - DNA, 2769 bp, Homo sapiens
gcaagcacagacgcgcgacacaagggatgtagacgtgcgtcgccgggttgtaatttcatcacgagagctgagctggacttggcggtgggagccggagcctgcttgttgcagctgtgggtgaggacggctctagctaggtgagcggctccggccagttcccttttagactatggcgacatacctggagttcatccagcagaatgaagaacgggatggtgtgcgttttagttggaacgtgtggccttccagccggctggaggctacaagaatggttgtacccctggcttgtctccttactcctttgaaagaacgtccagacctacctcctgtacaatatgaacctgtgctttgcagcaggccaacttgtaaagctgttctcaacccactttgtcaggttgattatcgagcaaaactttgggcctgtaatttctgttttcaaagaaatcagtttcctccagcttatggaggcatatctgaggtgaatcaacctgccgaattgatgccccagttttctacaattgagtacgtgatacagcgaggtgctcagtcccctctgatctttctctatgtggttgacacatgcctggaggaagatgaccttcaagcactcaaagagtccctgcagatgtccctgagtcttcttcctccagatgctctggtgggtctgatcacatttggaaggatggtgcaggttcatgagctaagctgtgaaggaatctccaaaagttatgtcttccgagggaccaaggatttaactgcaaagcaaatacaggatatgttgggcctgaccaagccagccatgcccatgcagcaagcacgacctgcacaaccacaggagcacccttttgcttcaagcagatttctgcagcctgttcacaagattgatatgaacctcactgatcttcttggggagctacagagggacccatggccagtaactcaggggaagagacctttgcgatccactggtgtggctttgtccattgctgttggcttgctggagggcacttttccaaacacaggagccaggatcatgctgtttactggaggtccccctacccaagggcctggcatggtggttggagatgaattaaagattcctattcgttcttggcatgatattgagaaagataatgcacgattcatgaaaaaggcaaccaagcactatgagatgcttgctaatcgaacagctgcaaatggtcactgcattgatatttatgcttgtgcccttgatcaaactggacttttggagatgaagtgttgtgcaaatcttactggaggctacatggtaatgggagattctttcaacacttctctcttcaagcagacattccaaagaatctttactaaagattttaatggagatttccgaatggcatttggtgctactttggacgtaaagacctctcgggaactgaagattgcaggagccattggtccatgcgtatctctgaatgtgaaaggaccgtgtgtgtcagaaaatgagcttggtgttggtggcacgagtcagtggaaaatctgtggcctagatcctacatctacacttggcatctattttgaagttgtcaatcagcacaacaccccgatcccccaaggaggcagaggagccatccagtttgtcacgcattatcagcactccagcacccagagacgcatccgcgtgaccaccatcgcccgaaattgggcagatgtacagagtcagctcaggcacatagaagcagcatttgaccaggaggctgcggcagtgttgatggcacggcttggggtgttccgagcggagtcagaggaggggcccgatgtgctccggtggctggaccgacaactcatccgactgtgtcaaaagtttggacagtataacaaagaagaccccacttcttttaggttatcagattccttttctctatatcctcagtttatgttccatctgagaagatctccatttcttcaagtgtttaacaacagtcctgatgagtcgtcatattacagacatcattttgcccggcaggacctgacccagtccctcatcatgatccagcccattctctactcttactcctttcatgggccaccagagaccatagcccagtggcgtaaagctggctaccaggacatgcccgagtatgaaaacttcaagcaccttctgcaggcaccactggatgatgctcaagaaattctgcaagcacgcttcccgatgccacgttacatcaacacggagcatggaggcagtcaggctcgattccttttgtccaaagtgaacccatctcagacacacaataacctgtatgcttggggacaggaaactggagcacccatcctaactgatgatgttagcctgcaggtgttcatggaccatttgaagaagctggctgtctccagtgcctgttaagctgaggatacaaccaggaaatgcaacggtgtcagattgtgttcaaaatgtctagaaaggcttgataacattcctgttacttttctagcagattttaacaaataatcaaggacattttatatgtaactctttagattataatttatttgtattcctgtctttgtcctttttcttgcactataaaattataaggtcataaatgttttggtacttgtagatgtttatgtgctttttgtatcctaacttttagaatctaaataaaatcagaggtaatgtattttggcagcttgtttaggtgagaatcttaatgatcataaaaggaaataaatctagatgcagaaagtactggctaaaatattgctaatacaaatgtgatttcctga

SEQ ID NO: 307948 - DNA, 2345 bp, Homo sapiens
  misc_feature (237)..(237): n is a, c, g, or t
  misc_feature (249)..(249): n is a, c, g, or t
  misc_feature (258)..(261): n is a, c, g, or t
  misc_feature (265)..(265): n is a, c, g, or t
  misc_feature (273)..(273): n is a, c, g, or t
  misc_feature (280)..(280): n is a, c, g, or t
  misc_feature (285)..(285): n is a, c, g, or t
  misc_feature (331)..(331): n is a, c, g, or t
  misc_feature (347)..(347): n is a, c, g, or t
cccgcgccgcgggggtgcccgctgaacgcgccgtccagctgcagctgcagtcgctctagagatcccgaggcgtccgaatggcattggtgctactttggacgtaagacttctcgggaactgaagattgcaggagccattggtccatgcgtatctctgaatgtgaaaggaccgtgtgtgtcagaaaatgagcttggtgttggtggcacgagtcagtggaaaatctgtggcctagatccnacatctacactnggcatctannnngaanttgtcaancagcacnacacnccgatcccccaaggaggcagaggagccatccagtttgtcacgcatnatcagcactccagcanatttctgcagcctgttcacaagattgatatgaacctcactgatcttcttggggagctacagagggacccatggccagtaactcaggggaagagacctttgcgatccactggtgtggctttgtccattgctgttggcttgctggagggcacttttccaaacacaggagccaggatcatgctgtttactggaggtccccctacccaagggcctggcatggtggttggagatgaattaaagattcctattcgttcttggcatgatattgagaaagataatgcacgattcatgaaaaaggcaaccaagcactatgagatgcttgctaatcgaacagctgcaaatggtcactgcattgatatttatgcttgtgcccttgatcaaactggacttttggagatgaagtgttgtgcaaatcttactggaggctacatggtaatgggagattctttcaacacttctctcttcaagcagacattccaaagaatctttactaaagattttaatggagatttccgaatggcatttggtgctactttggacgtaaagacctctcgggaactgaagattgcaggagccattggtccatgcgtatctctgaatgtgaaaggaccgtgtgtgtcagaaaatgagcttggtgttggtggcacgagtcagtggaaaatctgtggcctagatcctacatctacacttggcatctattttgaagttgtcaatcagcacaacaccccgatcccccaaggaggcagaggagccatccagtttgtcacgcattatcagcactccagcacccagagacgcatccgcgtgaccaccatcgcccgaaattgggcagatgtacagagtcagctcaggcacatagaagcagcatttgaccaggaggctgcggcagtgttgatggcacggcttggggtgttccgagcggagtcagaggaggggcccgatgtgctccggtggctggaccgacaactcatccgactgtgtcaaaagtttggacagtataacaaagaagaccccacttcttttaggttatcagattccttttctctatatcctcagtttatgttccatctgagaagatctccatttcttcaagtgtttaacaacagtcctgatgagtcgtcatattacagacatcattttgcccggcaggacctgacccagtccctcatcatgatccagcccattctctactcttactcctttcatgggccaccagagccagtactcttggatagcagcagcattctagctgacagaattttgctgatggatactttctttcaaattgtcatttatcttggtgagaccatagcccagtggcgtaaagctggctaccaggacatgcccgagtatgaaaacttcaagcaccttctgcaggcaccactggatgatgctcaagaaattctgcaagcacgcttcccgatgccacgttacatcaacacggagcatggaggcagtcaggctcgattccttttgtccaaagtgaacccatctcagacacacaataacctgtatgcttggggacaggaaactggagcacccatcctaactgatgatgttagcctgcaggtgttcatggaccatttgaagaagctggctgtctccagtgcctgttaagctgaggatacaaccaggaaatgcaacggtgtcagattgtgttcaaaatgtctagaaaggcttgataacattcctgttacttttctagcagattttaacaaataatcaaggacattttatatgtaactctttagattataatttatttgtattcctgtctttgtcctttttcttgcactataaaattataaggtcataaatgttttggtacttgtagatgtttatgtgctttttgtatcctaacttttagaatctaaataaaatcagaggtaatgtattttggcagcttgtttaggtgagaatcttaatgatcataaaaggaaataaatctagatgcagaaagtactggctaaaatattgctaatacaaatgtgatttcctga

SEQ ID NO: 307949 - DNA, 3001 bp, Homo sapiens
aatgccttcttccggcagccttagtttcttccaaccagtgcagctccctgttccgcgagcatacgtcatcgttctcgctttccggtagctaaggcgatcagcgggacttcccactgagacgagcggatgtcatattgtatcagggcgaacctctgaggagcgctggctgcgcttaggcaacggtgcggcaggcgccggggttttctgaaacagaaacgtttaggggtggggaaacgtgttccgaggaactctcgttttgaagtgcgagatacacctgtcttgccctgttccaagatggtggcagagcttctctgagtctctcgcttcctccagtccgtcggagaagcgctctttgattggccagtggacagcgccgtggcatgacgcgctggggcgctggccaatcggttgagagctgagctggacttggcggtgggagccggagcctgcttgttgcagctgtgggtgaggacggctctagctagttcccttttagactatggcgacatacctggagttcatccagcagaatgaagaacgggatggtgtgcgttttagttggaacgtgtggccttccagccggctggaggctacaagaatggttgtacccctggcttgtctccttactcctttgaaagaacgtccagacctacctcctgtacaatatgaacctgtgctttgcagcaggccaacttgtaaagctgttctcaacccactttgtcaggttgattatcgagcaaaactttgggcctgtaatttctgttttcaaagaaatcagtttcctccagcttatggaggcatatctgaggtgaatcaacctgccgaattgatgccccagttttctacaattgagtacgtgatacagcgaggtgctcagtcccctctgatctttctctatgtggttgacacatgcctggaggaagatgaccttcaagcactcaaagagtccctgcagatgtccctgagtcttcttcctccagatgctctggtgggtctgatcacatttggaaggatggtgcaggttcatgagctaagctgtgaaggaatctccaaaagttatgtcttccgagggaccaaggatttaactgcaaagcaaatacaggatatgttgggcctgaccaagccagccatgcccatgcagcaagcacgacctgcacaaccacaggagcacccttttgcttcaagcagatttctgcagcctgttcacaagattgatatgaacctcactgatcttcttggggagctacagagggacccatggccagtaactcaggggaagagacctttgcgatccactggtgtggctttgtccattgctgttggcttgctggagggcacttttccaaacacaggagccaggatcatgctgtttactggaggtccccctacccaagggcctggcatggtggttggagatgaattaaagattcctattcgttcttggcatgatattgagaaagataatgcacgattcatgaaaaaggcaaccaagcactatgagatgcttgctaatcgaacagctgcaaatggtcactgcattgatatttatgcttgtgcccttgatcaaactggacttttggagatgaagtgttgtgcaaatcttactggaggctacatggtaatgggagattctttcaacacttctctcttcaagcagacattccaaagaatctttactaaagattttaatggagatttccgaatggcatttggtgctactttggacgtaaagacctctcgggaactgaagattgcaggagccattggtccatgcgtatctctgaatgtgaaaggaccgtgtgtgtcagaaaatgagcttggtgttggtggcacgagtcagtggaaaatctgtggcctagatcctacatctacacttggcatctattttgaagttgtcaatcagcacaacaccccgatcccccaaggaggcagaggagccatccagtttgtcacgcattatcagcactccagcacccagagacgcatccgcgtgaccaccatcgcccgaaattgggcagatgtacagagtcagctcaggcacatagaagcagcatttgaccaggaggctgcggcagtgttgatggcacggcttggggtgttccgagcggagtcagaggaggggcccgatgtgctccggtggctggaccgacaactcatccgactgtgtcaaaagtttggacagtataacaaagaagaccccacttcttttaggttatcagattccttttctctatatcctcagtttatgttccatctgagaagatctccatttcttcaagtgtttaacaacagtcctgatgagtcgtcatattacagacatcattttgcccggcaggacctgacccagtccctcatcatgatccagcccattctctactcttactcctttcatgggccaccagagccagtactcttggatagcagcagcattctagctgacagaattttgctgatggatactttctttcaaattgtcatttatcttggtgagaccatagcccagtggcgtaaagctggctaccaggacatgcccgagtatgaaaacttcaagcaccttctgcaggcaccactggatgatgctcaagaaattctgcaagcacgcttcccgatgccacgttacatcaacacggagcatggaggcagtcaggctcgattccttttgtccaaagtgaacccatctcagacacacaataacctgtatgcttggggacaggaaactggagcacccatcctaactgatgatgttagcctgcaggtgttcatggaccatttgaagaagctggctgtctccagtgcctgttaagctgaggatacaaccaggaaatgcaacggtgtcagattgtgttcaaaatgtctagaaaggcttgataacattcctgttacttttctagcagattttaacaaataatcaaggacattttatatgtaactctttagattataatttatttgtattcctgtctttgtcctttttcttgcactataaaattataaggtcata

SEQ ID NO: 307950 - DNA, 1756 bp, Homo sapiens
  misc_feature (237)..(237): n is a, c, g, or t
  misc_feature (249)..(249): n is a, c, g, or t
  misc_feature (258)..(261): n is a, c, g, or t
  misc_feature (265)..(265): n is a, c, g, or t
  misc_feature (273)..(273): n is a, c, g, or t
  misc_feature (280)..(280): n is a, c, g, or t
  misc_feature (285)..(285): n is a, c, g, or t
  misc_feature (331)..(331): n is a, c, g, or t
  misc_feature (347)..(347): n is a, c, g, or t
cccgcgccgcgggggtgcccgctgaacgcgccgtccagctgcagctgcagtcgctctagagatcccgaggcgtccgaatggcattggtgctactttggacgtaagacttctcgggaactgaagattgcaggagccattggtccatgcgtatctctgaatgtgaaaggaccgtgtgtgtcagaaaatgagcttggtgttggtggcacgagtcagtggaaaatctgtggcctagatccnacatctacactnggcatctannnngaanttgtcaancagcacnacacnccgatcccccaaggaggcagaggagccatccagtttgtcacgcatnatcagcactccagcanccagagacgcatccgcgtgaccaccatcgcccgaaagagcttggtgttggtggcacgagtcagtggaaaatctgtggcctagatcctacatctacacttggcatctattttgaagttgtcaatcagcacaacaccccgatcccccaaggaggcagaggagccatccagtttgtcacgcattatcagcactccagcacccagagacgcatccgcgtgaccaccatcgcccgaaattgggcagatgtacagagtcagctcaggcacatagaagcagcatttgaccaggaggctgcggcagtgttgatggcacggcttggggtgttccgagcggagtcagaggaggggcccgatgtgctccggtggctggaccgacaactcatccgactgtgtcaaaagtttggacagtataacaaagaagaccccacttcttttaggttatcagattccttttctctatatcctcagtttatgttccatctgagaagatctccatttcttcaagtgtttaacaacagtcctgatgagtcgtcatattacagacatcattttgcccggcaggacctgacccagtccctcatcatgatccagcccattctctactcttactcctttcatgggccaccagagccagtactcttggatagcagcagcattctagctgacagaattttgctgatggatactttctttcaaattgtcatttatcttggtgagaccatagcccagtggcgtaaagctggctaccaggacatgcccgagtatgaaaacttcaagcaccttctgcaggcaccactggatgatgctcaagaaattctgcaagcacgcttcccgatgccacgttacatcaacacggagcatggaggcagtcaggctcgattccttttgtccaaagtgaacccatctcagacacacaataacctgtatgcttggggacaggaaactggagcacccatcctaactgatgatgttagcctgcaggtgttcatggaccatttgaagaagctggctgtctccagtgcctgttaagctgaggatacaaccaggaaatgcaacggtgtcagattgtgttcaaaatgtctagaaaggcttgataacattcctgttacttttctagcagattttaacaaataatcaaggacattttatatgtaactctttagattataatttatttgtattcctgtctttgtcctttttcttgcactataaaattataaggtcataaatgttttggtacttgtagatgtttatgtgctttttgtatcctaacttttagaatctaaataaaatcagaggtaatgtattttggcagcttgtttaggtgagaatcttaatgatcataaaaggaaataaatctagatgcagaaagtactggctaaaatattgctaatacaaatgtgatttcctga

SEQ ID NO: 307951 - DNA, 2388 bp, Homo sapiens
gcaagcacagacgcgcgacacaagggatgtagacgtgcgtcgccgggttgtaatttcatcacgagagctgagctggacttggcggtgggagccggagcctgcttgttgcagctgtgggtgaggacggctctagctaggtgagcggctccggccagttcccttttagactatggcgacatacctggagttcatccagcagaatgaagaacgggatggtgtgcgttttagttggaacgtgtggccttccagccggctggaggctacaagaatggttgtacccctggcttgtctccttactcctttgaaagaacgtccagacctacctcctgtacaatatgaacctgtgctttgcagcaggccaacttgtaaagctgttctcaacccactttgtcaggttgattatcgagcaaaactttgggcctgtaatttctgttttcaaagaaatcagtttcctccagcttatggaggcatatctgaggtgaatcaacctgccgaattgatgccccagttttctacaattgagtacgtgatacagcgaggtgctcagtcccctctgatctttctctatgtggttgacacatgcctggaggaagatgaccttcaagcactcaaagagtccctgcagatgtccctgagtcttcttcctccagatgctctggtgggtctgatcacatttggaaggatggtgcaggttcatgagctaagctgtgaaggaatctccaaaagttatgtcttccgagggaccaaggatttaactgcaaagcaaatacaggatatgttgggcctgaccaagccagccatgcccatgcagcaagcacgacctgcacaaccacaggagcacccttttgcttcaagcagatttctgcagcctgttcacaagattgatatgaacctcactgatcttcttggggagctacagagggacccatggccagtaactcaggggaagagacctttgcgatccactggtgtggctttgtccattgctgttggcttgctggagggcacttttccaaacacaggagccaggatcatgctgtttactggaggtccccctacccaagggcctggcatggtggttggagatgaattaaagattcctattcgttcttggcatgatattgagaaagataatgcacgattcatgaaaaaggcaaccaagcactatgagatgcttgctaatcgaacagctgcaaatggtcactgcattgatatttatgcttgtgcccttgatcaaactggacttttggagatgaagtgttgtgcaaatcttactggaggctacatggtaatgggagattctttcaacacttctctcttcaagcagacattccaaagaatctttactaaagattttaatggagatttccgaatggcatttggtgctactttggacgtaaagacctctcgggaactgaagattgcaggagccattggtccatgcgtatctctgaatgtgaaaggaccgtgtgtgtcagaaaatgagcttggtgttggtggcacgagtcagtggaaaatctgtggcctagatcctacatctacacttggcatctattttgaagttgtcaatcagcacaacaccccgatcccccaaggaggcagaggagccatccagtttgtcacgcattatcagcactccagcacccagagacgcatccgcgtgaccaccatcgcccgaaattgggcagatgtacagagtcagctcaggcacatagaagcagcatttgaccaggaggctgcggcagtgttgatggcacggcttggggtgttccgagcggagtcagaggaggggcccgatgtgctccggtggctggaccgacaactcatccgactgtgtcaaaagtttggacagtataacaaagaagaccccacttcttttaggttatcagattccttttctctatatcctcagtttatgttccatctgagaagatctccatttcttcaagtgtttaacaacagtcctgatgagtcgtcatattacagacatcattttgcccggcaggacctgacccagtccctcatcatgatccagcccattctctactcttactcctttcatgggccaccagagccagtactcttggatagcagcagcattctagctgacagaattttgctgatggatactttctttcaaattgtcatttatcttggtgagaccatagcccagtggcgtaaagctggctaccaggacatgcccgagtatgaaaacttcaagcaccttctgcaggcaccactggatgatgctcaagaaattctgcaagcacgcttcccgatgccacgttacatcaacacggagcatggaggcagtcagcttcttcaaatggtccatgaacacctgcaggctaacatcatcagttaggagtcgacgcggccgcgaattta

SEQ ID NO: 307952 - DNA, 1073 bp, Homo sapiens
cgagttgatcccccttcgacggtgtcctggacctgacaactcatccgactgtgtcaaaagtttggacagtataacaaagaagaccccacttcttttaggttatcagattccttttctctatatcctcagtttatgttccatctgagaagatctccatttcttcaagtgtttaacaacagtcctgatgagtcgtcatattacagacatcattttgcccggcaggacctgacccagtccctcatcatgatccagcccattctctactcttactcctttcatgggccaccagagccagtactcttggatagcagcagcattctagctgacagaattttgctgatggatactttctttcaaattgtcatttatcttggtgagaccatagcccagtggcgtaaagctggctaccaggacatgcccgagtatgaaaacttcaagcaccttctgcaggcaccactggatgatgctcaagaaattctgcaagcacgcttcccgatgccacgttacatcaacacggagcatggaggcagtcaggctcgattccttttgtccaaagtgaacccatctcagacacacaataacctgtatgcttggggacaggaaactggagcacccatcctaactgatgatgttagcctgcaggtgttcatggaccatttgaagaagctggctgtctccagtgcctgttaagctgaggatacaaccaggaaatgcaacggtgtcagattgtgttcaaaatgtctagaaaggcttgataacattcctgttacttttctagcagattttaacaaataatcaaggacattttatatgtaactctttagattataatttatttgtattcctgtctttgtcctttttcttgcactataaaattataaggtcataaatgttttggtacttgtagatgtttatgtgctttttgtatcctaacttttagaatctaaataaaatcagaggtaatgtattttggcagcttgtttaggtgagaatcttaatgatcataaaaggaaataaatctagatgcagaaagtactggctaaaatattgctaatacaaatgtgatttcctga

SEQ ID NO: 307953 - DNA, 1289 bp, Homo sapiens
  misc_feature (1185)..(1185): n is a, c, g, or t
  misc_feature (1199)..(1199): n is a, c, g, or t
  misc_feature (1212)..(1212): n is a, c, g, or t
  misc_feature (1243)..(1243): n is a, c, g, or t
  misc_feature (1253)..(1253): n is a, c, g, or t
  misc_feature (1289)..(1289): n is a, c, g, or t
gcaagcacagacgcgcgacacaagggatgtagacgtgcgtcgccgggttgtaatttcatcacgagagctgagctggacttggcggtgggagccggagcctgcttgttgcagctgtgggtgaggacggctctagctaggtgagcggctccggccagttcccttttagactatggcgacatacctggagttcatccagcagaatgaagaacgggatggtgtgcgttttagttggaacgtgtggccttccagccggctggaggctacaagaatggttgtacccctggcttgtctccttactcctttgaaagaacgtccagacctacctcctgtacaatatgaacctgtgctttgcagcaggccaacttgtaaagctgttctcaacccactttgtcaggttgattatcgagcaaaactttgggcctgtaatttctgttttcaaagaaatcagtttcctccagcttatggaggcatatctgaggtgaatcaacctgccgaattgatgccccagttttctacaattgagtacgtgatacagcgaggtgctcagtcccctctgatctttctctatgtggttgacacatgcctggaggaagatgaccttcaagcactcaaagagtccctgcagatgtccctgagtcttcttcctccagatgctctggtgggtctgatcacatttggaaggatggtgcaggttcatgagctaagctgtgaaggaatctccaaaagttatgtcttccgagggaccaaggatttaactgcaaagcaaatacaggatatgttgggcctgaccaagccagccatgcccatgcagcaagcacgacctgcacaaccacaggagcacccttttgcttcaagcagatttctgcagcctgttcacaagattgatatgaacctcactgatcttcttggggagctacagagggacccatggccagtaactcaggggaagagacctttgcgatccactggtgtggctttgtccattgctgttggcttgctggagggcacttttccaaacacaggagccaggatcatgctgtttactggaggtccccctacccaagggcctggcatggtggttggagatgaattaaagattcctattcgttcttggcatgatattgagaaagataatgcacgattcatgaaaaaggcaaccaaggcactatgaagatggctttgccnaatccgaacaagcntgcaaaatggggnccactggcattggatattttaaggccttggngccctttggnttcaaaactgggaccttttttggggagaattaaagn

SEQ ID NO: 307954 - DNA, 1279 bp, Homo sapiens
gcaagcacagacgcgcgacacaagggatgtagacgtgcgtcgccgggttgtaatttcatcacgagagctgagctggacttggcggtgggagccggagcctgcttgttgcagctgtgggtgaggacggctctagctaggtgagcggctccggccagttcccttttagactatggcgacatacctggagttcatccagcagaatgaagaacgggatggtgtgcgttttagttggaacgtgtggccttccagccggctggaggctacaagaatggttgtacccctggcttgtctccttactcctttgaaagaacgtccagacctacctcctgtacaatatgaacctgtgctttgcagcaggccaacttgtaaagctgttctcaacccactttgtcaggttgattatcgagcaaaactttgggcctgtaatttctgttttcaaagaaatcagtttcctccagcttatggaggcatatctgaggtgaatcaacctgccgaattgatgccccagttttctacaattgagtacgtgatacagcgaggtgctcagtcccctctgatctttctctatgtggttgacacatgcctggaggaagatgaccttcaagcactcaaagagtccctgcagatgtccctgagtcttcttcctccagatgctctggtgggtctgatcacatttggaaggatggtgcaggttcatgagctaagctgtgaaggaatctccaaaagttatgtcttccgagggaccaaggatttaactgcaaagcaaatacaggatatgttgggcctgaccaagccagccatgcccatgcagcaagcacgacctgcacaaccacaggagcacccttttgcttcaagcagatttctgcagcctgttcacaagattgatatgaacctcactgatcttcttggggagctacagagggacccatggccagtaactcaggggaagagacctttgcgatccactggtgtggctttgtccattgctgttggcttgctggagggcacttttccaaacacaggagccaggatcatgctgtttactggaggtccccctacccaagggcctggcatggtggttggagatgaattaaagattcctattcgttcttggcatgatattgagaaagataatgcacgattcatgaaaaaggcaaccaagcactctgtgatgctttctaatcgcgcacatgtccaaatgtacaccacatttatatatgcgcgtgccccgtatcacacacgtgtcttggagatgagtgtgtgcacaattactcttggc

SEQ ID NO: 307955 - DNA, 1382 bp, Homo sapiens
  misc_feature (237)..(237): n is a, c, g, or t
  misc_feature (249)..(249): n is a, c, g, or t
  misc_feature (258)..(261): n is a, c, g, or t
  misc_feature (265)..(265): n is a, c, g, or t
  misc_feature (273)..(273): n is a, c, g, or t
  misc_feature (280)..(280): n is a, c, g, or t
  misc_feature (285)..(285): n is a, c, g, or t
  misc_feature (331)..(331): n is a, c, g, or t
  misc_feature (347)..(347): n is a, c, g, or t
cccgcgccgcgggggtgcccgctgaacgcgccgtccagctgcagctgcagtcgctctagagatcccgaggcgtccgaatggcattggtgctactttggacgtaagacttctcgggaactgaagattgcaggagccattggtccatgcgtatctctgaatgtgaaaggaccgtgtgtgtcagaaaatgagcttggtgttggtggcacgagtcagtggaaaatctgtggcctagatccnacatctacactnggcatctannnngaanttgtcaancagcacnacacnccgatcccccaaggaggcagaggagccatccagtttgtcacgcatnatcagcactccagcanccagagacgcatccgcgtgaccaccatcgcccgaaattgggcagatgtacagagtcagctcaggcacatagaagcagcatttgaccaggaggctgcggcagtgttgatggcacggcttggggtgttccgagcggagtcagaggaggggcccgatgtgctccggtggctggaccgacaactcatccgactgtgtcaaaagtttggacagtataacaaagaagaccccacttcttttaggttatcagattccttttctctatatcctcagtttatgttccatctgagaagatctccatttcttcaagtgtttaacaacagtcctgatgagtcgtcatattacagacatcattttgcccggcaggacctgacccagtccctcatcatgatccagcccattctctactcttactcctttcatgggccaccagagcaagaaattctgcaagcacgcttcccgatgccacgttacatcaacacggagcatggaggcagtcaggctcgattccttttgtccaaagtgaacccatctcagacacacaataacctgtatgcttggggacaggaaactggagcacccatcctaactgatgatgttagcctgcaggtgttcatggaccatttgaagaagctggctgtctccagtgcctgttaagctgaggatacaaccaggaaatgcaacggtgtcagattgtgttcaaaatgtctagaaaggcttgataacattcctgttacttttctagcagattttaacaaataatcaaggacattttatatgtaactctttagattataatttatttgtattcctgtctttgtcctttttcttgcactataaaattataaggtcataaatgttttggtacttgtagatgtttatgtgctttttgtatcctaacttttagaatctaaataaaatcagaggtaatgtattttggcagcttgtttaggtgagaatcttaatgatcataaaaggaaataaatctagatgcagaaagtactggctaaaatattgctaatacaaatgtgatttcctga

SEQ ID NO: 307956 - DNA, 962 bp, Homo sapiens
gcaagcacagacgcgcgacacaagggatgtagacgtgcgtcgccgggttgtaatttcatcacgagagctgagctggacttggcggtgggagccggagcctgcttgttgcagctgtgggtgaggacggctctagctaggtgagcggctccggccagttcccttttagactatggcgacatacctggagttcatccagcagaatgaagaacgggatggtgtgcgttttagttggaacgtgtggccttccagccggctggaggctacaagaatggttgtacccctggcttgtctccttactcctttgaaagaacgtccagacctacctcctgtacaatatgaacctgtgctttgcagcaggccaacttgtaaagctgttctcaacccactttgtcaggttgattatcgagcaaaactttgggcctgtaatttctgttttcaaagaaatcagtttcctccagcttatggaggcatatctgaggtgaatcaacctgccgaattgatgccccagttttctacaattgagtacgtgatacagcgaggtgctcagtcccctctgatctttctctatgtggttgacacatgcctggaggaagatgaccttcaagcactcaaagagtccctgcagatgtccctgagtcttcttcctccagatgctctggtgggtctgatcacatttggaaggatggtgcaggttcatgagctaagctgtgaaggaatctccaaaagttatgtcttccgagggaccaaggatttaactgcaaagcaaatacaggatatgttgggcctgaccaagccagccatgcccatgcagcaagcacgacctgcacaaccacaggagcacccttttgcttcaagcaggactttacacacctgtgtaaaaggatgtgggagaggagggtctgaagctgatctgctaaatgaatatccctgctctgctggtcaataaaacgcttcctaatagc

SEQ ID NO: 307957 - DNA, 1334 bp, Homo sapiens
tgtttaactacatgtagtttggagatgatcaggtgattgtaaacctcccactcctttgatttatttttaagtgcttgaaaggagaggtgagaaaggagcagtgatcaatgataactgtgcggttaactgacttttgggtatcagatggaaaagaaatactgtcattctacagcaacaggttcttcccaagtatttaagaaacactgtgttagttgggccgggtacagtgggtcacgcctgtaatcccagcactttggaaggccaaggcgggtggatcacctgaggtcaggagtttgagaccagcctggccaacatggtgaaaccctgcctctactaaaaatacaaaaaattagccgggcttggtggcacaggcttgtaatcccagctacttgggaggctgtggcaggagaatcgcttgaacccgggaggtggaggctgcagtgagctgagatgggaaaaaaagagaaacactgtgttacatgacccatcttctttttttgacatttagttcagaatttcacataccattaaggtaattaaagttttatcttcagttcccttttagactatggcgacatacctggagttcatccagcagaatgaagaacgggatggtgtgcgttttagttggaacgtgtggccttccagccggctggaggatacaaccaggaaatgcaacggtgtcagattgtgttcaaaatgtctagaaaggcttgataacattcctgttacttttctagcagattttaacaaataatcaaggacattttatatgtaactctttagattataatttatttgtattcctgtctttgtcctttttcttgcactataaaattataaggtcataaatgttttggtacttgtagatgtttatgtgctttttgtatcctaacttttagaatctaaataaaatcagaggtaatgtattttggcagcttgtttaggtgagaatcttaatgatcataaaaggaaataaatctagatgcagaaagtactggctaaaatattgctaatacaaatgtgatttcctgaggtctctgtgtgagtgtgtatgtgttttaagtgacttccttaagaggtgtttcctgaacctaattctcataattaaagtaatgtatatgcaggatcaaaatgaaacaaatataccttatcctaaagagctcataacaaataagttacctccactctataaactcagacctactttttgaagataactgcttttaacctctccttacaagatttttgttgttgatgtatttaattttagcccatgtctcaattctcattttcaaagaatcaatatattaatatacctttggtcaaatttg

SEQ ID NO: 307958 - DNA, 1113 bp, Homo sapiens
aatgccttcttccggcagccttagtttcttccaaccagtgcagctccctgttccgcgagcatacgtcatcgttctcgctttccggtagctaaggcgatcagcgggacttcccactgagacgagcggatgtcatattgtatcagggcgaacctctgaggagcgctggctgcgcttaggcaacggtgcggcaggcgccggggttttctgaaacagaaacgtttaggggtggggaaacgtgttccgaggaactctcgttttgaagtgcgagatacacctgtcttgccctgttccaagatggtggcagagcttctctgagtctctcgcttcctccagtccgtcggagaagcgctctttgattggccagtggacagcgccgtggcatgacgcgctggggcgctggccaatcggttgagagctgagctggacttggcggtgggagccggagcctgcttgttgcagctgtgggtgaggacggctctagctagttcccttttagactatggcgacatacctggagttcatccagcagaatgaagaacgggatggtgtgcgttttagttggaacgtgtggccttccagccggctggaggctacaagaatggttgtacccctggcttgtctccttactcctttgaaagaacgtccagacctacctcctgtacaatatgaacctgtgctttgcagcaggccaacttgtaaagctgttctcaacccactttgtcaggttgattatcgagcaaaactttgggcctgtaatttctgttttcaaagaaatcagtttcctccagcttatggaggcatatctgaggtgaatcaacctgccgaattgatgccccagttttctacaattgagtacgtgatacaggtaatttctttgttgtgcatttaatgagcaatgttaaatactgaatttctcttgaaatcctttgtcttccatgtctcttacctgggcaggggacttaaagctgtgagggcagcaggatcctaacctttaggtttgatgtgtgtgcatctactggcattgttttcaagtcctgacattatagaaggctactaaaaaggtagaactgattaaattccaaacctgttctctgtagccttcttcatctcagt

SEQ ID NO: 307959 - DNA, 5344 bp, Homo sapiens
tttattgaacatttattctgttcaaaacattcccaaaggcaacagaagatacaaataaatctctgcccatgaaaaggtgtggggggcattagaaggcgttctcttcggtgtaatgaagtaatgagagaagaaaaagtagtttgaagctatggagtaagggactttgagtatcccaggctcaaaaagttgggacttgaacagtacgggggtgctgctgaaaacgtttgagggaggtaatgacatgatcgaagctatacttgagaaaggtgaatctgataaagtatgagtgaaaaagagactgaaggtctagaaattagattgaggctaatgacaaaatccacataaataggaggacttgaacgaaggggcacttagaagaggacaggagatagtaaaaggcattcaatgatgagagcacacactacaggggagcatgagggaggttggaaaagataatgaaaggattaccgagcttcactgacgatgtgtttgaaatgagcaggaatcttgtagtgatcctaatccgtggttttctggagcatttcacagcctaggaacatacaaggggggcatctccctggaatgtaaattgactaagaggaattcaataatggtcaaatgaatgcagaattttagagtcttgcttagtattctcaccacatttcgtttagtctactcatactctttttctcttactgctgacactagatggaaaaactcttaattaaaagtatttcacaaaatgtgctcgttttcagtcattccgtttccactccagcctgttgtgttgtttttttgaaataataatttaaagtaattttccttttgcaggatggcatagtcaatccaacaataagaaaagatttgaaaactggaccgaaattctactgctgtccaattgaaggctgccccagaggccctgagagaccgttttctcagttttctctcgtaaaacagcactttatgaaaatgcatgctgagaagaagcacaaatgtagtaagtgcagcaattcgtacggtacagaatgggacctgaaaagacatgcagaggactgtggcaagaccttccggtgcacatgcggctgtccctacgccagtagaacagcactgcagtctcacatctaccgaactgggcacgagatacctgcagaacacagggacccacctagtaagaaaaggaaaatggaaaactgtgcacaaaaccagaagttatccaacaagaccattgaatcattgaacaaccaaccaatccctagaccagacactcaagaactagaagcttcagaaataaagctagaaccatcttttgaagactcttgtggctctaacactgacaagcagactcttacaacaccaccgagatatcctcagaagttgcttttaccaaagcccaaagtggctttggttaaactacccgtgatgcagttttctgtcatgcctgtctttgtgcctacagccgactcctcagcccagcctgtggtgttaggtgttgatcagggctctgccacaggggctgtgcacttaatgcccttgtcagtaggaaccctgatcctcggcctagattcagaggcttgctctcttaaggagagcctacctcttttcaaaattgctaatcctattgctggtgagccaataagtactggtgttcaagtgaactttggtaaaagtccatctaatcctttacaagaactagggaacacgtgtcaaaagaatagcatttcttcaatcaacgtgcagacagatctgtcttatgcctcacaaaactttataccttctgcacagtgggccactgctgattcctctgtgtcgtcttgttctcaaactgatttgtcgtttgattctcaagtgtctcttcccattagtgttcacactcagacatttttgcccagctctaaggtaacttcatctatagctgctcagactgatgcatttatggacacctgtttccagtcaggtggggtctccagagaaactcaaaccagtgggatagaaagtccaacggatgaccatgtacagatggaccaagctggaatgtgcggagacatttttgagagtgttcattcatcatataatgttgctacaggtaacattataagcaacagtttagtagcagagacagtaactcatagtttgttacctcagaatgagcctaagactttaaatcaagatattgagaaatctgcaccaattataaatttcagtgcacagaatagtatgcttccttcacagaacatgacagataatcagacccaaaccatagatttattaagtgatttggaaaacatcttgtcaagtaatctgcctgcccagacattggatcatcgtagtcttttgtctgacacaaatcctggacctgacacccagctcccatctggcccagcccagaaccccggaatcgattttgatatcgaagagttcttttcggcctcaaatatccagactcaaactgaagagagtgaacttagcaccatgaccaccgagccagtcttggagtcactggacatagagactcaaacggacttcttactcgcagatacctctgctcagtcctatgggtgtaggggaaattctaacttcttaggccttgagatgtttgacacacagacacagacagacttaaactttttcttagacagtagccctcatctgcctctgggaagtattctgaaacactccagcttttccgtgagtactgattcatctgacacagagacccaaactgaaggagtctccactgctaaaaatatacctgctctagaaagcaaagttcagttgaacagtacagaaacacagaccatgagttctgggtttgaaaccctggggagcttgttcttcaccagcaacgaaactcagacagcaatggatgactttcttctggctgatctggcctggaacacgatggagtctcagttcagctctgtagaaacccagacttctgcggaaccacacacagtctccaacttctaaaactaacggtggagtccatgtgtgaaatggcatctaccatttcctctggattaaaactacggactggggacaacagtattaattcgattgaatgtggctgatgatgcagttgcttagcttctttgtgtttctttgccttttgtacttgtaaacagaaatttgcgtataaatgtgagtgtattataaagtttgagatgttgatctaaattgtttttgtgttgcctacatttgccttttcacagctagtcttttcatgttaaaaaaaaaatgtatttcatatctataaaacctatatagccatttagctgaagcccagcttaccaggttcaagggtacaaacttctcaaatcttcaaaacattttagtcaaagtgtaatatacttaaactgcacctaaaatatctttggcactgcttgttagaaattcctgattcctgttactaatcactaaagaaaccggatgctgccaccgtaggatttaagcagtagtgcttccatgctcttaagactcctgctgcctggaccttcgtcagctttgacacctcttttctgatttaaagacaccaaggaaaactacaactgtctttagctttgaagcagttttcatgtaatcattgccacctcttcgctacatgaactactattgataccagcatacaagtgtatagcactttacacacaagaggtttattgatgtaaaattatcggctagggaagcagcagcgggccaggtgtggtggcttacccctgtaatcccagcactttgggaggccaaagcaggacgatcacttgagcccaggagttcaacaccagcttgggcaacataagaagaccgtgtctctggaatttttttttttttttaattagccaggcacagtggcatgcgcctgtgatcccagctacttggaaggctgaggtgagaggatcactcgaggagattggggctgccatgagccatggtcttggcactgtactccaacctgggtaacagggcaagaccctatctcaaaaaaaaaaaaaaagtcgccagcaacaagcacgtagtgtagtgttcctgctaaatgagcataggttatccaaaccttgggaacagggagttatggaaacgtgcctatgacttcatcttggggtgtgtcctatgaagatcctttctggtctccacagtaggccagagttgggggctctggagctgtttccccaagtgcatccacaagctggatctgagttttgtcactctaaaattaaacaagaaaaaaagtgggaaaagggcatcccccattaggtttcaatactttgcacttctactaagcttgatagggcaggagtgcaatctacaattattttaaagtgaatttccttccattcaccattctttatcttttctttgaataagaaaaagtatctagcaaggatattacttgtgccttgaggctagcaattataggatagattcatctaaaatatggtattctgcattttggttttttttcttaagtgaataataccagtcttcaaagaaaacaaggtgaagacctattgcttcaataatcaagaatgctttgtgtgttttgaggtaggagcatgatcaagtatgctttggggattttctgtatttaggagatcctggattcttaattgttggctaagttccagtcaagtaggaatcagtgcagcctgtaagttctccacattgacacacacacacacacacacacacacacacacgacatgctcctttctgtggcacatgcctgtattactgaaagctaaatcctcaaaacctagtaaggggaccaatgattcattaaagtaaattgatggttttgctactaattcctatcccatacatttgacacaaaagaagtgttggtaatggataaataacatatcccgggcagatgagctcaacctagtaggtaagagtttggtttggtcacagttgcctatgagtgtgggtttcaaaagaaacataaagccttaacttagaatttcattatgttttagaatcatcactgccttaatattcaagcatctatttaagtcctaataaaggagaaatgcatgtttatggcttttttgtaaatataaatgcagtgatctatggcttaaaaaatttgtttctgtgacaatgtttgtaaatctagccaatagagtcatttacagaagaaaaatgagcatgtaataatacaagaactgtttccccctcaaaacctgaacctgaattatttgtaaaaactgaaatttaatgattaaagagaagccagaattgtacccttttttgtgaattcttgaacgtactcataaatatgacttattgtattgccttaagttttcactcattgtcttttgaaagccatatgataaaatgattttattta

SEQ ID NO: 307960 - DNA, 728 bp, Homo sapiens
acgagctgggccgggcggccgtgcgggagccatggcggcctcggaggcggcggcggcggcggggtccgcggctctggcggcgggtgcccgggccgtcccggcggccacgacaggagccgccgccgccgcctcgggcccgtgggtgcccccgggaccccgactgaggggcagccggccgcggcccgcgggggcgacgcagcagcccgctgtccccgcgccgccggcgggggagctgatccagccgtcggtgagcgagctgtcccgggccgtgcggaccaacatcctgtgcaccgtgcgcggctgcggcaagatcctgcccaacagccccgcgctcaacatgcacctagtcaagagccaccgcctgcaggatggcatagtcaatccaacaataagaaaagatttgaaaactggaccgaaattctactgctgtccaattgaaggctgccccagaggccctgagagaccgttttctcagttttctctcgtaaaacaggtactctctactctgaggatgagatacagatgctaaaaacctattgtgcattctgattacttagcagacataactacagaattgagtagacagctgcttgtgaggggagatgcctgcgtgtctcccagttggtataaacctgagtatgctgttacacaagtggagggaaaagcggcacggtctggagggaatatgtctagaagtgagttaaaatacagagagagagagtaaacca

SEQ ID NO: 307961 - DNA, 428 bp, Homo sapiens
tttattgaacatttattctgttcaaaacattcccaaaggcaacagaagatacaaataaatctctgcccatgaaaaggtgtggggggcattagaaggcgttctcttcggtgtaatgaagtaatgagagaagaaaaagtagtttgaagctatggagtaagggactttgagtatcccaggctcaaaaagttgggacttgaacagtacgggggtgctgctgaaaacgtttgagggaggtaatgacatgatcgaagctatacttgagaaaggtgaatctgataaagtatgagtgaaaaagagactgaaggtctagaaattagattgaggctgaggcaggagaatcgcttgaacctgggaggcagaggttgcagtgagccaagcctgcaccactgtactccaccctggatggcaaagtgagactctgtctcaaa

SEQ ID NO: 307962 - DNA, 4901 bp, Homo sapiens
acgagctgggccgggcggccgtgcgggagccatggcggcctcggaggcggcggcggcggcggggtccgcggctctggcggcgggtgcccgggccgtcccggcggccacgacaggagccgccgccgccgcctcgggcccgtgggtgcccccgggaccccgactgaggggcagccggccgcggcccgcgggggcgacgcagcagcccgctgtccccgcgccgccggcgggggagctgatccagccgtcggtgagcgagctgtcccgggccgtgcggaccaacatcctgtgcaccgtgcgcggctgcggcaagatcctgcccaacagccccgcgctcaacatgcacctagtcaagagccaccgcctgcaggatggcatagtcaatccaacaataagaaaagatttgaaaactggaccgaaattctactgctgtccaattgaaggctgccccagaggccctgagagaccgttttctcagttttctctcgtaaaacagtcccttctgcgttcctcctagcactttatgaaaatgcatgctgagaagaagcacaaatgtagtaagtgcagcaattcgtacggtacagaatgggacctgaaaagacatgcagaggactgtggcaagaccttccggtgcacatgcggctgtccctacgccagtagaacagcactgcagtctcacatctaccgaactgggcacgagatacctgcagaacacagggacccacctagtaagaaaaggaaaatggaaaactgtgcacaaaaccagaagttatccaacaagaccattgaatcattgaacaaccaaccaatccctagaccagacactcaagaactagaagcttcagaaataaagctagaaccatcttttgaagactcttgtggctctaacactgacaagcagactcttacaacaccaccgagatatcctcagaagttgcttttaccaaagcccaaagtggctttggttaaactacccgtgatgcagttttctgtcatgcctgtctttgtgcctacagccgactcctcagcccagcctgtggtgttaggtgttgatcagggctctgccacaggggctgtgcacttaatgcccttgtcagtaggaaccctgatcctcggcctagattcagaggcttgctctcttaaggagagcctacctcttttcaaaattgctaatcctattgctggtgagccaataagtactggtgttcaagtgaactttggtaaaagtccatctaatcctttacaagaactagggaacacgtgtcaaaagaatagcatttcttcaatcaacgtgcagacagatctgtcttatgcctcacaaaactttataccttctgcacagtgggccactgctgattcctctgtgtcgtcttgttctcaaactgatttgtcgtttgattctcaagtgtctcttcccattagtgttcacactcagacatttttgcccagctctaaggtaacttcatctatagctgctcagactgatgcatttatggacacctgtttccagtcaggtggggtctccagagaaactcaaaccagtgggatagaaagtccaacggatgaccatgtacagatggaccaagctggaatgtgcggagacatttttgagagtgttcattcatcatataatgttgctacaggtaacattataagcaacagtttagtagcagagacagtaactcatagtttgttacctcagaatgagcctaagactttaaatcaagatattgagaaatctgcaccaattataaatttcagtgcacagaatagtatgcttccttcacagaacatgacagataatcagacccaaaccatagatttattaagtgatttggaaaacatcttgtcaagtaatctgcctgcccagacattggatcatcgtagtcttttgtctgacacaaatcctggacctgacacccagctcccatctggcccagcccagaaccccggaatcgattttgatatcgaagagttcttttcggcctcaaatatccagactcaaactgaagagagtgaacttagcaccatgaccaccgagccagtcttggagtcactggacatagagactcaaacggacttcttactcgcagatacctctgctcagtcctatgggtgtaggggaaattctaacttcttaggccttgagatgtttgacacacagacacagacagacttaaactttttcttagacagtagccctcatctgcctctgggaagtattctgaaacactccagcttttccgtgagtactgattcatctgacacagagacccaaactgaaggagtctccactgctaaaaatatacctgctctagaaagcaaagttcagttgaacagtacagaaacacagaccatgagttctgggtttgaaaccctggggagcttgttcttcaccagcaacgaaactcagacagcaatggatgactttcttctggctgatctggcctggaacacgatggagtctcagttcagctctgtagaaacccagacttctgcggaaccacacacagtctccaacttctaaaactaacggtggagtccatgtgtgaaatggcatctaccatttcctctggattaaaactacggactggggacaacagtattaattcgattgaatgtggctgatgatgcagttgcttagcttctttgtgtttctttgccttttgtacttgtaaacagaaatttgcgtataaatgtgagtgtattataaagtttgagatgttgatctaaattgtttttgtgttgcctacatttgccttttcacagctagtcttttcatgttaaaaaaaaaatgtatttcatatctataaaacctatatagccatttagctgaagcccagcttaccaggttcaagggtacaaacttctcaaatcttcaaaacattttagtcaaagtgtaatatacttaaactgcacctaaaatatctttggcactgcttgttagaaattcctgattcctgttactaatcactaaagaaaccggatgctgccaccgtaggatttaagcagtagtgcttccatgctcttaagactcctgctgcctggaccttcgtcagctttgacacctcttttctgatttaaagacaccaaggaaaactacaactgtctttagctttgaagcagttttcatgtaatcattgccacctcttcgctacatgaactactattgataccagcatacaagtgtatagcactttacacacaagaggtttattgatgtaaaattatcggctagggaagcagcagcgggccaggtgtggtggcttacccctgtaatcccagcactttgggaggccaaagcaggacgatcacttgagcccaggagttcaacaccagcttgggcaacataagaagaccgtgtctctggaatttttttttttttttaattagccaggcacagtggcatgcgcctgtgatcccagctacttggaaggctgaggtgagaggatcactcgaggagattggggctgccatgagccatggtcttggcactgtactccaacctgggtaacagggcaagaccctatctcaaaaaaaaaaaaaaagtcgccagcaacaagcacgtagtgtagtgttcctgctaaatgagcataggttatccaaaccttgggaacagggagttatggaaacgtgcctatgacttcatcttggggtgtgtcctatgaagatcctttctggtctccacagtaggccagagttgggggctctggagctgtttccccaagtgcatccacaagctggatctgagttttgtcactctaaaattaaacaagaaaaaaagtgggaaaagggcatcccccattaggtttcaatactttgcacttctactaagcttgatagggcaggagtgcaatctacaattattttaaagtgaatttccttccattcaccattctttatcttttctttgaataagaaaaagtatctagcaaggatattacttgtgccttgaggctagcaattataggatagattcatctaaaatatggtattctgcattttggttttttttcttaagtgaataataccagtcttcaaagaaaacaaggtgaagacctattgcttcaataatcaagaatgctttgtgtgttttgaggtaggagcatgatcaagtatgctttggggattttctgtatttaggagatcctggattcttaattgttggctaagttccagtcaagtaggaatcagtgcagcctgtaagttctccacattgacacacacacacacacacacacacacacacacgacatgctcctttctgtggcacatgcctgtattactgaaagctaaatcctcaaaacctagtaaggggaccaatgattcattaaagtaaattgatggttttgctactaattcctatcccatacatttgacacaaaagaagtgttggtaatggataaataacatatcccgggcagatgagctcaacctagtaggtaagagtttggtttggtcacagttgcctatgagtgtgggtttcaaaagaaacataaagccttaacttagaatttcattatgttttagaatcatcactgccttaatattcaagcatctatttaagtcctaataaaggagaaatgcatgtttatggcttttttgtaaatataaatgcagtgatctatggcttaaaaaatttgtttctgtgacaatgtttgtaaatctagccaatagagtcatttacagaagaaaaatgagcatgtaataatacaagaactgtttccccctcaaaacctgaacctgaattatttgtaaaaactgaaatttaatgattaaagagaagccagaattgtacccttttttgtgaattcttgaacgtactcataaatatgacttattgtattgccttaagttttcactcattgtcttttgaaagccatatgataaaatgattttattta

SEQ ID NO: 307963 - DNA, 4597 bp, Homo sapiens
agcagtgacataattcaaaagcgcaagtcattgaaagcagttctgcgaatatgtagcttttgatgatcaggagtaaatttagagtacccagaatattgcatgttctgtctgcccatagtcaggcttctgataagaatttcacagcagaaaactctgaggttgtagtctctagtaggacagatgtgtcgccaatgaagagtgatctgctcttaccaccatctaaaccgggatgcaacaacgttctcaattgaagatcagggagccagtcaggaaatgtacctgaggatggcatagtcaatccaacaataagaaaagatttgaaaactggaccgaaattctactgctgtccaattgaaggctgccccagaggccctgagagaccgttttctcagttttctctcgtaaaacagggacccacctagtaagaaaaggaaaatggaaaactgtgcacaaaaccagaagttatccaacaagaccattgaatcattgaacaaccaaccaatccctagaccagacactcaagaactagaagcttcagaaataaagctagaaccatcttttgaagactcttgtggctctaacactgacaagcagactcttacaacaccaccgagatatcctcagaagttgcttttaccaaagcccaaagtggctttggttaaactacccgtgatgcagttttctgtcatgcctgtctttgtgcctacagccgactcctcagcccagcctgtggtgttaggtgttgatcagggctctgccacaggggctgtgcacttaatgcccttgtcagtaggaaccctgatcctcggcctagattcagaggcttgctctcttaaggagagcctacctcttttcaaaattgctaatcctattgctggtgagccaataagtactggtgttcaagtgaactttggtaaaagtccatctaatcctttacaagaactagggaacacgtgtcaaaagaatagcatttcttcaatcaacgtgcagacagatctgtcttatgcctcacaaaactttataccttctgcacagtgggccactgctgattcctctgtgtcgtcttgttctcaaactgatttgtcgtttgattctcaagtgtctcttcccattagtgttcacactcagacatttttgcccagctctaaggtaacttcatctatagctgctcagactgatgcatttatggacacctgtttccagtcaggtggggtctccagagaaactcaaaccagtgggatagaaagtccaacggatgaccatgtacagatggaccaagctggaatgtgcggagacatttttgagagtgttcattcatcatataatgttgctacaggtaacattataagcaacagtttagtagcagagacagtaactcatagtttgttacctcagaatgagcctaagactttaaatcaagatattgagaaatctgcaccaattataaatttcagtgcacagaatagtatgcttccttcacagaacatgacagataatcagacccaaaccatagatttattaagtgatttggaaaacatcttgtcaagtaatctgcctgcccagacattggatcatcgtagtcttttgtctgacacaaatcctggacctgacacccagctcccatctggcccagcccagaaccccggaatcgattttgatatcgaagagttcttttcggcctcaaatatccagactcaaactgaagagagtgaacttagcaccatgaccaccgagccagtcttggagtcactggacatagagactcaaacggacttcttactcgcagatacctctgctcagtcctatgggtgtaggggaaattctaacttcttaggccttgagatgtttgacacacagacacagacagacttaaactttttcttagacagtagccctcatctgcctctgggaagtattctgaaacactccagcttttccgtgagtactgattcatctgacacagagacccaaactgaaggagtctccactgctaaaaatatacctgctctagaaagcaaagttcagttgaacagtacagaaacacagaccatgagttctgggtttgaaaccctggggagcttgttcttcaccagcaacgaaactcagacagcaatggatgactttcttctggctgatctggcctggaacacgatggagtctcagttcagctctgtagaaacccagacttctgcggaaccacacacagtctccaacttctaaaactaacggtggagtccatgtgtgaaatggcatctaccatttcctctggattaaaactacggactggggacaacagtattaattcgattgaatgtggctgatgatgcagttgcttagcttctttgtgtttctttgccttttgtacttgtaaacagaaatttgcgtataaatgtgagtgtattataaagtttgagatgttgatctaaattgtttttgtgttgcctacatttgccttttcacagctagtcttttcatgttaaaaaaaaaatgtatttcatatctataaaacctatatagccatttagctgaagcccagcttaccaggttcaagggtacaaacttctcaaatcttcaaaacattttagtcaaagtgtaatatacttaaactgcacctaaaatatctttggcactgcttgttagaaattcctgattcctgttactaatcactaaagaaaccggatgctgccaccgtaggatttaagcagtagtgcttccatgctcttaagactcctgctgcctggaccttcgtcagctttgacacctcttttctgatttaaagacaccaaggaaaactacaactgtctttagctttgaagcagttttcatgtaatcattgccacctcttcgctacatgaactactattgataccagcatacaagtgtatagcactttacacacaagaggtttattgatgtaaaattatcggctagggaagcagcagcgggccaggtgtggtggcttacccctgtaatcccagcactttgggaggccaaagcaggacgatcacttgagcccaggagttcaacaccagcttgggcaacataagaagaccgtgtctctggaatttttttttttttttaattagccaggcacagtggcatgcgcctgtgatcccagctacttggaaggctgaggtgagaggatcactcgaggagattggggctgccatgagccatggtcttggcactgtactccaacctgggtaacagggcaagaccctatctcaaaaaaaaaaaaaaagtcgccagcaacaagcacgtagtgtagtgttcctgctaaatgagcataggttatccaaaccttgggaacagggagttatggaaacgtgcctatgacttcatcttggggtgtgtcctatgaagatcctttctggtctccacagtaggccagagttgggggctctggagctgtttccccaagtgcatccacaagctggatctgagttttgtcactctaaaattaaacaagaaaaaaagtgggaaaagggcatcccccattaggtttcaatactttgcacttctactaagcttgatagggcaggagtgcaatctacaattattttaaagtgaatttccttccattcaccattctttatcttttctttgaataagaaaaagtatctagcaaggatattacttgtgccttgaggctagcaattataggatagattcatctaaaatatggtattctgcattttggttttttttcttaagtgaataataccagtcttcaaagaaaacaaggtgaagacctattgcttcaataatcaagaatgctttgtgtgttttgaggtaggagcatgatcaagtatgctttggggattttctgtatttaggagatcctggattcttaattgttggctaagttccagtcaagtaggaatcagtgcagcctgtaagttctccacattgacacacacacacacacacacacacacacacacgacatgctcctttctgtggcacatgcctgtattactgaaagctaaatcctcaaaacctagtaaggggaccaatgattcattaaagtaaattgatggttttgctactaattcctatcccatacatttgacacaaaagaagtgttggtaatggataaataacatatcccgggcagatgagctcaacctagtaggtaagagtttggtttggtcacagttgcctatgagtgtgggtttcaaaagaaacataaagccttaacttagaatttcattatgttttagaatcatcactgccttaatattcaagcatctatttaagtcctaataaaggagaaatgcatgtttatggcttttttgtaaatataaatgcagtgatctatggcttaaaaaatttgtttctgtgacaatgtttgtaaatctagccaatagagtcatttacagaagaaaaatgagcatgtaataatacaagaactgtttccccctcaaaacctgaacctgaattatttgtaaaaactgaaatttaatgattaaagagaagccagaattgtacccttttttgtgaattcttgaacgtactcataaatatgacttattgtattgccttaagttttcactcattgtcttttgaaagccatatgataaaatgattttattta

SEQ ID NO: 307964 - DNA, 1723 bp, Homo sapiens
aagaggtttattgatgtaaagtgctatacacttgtatgctggtatcaatagtagttcatgtagcgaagaggtggcaatgattacatgaaaactgcttcaaagctaaagacagttgtatagcactttacacacaagaggtttattgatgtaaaattatcggctagggaagcagcagcgggccaggtgtggtggcttacccctgtaatcccagcactttgggaggccaaagcaggacgatcacttgagcccaggagttcaacaccagcttgggcaacataagaagaccgtgtctctggaatttttttttttttttaattagccaggcacagtggcatgcgcctgtgatcccagctacttggaaggctgaggtgagaggatcactcgaggagattggggctgccatgagccatggtcttggcactgtactccaacctgggtaacagggcaagaccctatctcaaaaaaaaaaaaaaagtcgccagcaacaagcacgtagtgtagtgttcctgctaaatgagcataggttatccaaaccttgggaacagggagttatggaaacgtgcctatgacttcatcttggggtgtgtcctatgaagatcctttctggtctccacagtaggccagagttgggggctctggagctgtttccccaagtgcatccacaagctggatctgagttttgtcactctaaaattaaacaagaaaaaaagtgggaaaagggcatcccccattaggtttcaatactttgcacttctactaagcttgatagggcaggagtgcaatctacaattattttaaagtgaatttccttccattcaccattctttatcttttctttgaataagaaaaagtatctagcaaggatattacttgtgccttgaggctagcaattataggatagattcatctaaaatatggtattctgcattttggttttttttcttaagtgaataataccagtcttcaaagaaaacaaggtgaagacctattgcttcaataatcaagaatgctttgtgtgttttgaggtaggagcatgatcaagtatgctttggggattttctgtatttaggagatcctggattcttaattgttggctaagttccagtcaagtaggaatcagtgcagcctgtaagttctccacattgacacacacacacacacacacacacacacacacgacatgctcctttctgtggcacatgcctgtattactgaaagctaaatcctcaaaacctagtaaggggaccaatgattcattaaagtaaattgatggttttgctactaattcctatcccatacatttgacacaaaagaagtgttggtaatggataaataacatatcccgggcagatgagctcaacctagtaggtaagagtttggtttggtcacagttgcctatgagtgtgggtttcaaaagaaacataaagccttaacttagaatttcattatgttttagaatcatcactgccttaatattcaagcatctatttaagtcctaataaaggagaaatgcatgtttatggcttttttgtaaatataaatgcagtgatctatggcttaaaaaatttgtttctgtgacaatgtttgtaaatctagccaatagagtcatttacagaagaaaaatgagcatgtaataatacaagaactgtttccccctcaaaacctgaacctgaattatttgtaaaaactgaaatttaatgattaaagagaagccagaattgta

SEQ ID NO: 307965 - DNA, 1716 bp, Homo sapiens
acgagctgggccgggcggccgtgcgggagccatggcggcctcggaggcggcggcggcggcggggtccgcggctctggcggcgggtgcccgggccgtcccggcggccacgacaggagccgccgccgccgcctcgggcccgtgggtgcccccgggaccccgactgaggggcagccggccgcggcccgcgggggcgacgcagcagcccgctgtccccgcgccgccggcgggggagctgatccagccgtcggtgagcgagctgtcccgggccgtgcggaccaacatcctgtgcaccgtgcgcggctgcggcaagatcctgcccaacagccccgcgctcaacatgcacctagtcaagagccaccgcctgcaggatggcatagtcaatccaacaataagaaaagatttgaaaactggaccgaaattctactgctgtccaattgaaggctgccccagaggccctgagagaccgttttctcagttttctctcgtaaaacagcactttatgaaaatgcatgctgagaagaagcacaaatgtagtaagtgcagcaattcgtacggtacagaatgggacctgaaaagacatgcagaggactgtggcaagaccttccggtgcacatgcggctgtccctacgccagtagaacagcactgcagtctcacatctaccgaactgggcacgagatacctgcagaacacagggacccacctagtaagaaaaggaaaatggaaaactgtgcacaaaaccagaagttatccaacaagaccattgaatcattgaacaaccaaccaatccctagaccagacactcaagaactagaagcttcagaaataaagctagaaccatcttttgaagactcttgtggctctaacactgacaagcagactcttacaacaccaccgagatatcctcagaagttgcttttaccaaagcccaaagtggctttggttaaactacccgtgatgcagttttctgtcatgcctgtctttgtgcctacagccgactcctcagcccagcctgtggtgttaggtgttgatcagggctctgccacaggggctgtgcacttaatgcccttgtcagtaggaaccctgatcctcggcctagattcagaggcttgctctcttaaggagagcctacctcttttcaaaattgctaatcctattgctggtgagccaataagtactggtgttcaagtgaactttggtaaaagtccatctaatcctttacaagaactagggaacacgtgtcaaaagaatagcatttcttcaatcaacgtgcagacagatctgtcttatgcctcacaaaactttataccttctgcacagtgggccactgctgattcctctgtgtcgtcttgttctcaaactgatttgtcgtttgattctcaagtgtctcttcccattagtgttcacactcagacatttttgcccagctctaaggtaacttcatctatagctgctcagactgatgcatttatggacacctgtttccagtcaggtgggagtctccaacttctaaaactaacggtggagtccatgtgtgaaatggcatctaccatttcctctggattaaaactacggactggggacaacagtattaattcgattgaatgtggctgatgatgcagttgcttagcttctttgtgtttctttgccttttgtacttgtaaacagaaatttgcgtataaatgtgagtgtattataaagtttgagatgttgatcta

SEQ ID NO: 307966 - DNA, 1391 bp, Homo sapiens
ggggcgggaaggggtggtttttctgttttacggggggcagagtcgggaaaaatggaaaaaaagaaaggggagaacagggggggcgggcaatttcggggaatttttttttaaaaaaaaaaaaaaaaaaaaaaaaaaaaaaaaagtcgccagcaacaagcacgtagtgtagtgttcctgctaaatgagcataggttatccaaaccttgggaacagggagttatggaaacgtgcctatgacttcatcttggggtgtgtcctatgaagatcctttctggtctccacagtaggccagagttgggggctctggagctgtttccccaagtgcatccacaagctggatctgagttttgtcactctaaaattaaacaagaaaaaaagtgggaaaagggcatcccccattaggtttcaatactttgcacttctactaagcttgatagggcaggagtgcaatctacaattattttaaagtgaatttccttccattcaccattctttatcttttctttgaataagaaaaagtatctagcaaggatattacttgtgccttgaggctagcaattataggatagattcatctaaaatatggtattctgcattttggttttttttcttaagtgaataataccagtcttcaaagaaaacaaggtgaagacctattgcttcaataatcaagaatgctttgtgtgttttgaggtaggagcatgatcaagtatgctttggggattttctgtatttaggagatcctggattcttaattgttggctaagttccagtcaagtaggaatcagtgcagcctgtaagttctccacattgacacacacacacacacacacacacacacacacgacatgctcctttctgtggcacatgcctgtattactgaaagctaaatcctcaaaacctagtaaggggaccaatgattcattaaagtaaattgatggttttgctactaattcctatcccatacatttgacacaaaagaagtgttggtaatggataaataacatatcccgggcagatgagctcaacctagtaggtaagagtttggtttggtcacagttgcctatgagtgtgggtttcaaaagaaacataaagccttaacttagaatttcattatgttttagaatcatcactgccttaatattcaagcatctatttaagtcctaataaaggagaaatgcatgtttatggcttttttgtaaatataaatgcagtgatctatggcttaaaaaatttgtttctgtgacaatgtttgtaaatctagccaatagagtcatttacagaagaaaaatgagcatgtaataatacaagaactgtttccccctcaaaacctgaacctgaattatttgtaaaaactgaaatttaatgattaaagagaagccagaattgta

SEQ ID NO: 307967 - DNA, 1095 bp, Homo sapiens
cagctaggaagaattcataacctagaactactcgtgagagaacatcagagaacctaatatgagaatcgttctctaaaaaaagtgggaaaagggcatcccccattaggtttcaatactttgcacttctactaagcttgatagggcaggagtgcaatctacaattattttaaagtgaatttccttccattcaccattctttatcttttctttgaataagaaaaagtatctagcaaggatattacttgtgccttgaggctagcaattataggatagattcatctaaaatatggtattctgcattttggttttttttcttaagtgaataataccagtcttcaaagaaaacaaggtgaagacctattgcttcaataatcaagaatgctttgtgtgttttgaggtaggagcatgatcaagtatgctttggggattttctgtatttaggagatcctggattcttaattgttggctaagttccagtcaagtaggaatcagtgcagcctgtaagttctccacattgacacacacacacacacacacacacacacacacgacatgctcctttctgtggcacatgcctgtattactgaaagctaaatcctcaaaacctagtaaggggaccaatgattcattaaagtaaattgatggttttgctactaattcctatcccatacatttgacacaaaagaagtgttggtaatggataaataacatatcccgggcagatgagctcaacctagtaggtaagagtttggtttggtcacagttgcctatgagtgtgggtttcaaaagaaacataaagccttaacttagaatttcattatgttttagaatcatcactgccttaatattcaagcatctatttaagtcctaataaaggagaaatgcatgtttatggcttttttgtaaatataaatgcagtgatctatggcttaaaaaatttgtttctgtgacaatgtttgtaaatctagccaatagagtcatttacagaagaaaaatgagcatgtaataatacaagaactgtttccccctcaaaacctgaacctgaattatttgtaaaaactgaaatttaatgattaaagagaagccagaattgta

SEQ ID NO: 307968 - DNA, 610 bp, Homo sapiens
taacctactgtttttactacctgtttcagacttcctgtctcccttatccctagcctttttccatgtgataactctcccttagctgagaagccggaggactccatttgttccttcatttacaggacatcaaggactccttacccaccccctttcctcaaggagttaacttgtgtaaactgattaatcatttgacacaaaagaagtgttggtaatggataaataacatatcccgggcagatgagctcaacctagtaggtaagagtttggtttggtcacagttgcctatgagtgtgggtttcaaaagaaacataaagccttaacttagaatttcattatgttttagaatcatcactgccttaatattcaagcatctatttaagtcctaataaaggagaaatgcatgtttatggcttttttgtaaatataaatgcagtgatctatggcttaaaaaatttgtttctgtgacaatgtttgtaaatctagccaatagagtcatttacagaagaaaaatgagcatgtaataatacaagaactgtttccccctcaaaacctgaacctgaattatttgtaaaaactgaaatttaatgattaaagagaagccagaattgta

SEQ ID NO: 307969 - DNA, 1192 bp, Homo sapiens
tttattgaacatttattctgttcaaaacattcccaaaggcaacagaagatacaaataaatctctgcccatgaaaaggtgtggggggcattagaaggcgttctcttcggtgtaatgaagtaatgagagaagaaaaagtagtttgaagctatggagtaagggactttgagtatcccaggctcaaaaagttgggacttgaacagtacgggggtgctgctgaaaacgtttgagggaggtaatgacatgatcgaagctatacttgagaaaggtgaatctgataaagtatgagtgaaaaagagactgaaggtctagaaattagattgaggctaatgacaaaatccacataaataggaggacttgaacgaaggggcacttagaagaggacaggagatagtaaaaggcattcaatgatgagagcacacactacaggggagcatgagggaggttggaaaagataatgaaaggattaccgagcttcactgacgatgtgtttgaaatgagcaggaatcttgtagtgatcctaatccgtggttttctggagcatttcacagcctaggaacatacaaggggggcatctccctggaatgtaaattgactaagaggaattcaataatggtcaaatgaatgcagaattttagagtcttgcttagtattctcaccacatttcgtttagtctactcatactctttttctcttactgctgacactagatggaaaaactcttaattaaaagtatttcacaaaatgtgctcgttttcagtcattccgtttccactccagcctgttgtgttgtttttttgaaataataatttaaagtaattttccttttgcaggatggcatagtcaatccaacaataagaaaagatttgaaaactggaccgaaattctactgctgtccaattgaaggctgccccagaggccctgagagaccgttttctcagttttctctcgtaaaacaggtactctctactctgaggatgagatacagatgctaaaaacctattgtgcattctgattacttagcagacataactacagaattgagtagacagctgcttgtgaggggagatgcctgcgtgtctcccagttggtataaacctgagtatgctgttacacaagtggagggaaaagcggcacggtctggagggaatatgtctagaagtgagttaaaatacagagagagagagtaaacca

SEQ ID NO: 307970 - DNA, 2708 bp, Homo sapiens
acgagctgggccgggcggccgtgcgggagccatggcggcctcggaggcggcggcggcggcggggtccgcggctctggcggcgggtgcccgggccgtcccggcggccacgacaggagccgccgccgccgcctcgggcccgtgggtgcccccgggaccccgactgaggggcagccggccgcggcccgcgggggcgacgcagcagcccgctgtccccgcgccgccggcgggggagctgatccagccgtcggtgagcgagctgtcccgggccgtgcggaccaacatcctgtgcaccgtgcgcggctgcggcaagatcctgcccaacagccccgcgctcaacatgcacctagtcaagagccaccgcctgcaggatggcatagtcaatccaacaataagaaaagatttgaaaactggaccgaaattctactgctgtccaattgaaggctgccccagaggccctgagagaccgttttctcagttttctctcgtaaaacagcactttatgaaaatgcatgctgagaagaagcacaaatgtagtaagtgcagcaattcgtacggtacagaatgggacctgaaaagacatgcagaggactgtggcaagaccttccggtgcacatgcggctgtccctacgccagtagaacagcactgcagtctcacatctaccgaactgggcacgagatacctgcagaacacagggacccacctagtaagaaaaggaaaatggaaaactgtgcacaaaaccagaagttatccaacaagaccattgaatcattgaacaaccaaccaatccctagaccagacactcaagaactagaagcttcagaaataaagctagaaccatcttttgaagactcttgtggctctaacactgacaagcagactcttacaacaccaccgagatatcctcagaagttgcttttaccaaagcccaaagtggctttggttaaactacccgtgatgcagttttctgtcatgcctgtctttgtgcctacagccgactcctcagcccagcctgtggtgttaggtgttgatcagggctctgccacaggggctgtgcacttaatgcccttgtcagtaggaaccctgatcctcggcctagattcagaggcttgctctcttaaggagagcctacctcttttcaaaattgctaatcctattgctggtgagccaataagtactggtgttcaagtgaactttggtaaaagtccatctaatcctttacaagaactagggaacacgtgtcaaaagaatagcatttcttcaatcaacgtgcagacagatctgtcttatgcctcacaaaactttataccttctgcacagtgggccactgctgattcctctgtgtcgtcttgttctcaaactgatttgtcgtttgattctcaagtgtctcttcccattagtgttcacactcagacatttttgcccagctctaaggtaacttcatctatagctgctcagactgatgcatttatggacacctgtttccagtcaggtggggtctccagagaaactcaaaccagtgggatagaaagtccaacggatgaccatgtacagatggaccaagctggaatgtgcggagacatttttgagagtgttcattcatcatataatgttgctacaggtaacattataagcaacagtttagtagcagagacagtaactcatagtttgttacctcagaatgagcctaagactttaaatcaagatattgagaaatctgcaccaattataaatttcagtgcacagaatagtatgcttccttcacagaacatgacagataatcagacccaaaccatagatttattaagtgatttggaaaacatcttgtcaagtaatctgcctgcccagacattggatcatcgtagtcttttgtctgacacaaatcctggacctgacacccagctcccatctggcccagcccagaaccccggaatcgattttgatatcgaagagttcttttcggcctcaaatatccagactcaaactgaagagagtgaacttagcaccatgaccaccgagccagtcttggagtcactggacatagagactcaaacggacttcttactcgcagatacctctgctcagtcctatgggtgtaggggaaattctaacttcttaggccttgagatgtttgacacacagacacagacagacttaaactttttcttagacagtagccctcatctgcctctgggaagtattctgaaacactccagcttttccgtgagtactgattcatctgacacagagacccaaactgaaggagtctccactgctaaaaatatacctgctctagaaagcaaagttcagttgaacagtacagaaacacagaccatgagttctgggtttgaaaccctggggagcttgttcttcaccagcaacgaaactcagacagcaatggatgactttcttctggctgatctggcctggaacacgatggagtctcagttcagctctgtagaaacccagacttctgcggaaccacacacagtctccaacttctaaaactaacggtggagtccatgtgtgaaatggcatctaccatttcctctggattaaaactacggactggggacaacagtattaattcgattgaatgtggctgatgatgcagttgcttagcttctttgtgtttctttgccttttgtacttgtaaacagaaatttgcgtataaatgtgagtgtattataaagtttgagatgttgatcta

SEQ ID NO: 307971 - DNA, 4880 bp, Homo sapiens
acgagctgggccgggcggccgtgcgggagccatggcggcctcggaggcggcggcggcggcggggtccgcggctctggcggcgggtgcccgggccgtcccggcggccacgacaggagccgccgccgccgcctcgggcccgtgggtgcccccgggaccccgactgaggggcagccggccgcggcccgcgggggcgacgcagcagcccgctgtccccgcgccgccggcgggggagctgatccagccgtcggtgagcgagctgtcccgggccgtgcggaccaacatcctgtgcaccgtgcgcggctgcggcaagatcctgcccaacagccccgcgctcaacatgcacctagtcaagagccaccgcctgcaggatggcatagtcaatccaacaataagaaaagatttgaaaactggaccgaaattctactgctgtccaattgaaggctgccccagaggccctgagagaccgttttctcagttttctctcgtaaaacagcactttatgaaaatgcatgctgagaagaagcacaaatgtagtaagtgcagcaattcgtacggtacagaatgggacctgaaaagacatgcagaggactgtggcaagaccttccggtgcacatgcggctgtccctacgccagtagaacagcactgcagtctcacatctaccgaactgggcacgagatacctgcagaacacagggacccacctagtaagaaaaggaaaatggaaaactgtgcacaaaaccagaagttatccaacaagaccattgaatcattgaacaaccaaccaatccctagaccagacactcaagaactagaagcttcagaaataaagctagaaccatcttttgaagactcttgtggctctaacactgacaagcagactcttacaacaccaccgagatatcctcagaagttgcttttaccaaagcccaaagtggctttggttaaactacccgtgatgcagttttctgtcatgcctgtctttgtgcctacagccgactcctcagcccagcctgtggtgttaggtgttgatcagggctctgccacaggggctgtgcacttaatgcccttgtcagtaggaaccctgatcctcggcctagattcagaggcttgctctcttaaggagagcctacctcttttcaaaattgctaatcctattgctggtgagccaataagtactggtgttcaagtgaactttggtaaaagtccatctaatcctttacaagaactagggaacacgtgtcaaaagaatagcatttcttcaatcaacgtgcagacagatctgtcttatgcctcacaaaactttataccttctgcacagtgggccactgctgattcctctgtgtcgtcttgttctcaaactgatttgtcgtttgattctcaagtgtctcttcccattagtgttcacactcagacatttttgcccagctctaaggtaacttcatctatagctgctcagactgatgcatttatggacacctgtttccagtcaggtggggtctccagagaaactcaaaccagtgggatagaaagtccaacggatgaccatgtacagatggaccaagctggaatgtgcggagacatttttgagagtgttcattcatcatataatgttgctacaggtaacattataagcaacagtttagtagcagagacagtaactcatagtttgttacctcagaatgagcctaagactttaaatcaagatattgagaaatctgcaccaattataaatttcagtgcacagaatagtatgcttccttcacagaacatgacagataatcagacccaaaccatagatttattaagtgatttggaaaacatcttgtcaagtaatctgcctgcccagacattggatcatcgtagtcttttgtctgacacaaatcctggacctgacacccagctcccatctggcccagcccagaaccccggaatcgattttgatatcgaagagttcttttcggcctcaaatatccagactcaaactgaagagagtgaacttagcaccatgaccaccgagccagtcttggagtcactggacatagagactcaaacggacttcttactcgcagatacctctgctcagtcctatgggtgtaggggaaattctaacttcttaggccttgagatgtttgacacacagacacagacagacttaaactttttcttagacagtagccctcatctgcctctgggaagtattctgaaacactccagcttttccgtgagtactgattcatctgacacagagacccaaactgaaggagtctccactgctaaaaatatacctgctctagaaagcaaagttcagttgaacagtacagaaacacagaccatgagttctgggtttgaaaccctggggagcttgttcttcaccagcaacgaaactcagacagcaatggatgactttcttctggctgatctggcctggaacacgatggagtctcagttcagctctgtagaaacccagacttctgcggaaccacacacagtctccaacttctaaaactaacggtggagtccatgtgtgaaatggcatctaccatttcctctggattaaaactacggactggggacaacagtattaattcgattgaatgtggctgatgatgcagttgcttagcttctttgtgtttctttgccttttgtacttgtaaacagaaatttgcgtataaatgtgagtgtattataaagtttgagatgttgatctaaattgtttttgtgttgcctacatttgccttttcacagctagtcttttcatgttaaaaaaaaaatgtatttcatatctataaaacctatatagccatttagctgaagcccagcttaccaggttcaagggtacaaacttctcaaatcttcaaaacattttagtcaaagtgtaatatacttaaactgcacctaaaatatctttggcactgcttgttagaaattcctgattcctgttactaatcactaaagaaaccggatgctgccaccgtaggatttaagcagtagtgcttccatgctcttaagactcctgctgcctggaccttcgtcagctttgacacctcttttctgatttaaagacaccaaggaaaactacaactgtctttagctttgaagcagttttcatgtaatcattgccacctcttcgctacatgaactactattgataccagcatacaagtgtatagcactttacacacaagaggtttattgatgtaaaattatcggctagggaagcagcagcgggccaggtgtggtggcttacccctgtaatcccagcactttgggaggccaaagcaggacgatcacttgagcccaggagttcaacaccagcttgggcaacataagaagaccgtgtctctggaatttttttttttttttaattagccaggcacagtggcatgcgcctgtgatcccagctacttggaaggctgaggtgagaggatcactcgaggagattggggctgccatgagccatggtcttggcactgtactccaacctgggtaacagggcaagaccctatctcaaaaaaaaaaaaaaagtcgccagcaacaagcacgtagtgtagtgttcctgctaaatgagcataggttatccaaaccttgggaacagggagttatggaaacgtgcctatgacttcatcttggggtgtgtcctatgaagatcctttctggtctccacagtaggccagagttgggggctctggagctgtttccccaagtgcatccacaagctggatctgagttttgtcactctaaaattaaacaagaaaaaaagtgggaaaagggcatcccccattaggtttcaatactttgcacttctactaagcttgatagggcaggagtgcaatctacaattattttaaagtgaatttccttccattcaccattctttatcttttctttgaataagaaaaagtatctagcaaggatattacttgtgccttgaggctagcaattataggatagattcatctaaaatatggtattctgcattttggttttttttcttaagtgaataataccagtcttcaaagaaaacaaggtgaagacctattgcttcaataatcaagaatgctttgtgtgttttgaggtaggagcatgatcaagtatgctttggggattttctgtatttaggagatcctggattcttaattgttggctaagttccagtcaagtaggaatcagtgcagcctgtaagttctccacattgacacacacacacacacacacacacacacacacgacatgctcctttctgtggcacatgcctgtattactgaaagctaaatcctcaaaacctagtaaggggaccaatgattcattaaagtaaattgatggttttgctactaattcctatcccatacatttgacacaaaagaagtgttggtaatggataaataacatatcccgggcagatgagctcaacctagtaggtaagagtttggtttggtcacagttgcctatgagtgtgggtttcaaaagaaacataaagccttaacttagaatttcattatgttttagaatcatcactgccttaatattcaagcatctatttaagtcctaataaaggagaaatgcatgtttatggcttttttgtaaatataaatgcagtgatctatggcttaaaaaatttgtttctgtgacaatgtttgtaaatctagccaatagagtcatttacagaagaaaaatgagcatgtaataatacaagaactgtttccccctcaaaacctgaacctgaattatttgtaaaaactgaaatttaatgattaaagagaagccagaattgtacccttttttgtgaattcttgaacgtactcataaatatgacttattgtattgccttaagttttcactcattgtcttttgaaagccatatgataaaatgattttattta

SEQ ID NO: 307972 - DNA, 4773 bp, Homo sapiens
acgagctgggccgggcggccgtgcgggagccatggcggcctcggaggcggcggcggcggcggggtccgcggctctggcggcgggtgcccgggccgtcccggcggccacgacaggagccgccgccgccgcctcgggcccgtgggtgcccccgggaccccgactgaggggcagccggccgcggcccgcgggggcgacgcagcagcccgctgtccccgcgccgccggcgggggagctgatccagccgtcggtgagcgagctgtcccgggccgtgcggaccaacatcctgtgcaccgtgcgcggctgcggcaagatcctgcccaacagccccgcgctcaacatgcacctagtcaagagccaccgcctgcaggatggcatagtcaatccaacaataagaaaagatttgaaaactggaccgaaattctactgctgtccaattgaaggctgccccagaggccctgagagaccgttttctcagttttctctcgtaaaacagcactttatgaaaatgcatgctgagaagaagcacaaatgtagtaagtgcagcaattcgtacggtacagaatgggacctgaaaagacatgcagaggactgtggcaagaccttccggtgcacatgcggctgtccctacgccagtagaacagcactgcagtctcacatctaccgaactgggcacgagatacctgcagaacacagggacccacctagtaagaaaaggaaaatggaaaactgtgcacaaaaccagaagttatccaacaagaccattgaatcattgaacaaccaaccaatccctagaccagacactcaagaactagaagcttcagaaataaagctagaaccatcttttgaagactcttgtggctctaacactgacaagcagactcttacaacaccaccgagatatcctcagaagttgcttttaccaaagcccaaagtggctttggttaaactacccgtgatgcagttttctgtcatgcctgtctttgtgcctacagccgactcctcagcccagcctgtggtgttaggtgttgatcagggctctgccacaggggctgtgcacttaatgcccttgtcagtaggaaccctgatcctcggcctagattcagaggcttgctctcttaaggagagcctacctcttttcaaaattgctaatcctattgctggtgagccaataagtactggtgttcaagtgaactttggtaaaagtccatctaatcctttacaagaactagggaacacgtgtcaaaagaatagcatttcttcaatcaacgtgcagacagatctgtcttatgcctcacaaaactttataccttctgcacagtgggccactgctgattcctctgtgtcgtcttgttctcaaactgatttgtcgtttgattctcaagtgtctcttcccattagtgttcacactcagacatttttgcccagctctaaggtaacttcatctatagctgctcagactgatgcatttatggacacctgtttccagtcaggtggggtctccagagaaactcaaaccagtgggatagaaagtccaacggatgaccatgtacagatggaccaagctggaatgtgcggagacatttttgagagtgttcattcatcatataatgttgctacaggtaacattataagcaacagtttagtagcagagacagtaactcatagtttgttacctcagaatgagcctaagactttaaatcaagatattgagaaatctgcaccaattataaatttcagtgcacagaatagtatgcttccttcacagaacatgacagataatcagacccaaaccatagatttattaagtgatttggaaaacatcttgtcaagtaatctgcctgcccagacattggatcatcgtagtcttttgtctgacacaaatcctggacctgacacccagctcccatctggcccagcccagaaccccggaatcgattttgatatcgaagagttcttttcggcctcaaatatccagactcaaactgaagagagtgaacttagcaccatgaccaccgagccagtcttggagtcactggacatagagactcaaacggacttcttactcgcagatacctctgctcagtcctatgggtgtaggggaaattctaacttcttaggccttgagatgtttgacacacagacacagacagacttaaactttttcttagacagtagccctcatctgcctctgggaagtattctgaaacactccagcttttccgtgagtactgattcatctgacacagagacccaaactgaaggagtctccactgctaaaaatatacctgctctagaaagcaaagttcagttgaacagtacagaaacacagaccatgagttctgggtttgaaaccctggggagcttgttcttcaccagcaacgaaactcagacagcaatggatgactttcttctggctgatctggcctggaacacgatggagtctcagttcagctctgtagaaacccagacttctgcggaaccacacacagtctccaacttctaaaactaacggtggagtccatgtgtgaaatggcatctaccatttcctctggattaaaactacggactggggacaacagtattaattcgattgaatgtggctgatgatgcagttgcttagcttctttgtgtttctttgccttttgtacttgtaaacagaaatttgcgtataaatgtgagtgtattataaagtttgagatgttgatctaaattgtttttgtgttgcctacatttgccttttcacagctagtcttttcatgttaaaaaaaaaatgtatttcatatctataaaacctatatagccatttagctgaagcccagcttaccaggttcaagggtacaaacttctcaaatcttcaaaacattttagtcaaagtgtaatatacttaaactgcacctaaaatatctttggcactgcttgttagaaattcctgattcctgttactaatcactaaagaaaccggatgctgccaccgtaggatttaagcagtagtgcttccatgctcttaagactcctgctgcctggaccttcgtcagctttgacacctcttttctgatttaaagacaccaaggaaaactacaactgtctttagctttgaagcagttttcatgtaatcattgccacctcttcgctacatgaactactattgataccagcatacaagtgtatagcactttacacacaagaggtttattgatgtaaaattatcggctagggaagcagcagcgggccaggtgtggtggcttacccctgtaatcccagcactttgggaggccaaagcaggacgatcacttgagcccaggagttcaacaccagcttgggcaacataagaagaccgtgtctctggaatttttttttttttttaattagccaggcacagtggcatgcgcctgtgatcccagctacttggaaggctgaggtgagaggatcactcgaggagattggggctgccatgagccatggtcttggcactgtactccaacctgggtaacagggcaagaccctatctcaaaaaaaaaaaaaaagtcgccagcaacaagcacgtagtgtagtgttcctgctaaatgagcataggttatccaaaccttgggaacagggagttatggaaacgtgcctatgacttcatcttggggtgtgtcctatgaagatcctttctggtctccacagtaggccagagttgggggctctggagctgtttccccaagtgcatccacaagctggatctgagttttgtcactctaaaattaaacaagaaaaaaagtgggaaaagggcatcccccattaggtttcaatactttgcacttctactaagcttgatagggcaggagtgcaatctacaattattttaaagtgaatttccttccattcaccattctttatcttttctttgaataagaaaaagtatctagcaaggatattacttgtgccttgaggctagcaattataggatagattcatctaaaatatggtattctgcattttggttttttttcttaagtgaataataccagtcttcaaagaaaacaaggtgaagacctattgcttcaataatcaagaatgctttgtgtgttttgaggtaggagcatgatcaagtatgctttggggattttctgtatttaggagatcctggattcttaattgttggctaagttccagtcaagtaggaatcagtgcagcctgtaagttctccacattgacacacacacacacacacacacacacacacacgacatgctcctttctgtggcacatgcctgtattactgaaagctaaatcctcaaaacctagtaaggggaccaatgattcattaaagtaaattgatggttttgctactaattcctatcccatacatttgacacaaaagaagtgttggtaatggataaataacatatcccgggcagatgagctcaacctagtaggtaagagtttggtttggtcacagttgcctatgagtgtgggtttcaaaagaaacataaagccttaacttagaatttcattatgttttagaatcatcactgccttaatattcaagcatctatttaagtcctaataaaggagaaatgcatgtttatggcttttttgtaaatataaatgcagtgatctatggcttaaaaaatttgtttctgtgacaatgtttgtaaatctagccaatagagtcatttacagaagaaaaatgagcatgtaataatacaagaactgtttccccctcaaaacctgaacctgaattatttgtaaaaactgaaatttaatgattaaagagaagccagaattgta

SEQ ID NO: 307973 - DNA, 5130 bp, Homo sapiens
acgagctgggccgggcggccgtgcgggagccatggcggcctcggaggcggcggcggcggcggggtccgcggctctggcggcgggtgcccgggccgtcccggcggccacgacaggagccgccgccgccgcctcgggcccgtgggtgcccccgggaccccgactgaggggcagccggccgcggcccgcgggggcgacgcagcagcccgctgtccccgcgccgccggcgggggagctgatccagccgtcggtgagcgagctgtcccgggccgtgcggaccaacatcctgtgcaccgtgcgcggctgcggcaagatcctgcccaacagccccgcgctcaacatgcacctagtcaagagccaccgcctgcaggatggcatagtcaatccaacaataagaaaagatttgaaaactggaccgaaattctactgctgtccaattgaaggctgccccagaggccctgagagaccgttttctcagttttctctcgtaaaacagcactttatgaaaatgcatgctgagaagaagcacaaatgtagtaagtgcagcaattcgtacggtacagaatgggacctgaaaagacatgcagaggactgtggcaagaccttccggtgcacatgcggctgtccctacgccagtagaacagcactgcagtctcacatctaccgaactgggcacgagatacctgcagaacacagggacccacctagtaagaaaaggaaaatggaaaactgtgcacaaaaccagaagttatccaacaagaccattgaatcattgaacaaccaaccaatccctagaccagacactcaagaactagaagcttcagaaataaagctagaaccatcttttgaagactcttgtggctctaacactgacaagcagactcttacaacaccaccgagatatcctcagaagttgcttttaccaaagcccaaagtggctttggttaaactacccgtgatgcagttttctgtcatgcctgtctttgtgcctacagccgactcctcagcccagcctgtggtgttaggtgttgatcagggctctgccacaggggctgtgcacttaatgcccttgtcagtaggaaccctgatcctcggcctagattcagaggcttgctctcttaaggagagcctacctcttttcaaaattgctaatcctattgctggtgagccaataagtactggtgttcaagtgaactttggtaaaagtccatctaatcctttacaagaactagggaacacgtgtcaaaagaatagcatttcttcaatcaacgtgcagacagatctgtcttatgcctcacaaaactttataccttctgcacagtgggccactgctgattcctctgtgtcgtcttgttctcaaactgatttgtcgtttgattctcaagtgtctcttcccattagtgttcacactcagacatttttgcccagctctaaggtaacttcatctatagctgctcagactgatgcatttatggacacctgtttccagtcaggtggggtctccagagaaactcaaaccagtgggatagaaagtccaacggatgaccatgtacagatggaccaagctggaatgtgcggagacatttttgagagtgttcattcatcatataatgttgctacaggtaacattataagcaacagtttagtagcagagacagtaactcatagtttgttacctcagaatgagcctaagactttaaatcaagatattgagaaatctgcaccaattataaatttcagtgcacagaatagtatgcttccttcacagaacatgacagataatcagacccaaaccatagatttattaagtgatttggaaaacatcttgtcaagtaatctgcctgcccagacattggatcatcgtagtcttttgtctgacacaaatcctggacctgacacccagctcccatctggcccagcccagaaccccggaatcgattttgatatcgaagagttcttttcggcctcaaatatccagactcaaactgaagagagtgaacttagcaccatgaccaccgagccagtcttggagtcactggacatagagactcaaacggacttcttactcgcagatacctctgctcagtcctatgggtgtaggggaaattctaacttcttaggccttgagatgtttgacacacagacacagacagacttaaactttttcttagacagtagccctcatctgcctctgggaagtattctgaaacactccagcttttccgtgagtactgattcatctgacacagagacccaaactgaaggagtctccactgctaaaaatatacctgctctagaaagcaaagttcagttgaacagtacagaaacacagaccatgagttctgggtttgaaaccctggggagcttgttcttcaccagcaacgaaactcagacagcaatggatgactttcttctggctgatctggcctggaacacgatggagtctcagttcagctctgtagaaacccagacttctgcggaaccacacacagtctccaacttctaaaactaacggtggagtccatgtgtgaaatggcatctaccatttcctctggattaaaactacggactggggacaacagtattaattcgattgaatgtggctgatgatgcagttgcttagcttctttgtgtttctttgccttttgtacttgtaaacagaaatttgcgtataaatgtgagtgtattataaagtttgagatgttgatctaaattgtttttgtgttgcctacatttgccttttcacagctagtcttttcatgttaaaaaaaaaatgtatttcatatctataaaacctatatagccatttagctgaagcccagcttaccaggttcaagggtacaaacttctcaaatcttcaaaacattttagtcaaagtgtaatatacttaaactgcacctaaaatatctttggcactgcttgttagaaattcctgattcctgttactaatcactaaagaaaccggatgctgccaccgtaggatttaagcagtagtgcttccatgctcttaagactcctgctgcctggaccttcgtcagctttgacacctcttttctgatttaaagacaccaaggaaaactacaactgtctttagctttgaagcagttttcatgtaatcattgccacctcttcgctacatgaactactattgataccagcatacaagtgtatagcactttacacacaagaggtttattgatgtaaaattatcggctagggaagcagcagcgggccaggtgtggtggcttacccctgtaatcccagcactttgggaggccaaagcaggacgatcacttgagcccaggagttcaacaccagcttgggcaacataagaagaccgtgtctctggaatttttttttttttttaattagccaggcacagtggcatgcgcctgtgatcccagctacttggaaggctgaggtgagaggatcactcgaggagattggggctgccatgagccatggtcttggcactgtactccaacctgggtaacagggcaagaccctatctcaaaaaaaaaaaaaaagtcgccagcaacaagcacgtagtgtagtgttcctgctaaatgagcataggttatccaaaccttgggaacagggagttatggaaacgtgcctatgacttcatcttggggtgtgtcctatgaagatcctttctggtctccacagtaggccagagttgggggctctggagctgtttccccaagtgcatccacaagctggatctgagttttgtcactctaaaattaaacaagaaaaaaagtgggaaaagggcatcccccattaggtttcaatactttgcacttctactaagcttgatagggcaggagtgcaatctacaattattttaaagtgaatttccttccattcaccattctttatcttttctttgaataagaaaaagtatctagcaaggatattacttgtgccttgaggctagcaattataggatagattcatctaaaatatggtattctgcattttggttttttttcttaagtgaataataccagtcttcaaagaaaacaaggtgaagacctattgcttcaataatcaagaatgctttgtgtgttttgaggtaggagcatgatcaagtatgctttggggattttctgtatttaggagatcctggattcttaattgttggctaagttccagtcaagtaggaatcagtgcagcctgtaagttctccacattgacacacacacacacacacacacacacacacacgacatgctcctttctgtggcacatgcctgtattactgaaagctaaatcctcaaaacctagtaaggggaccaatgattcattaaagtaaattgatggttttgctactaattcctatcccatacatttgacacaaaagaagtgttggtaatggataaataacatatcccgggcagatgagctcaacctagtaggtaagagtttggtttggtcacagttgcctatgagtgtgggtttcaaaagaaacataaagccttaacttagaatttcattatgttttagaatcatcactgccttaatattcaagcatctatttaagtcctaataaaggagaaatgcatgtttatggcttttttgtaaatataaatgcagtgatctatggcttaaaaaatttgtttctgtgacaatgtttgtaaatctagccaatagagtcatttacagaagaaaaatgagcatgtaataatacaagaactgtttccccctcaaaacctgaacctgaattatttgtaaaaactgaaatttaatgattaaagagaagccagaattgtaaaaaaaaaaacaaaaaaaaaaaaaaaaaaaaaaaaaaaaaatgttgtgggggggcctggggccctgtgggaaaagctcttcaaaacacactcggttgggggcggcgcggggcccacatatggtgtaacgtggaacacggggcctcaaacgcgtgttcccagaggaagaaccgcggcgcaatagaaccacaggaggctgtgggattctccagccacaaataagaaaaccccgcggggagaaacacccaaggcgcttcctgagaaaattcccaagagtggagcccccgaaggcgccacaccgggggacctcactcaccgggggagctcacaagcaggacccgcaattcaaaattaccca

SEQ ID NO: 307974 - DNA, 711 bp, Homo sapiens
  misc_feature (679)..(679): n is a, c, g, or t
  misc_feature (687)..(687): n is a, c, g, or t
cgactctagaggtcccccattcgcggattcaccaagaaggtagagataaagacactttttcaaaaatggcaatggtatcagaattcctcaagcaggcctggtttattgaaaatgaagagcaggaatatgttcaaactgtgaagtcatccaaaggtggtcccggatcagcggtgagcccctatcctaccttcaatccatcctcggatgtcgctgccttgcataaggccataatggttaaaggtgtggatgaagcaaccatcattgacattctaactaagcgaaacaatgcacagcgtcaacagatcaaagcagcatatctccaggaaacaggaaagcccctggatgaaacactgaagaaagcccttacaggtcaccttgaggaggttgttttagctctgctaaaaactccagcgcaatttgatgctgatgaacttcgtgctgccatgaagggccttggaactgatgaagatactctaattgagattttggcatcaagaactaacaaagaaatcagagacattaacagggtctacagagaggaactgaagagagatctggccaaagacataacctcagacacatctggagattttcggaacgctttgctttctcttgctaagggtgaccgatctgaggactttggtgtgaatgaagacttggctgattcagatgccaggcntgtatgangcagcagtgtcaaggcagtgttct

SEQ ID NO: 307975 - DNA, 464 bp, Homo sapiens
agcagatagtgaagtgtttacttttgtgtttcttgacaggccttgtatgaagcaggagaaaggagaaaggggacagacgtaaacgtgttcaataccatccttaccaccagaagctatccacaacttcgcagaggtaacaataaatttctttttctggaatctgtttatggaagatgcaattttcttttttgatgacaaataagagaaagtaaaaacagaaccctttttcaatatcactcctgtatcaaacagatacagtgttcctgacccattgttatttgtcaatttgtccaattttgtacagccgctactttatcatatttaatacattttgtgacttgggcatgtggaacataattttgttattttcactgcttttactcccctaaaagatttggaatatgtgtgggaaaagacatgcataacagaacaaatgaaattagaatgaagaaaaacaaaaaaaa

SEQ ID NO: 307976 - DNA, 447 bp, Homo sapiens
gtctagacggatcccatgcgcgcgcttccatcaagcatgaaaggtgttggaactcgccataaggcattgatcaggattatggtttcccgttctgaaattgacatgaatgatatcaaagcattctatcagaagatgtatggtatctccctttgccaagccatcctggatgaaaccaaaggagattatgagaaaatcctggtggctctttgtggaggaaactaaacattcccttgatggtctcaagcaagcgtcgcgcatgcgcgacgcttccatcaaactcatactcgtccttaccgggggccgtggccttctgtggctctgggttcttggccttgtgcttgaggcctttttcgaactcggagtccgtgttgttgccgtcgactgaactggaaggtgcgaaggatggtgcgtcttcctcttctgagctctccgtcgagctctcctcgc

SEQ ID NO: 307977 - DNA, 302 bp, Homo sapiens
ctctcgaggataccctctggatgcaagtgtcacagatcattcagcatatctccaggaaacaggaaagcccctggatgaaacactgaagaaagcccttacaggtcaccttgaggaggttgttttagctctgctaaaaactccagcgcaatttgatgctgatgaacttcgtgctgccatgaagggccttggaactgatgaagatactctaattgagattttggcatcaagaactaacaaagaaatcagagagacactttgcatccagaggacactttgcatccagaggggatcctctaggctcg

SEQ ID NO: 307978 - DNA, 1936 bp, Homo sapiens
agctgagccatgtacttcaaacagaaggcagccaattactaacttctggttgctaggtgtggcttcctttaaaatcctataaaatcagaagcccaagtctccactgccagtgtgaaatcttcagagaagaatttctctttagttctttgcaagaaggtagagataaagacactttttcaaaaatggcaatggtatcagaattcctcaagcaggcctggtttattgaaaatgaagagcaggaatatgttcaaactgtgaagtcatccaaaggtggtcccggatcagcggtgagcccctatcctaccttcaatccatcctcggatgtcgctgccttgcataaggccataatggttaaaggtgtggatgaagcaaccatcattgacattctaactaagcgaaacaatgcacagcgtcaacagatcaaagcagcatatctccaggaaacaggaaagcccctggatgaaacactgaagaaagcccttacaggtcaccttgaggaggttgttttagctctgctaaaaactccagcgcaatttgatgctgatgaacttcgtgctgccatgaagggccttggaactgatgaagatactctaattgagattttggcatcaagaactaacaaagaaatcagagacattaacagggtctacagagaggaactgaagagagatctggccaaagacataacctcagacacatctggagattttcggaacgctttgctttctcttgctaagggtgaccgatctgaggactttggtgtgaatgaagacttggctgattcagatgccagggccttgtatgaagcaggagaaaggagaaaggggacagacgtaaacgtgttcaataccatccttaccaccagaagctatccacaacttcgcagagtgtttcagaaatacaccaagtacagtaagcatgacatgaacaaagttctggacctggagttgaaaggtgacattgagaaatgcctcacagctatcgtgaagtgcgccacaagcaaaccagctttctttgcagagaagcttcatcaagccatgaaaggtgttggaactcgccataaggcattgatcaggattatggtttcccgttctgaaattgacatgaatgatatcaaagcattctatcagaagatgtatggtatctccctttgccaagccatcctggatgaaaccaaaggagattatgagaaaatcctggtggctctttgtggaggaaactaaacattcccttgatggtctcaagctatgatcagaagactttaattatatattttcatcctataagcttaaataggaaagtttcttcaacaggattacagtgtagctacctacatgctgaaaaatatagcctttaaatcatttttatattataactctgtataatagagataagtccattttttaaaaatgttttccccaaaccataaaaccctatacaagttgttctagtaacaatacatgagaaagatgtctatgtagctgaaaataaaatgacgtcacaagacaaaacaccacacaacacaacgaaacacagaaaacaaaacaaaagaaaggacgaaagaaaaacaaaacaacccacagaggagacaaggaaagaaaaccaccagaacagaagcagacgagacaacaaagaagaggaaaaaagagaaaagaccggacgagaacacccgagcagatgacaaagactcaagagacaaagagagaaaaacaactaatgcaggggaaggagaaaggagaaaacaaaagagataaacgaacacagaaaaacaacaacggccgcagagaaaaagaacatacaagaaagaaactaagaaagagaagaatagacaagaaagacaagaaaacagaaagaaagaaacaaaatcgagacaacgaaaacacgaagaagcccgaaagaagaacaagaagcaagcgacagacaagccaagcagagc

SEQ ID NO: 307979 - DNA, 1804 bp, Homo sapiens
  misc_feature (1561)..(1561): n is a, c, g, or t
  misc_feature (1602)..(1602): n is a, c, g, or t
  misc_feature (1605)..(1605): n is a, c, g, or t
  misc_feature (1613)..(1613): n is a, c, g, or t
  misc_feature (1615)..(1615): n is a, c, g, or t
  misc_feature (1621)..(1621): n is a, c, g, or t
agctgagccatgtacttcaaacagaaggcagccaattactaacttctggttgctaggtgtggcttcctttaaaatcctataaaatcagaagcccaagtctccactgccagtgtgaaatcttcagagaagaatttctctttagttctttgcaagaaggtagagataaagacactttttcaaaaatggcaatggtatcagaattcctcaagcaggcctggtttattgaaaatgaagagcaggaatatgttcaaactgtgaagtcatccaaaggtggtcccggatcagcggtgagcccctatcctaccttcaatccatcctcggatgtcgctgccttgcataaggccataatggttaaaggtgtggatgaagcaaccatcattgacattctaactaagcgaaacaatgcacagcgtcaacagatcaaagcagcatatctccaggaaacaggaaagcccctggatgaaacactgaagaaagcccttacaggtcaccttgaggaggttgttttagctctgctaaaaactccagcgcaatttgatgctgatgaacttcgtgctgccatgaagggccttggaactgatgaagatactctaattgagattttggcatcaagaactaacaaagaaatcagagacattaacagggtctacagagaggaactgaagagagatctggccaaagacataacctcagacacatctggagattttcggaacgctttgctttctcttgctaagggtgaccgatctgaggactttggtgtgaatgaagacttggctgattcagatgccagggccttgtatgaagcaggagaaaggagaaaggggacagacgtaaacgtgttcaataccatccttaccaccagaagctatccacaacttcgcagagtgtttcagaaatacaccaagtacagtaagcatgacatgaacaaagttctggacctggagttgaaaggtgacattgagaaatgcctcacagctatcgtgaagtgcgccacaagcaaaccagctttctttgcagagaagcttcatcaagccatgaaaggtgttggaactcgccataaggcattgatcaggattatggtttcccgttctgaaattgacatgaatgatatcaaagcattctatcagaagatgtatggtatctccctttgccaagccatcctggatgaaaccaaaggagattatgagaaaatcctggtggctctttgtggaggaaactaaacattcccttgatggtctcaagctatgatcagaagactttaattatatattttcatcctataagcttaaataggaaagtttcttcaacaggattacagtgtagctacctacatgctgaaaaatatagcctttaaatcatttttatattataactctgtataatagagataagtccattttttaaaaatgttttccccaaaccataaaaccctatacaagttgttctagtaacaatacatgagaaagatgtctatgtagctgaaaataaaatgacgtcacaagacaaaaaaaaaaaaaaaaaaaaaaactttgttgggcgccctgggcccctgaaaaanttttttaaaccccttccgttgtggggccgcgcgggcccccngtngggttacngnggaacncgttggcacaaggaggggtcccaagagggagacccgcggcaggagcaaagggcggagttctccaccaaataaaaaaaggcgcggggggaacacgcggcgtttctgaacaacacccgaagaggggagtcacgaggcacacacgcggctctatcaacgggagcccacgggtcacggaaatatgca

SEQ ID NO: 307980 - DNA, 2056 bp, Homo sapiens
agctgagccatgtacttcaaacagaaggcagccaattactaacttctggttgctaggtgtggcttcctttaaaatcctataaaatcagaagcccaagtctccactgccagtgtgaaatcttcagagaagaatttctctttagttctttgcaagaaggtagagataaagacactttttcaaaaatggcaatggtatcagaattcctcaagcaggcctggtttattgaaaatgaagagcaggaatatgttcaaactgtgaagtcatccaaaggtggtcccggatcagcggtgagcccctatcctaccttcaatccatcctcggatgtcgctgccttgcataaggccataatggttaaaggtgtggatgaagcaaccatcattgacattctaactaagcgaaacaatgcacagcgtcaacagatcaaagcagcatatctccaggaaacaggaaagcccctggatgaaacactgaagaaagcccttacaggtcaccttgaggaggttgttttagctctgctaaaaactccagcgcaatttgatgctgatgaacttcgtgctgccatgaagggccttggaactgatgaagatactctaattgagattttggcatcaagaactaacaaagaaatcagagacattaacagggtctacagagaggaactgaagagagatctggccaaagacataacctcagacacatctggagattttcggaacgctttgctttctcttgctaagggtgaccgatctgaggactttggtgtgaatgaagacttggctgattcagatgccagggccttgtatgaagcaggagaaaggagaaaggggacagacgtaaacgtgttcaataccatccttaccaccagaagctatccacaacttcgcagagtgtttcagaaatacaccaagtacagtaagcatgacatgaacaaagttctggacctggagttgaaaggtgacattgagaaatgcctcacagctatcgtgaagtgcgccacaagcaaaccagctttctttgcagagaagcttcatcaagccatgaaaggtgttggaactcgccataaggcattgatcaggattatggtttcccgttctgaaattgacatgaatgatatcaaagcattctatcagaagatgtatggtatctccctttgccaagccatcctggatgaaaccaaaggagattatgagaaaatcctggtggctctttgtggaggaaactaaacattcccttgatggtctcaagctatgatcagaagactttaattatatattttcatcctataagcttaaataggaaagtttcttcaacaggattacagtgtagctacctacatgctgaaaaatatagcctttaaatcatttttatattataactctgtataatagagataagtccattttttaaaaatgttttccccaaaccataaaaccctatacaagttgttctagtaacaatacatgagaaagatgtctatgtagctgaaaataaaatgacgtcacaagacaaaaaacacaacacagcaccaaccagcacacgacacacatacgcaccacacagacgaggggggcgcatcaacgacccccacgagaggcccacacactccagcgacaacaagctctctaaaacgagagccccacatgagacaccacataaaccacaaccggcgacaccttaaacaacgcgacgatgcgggaaacacacgtacgccgcgacacccggagcagaagacccacaccccgggcgcggcgccacacatgggcgcaccccccccgcaagcattacgcgcccaggggcctataacacccacagggtgctatcgtgtggcccacccccatgctagtgcgcgacacaaataccgcagctaatgcttaaaatcccgcccaccgctaggcaacgcaaccaccgcagcacagtgcgcatcgtgagccgcgaagcgtcgctagagcccggtcaggcagtgactagcaatgcctcgcttcgccatgcatcgatcgcacagtataattacatcatcagacgtgcagccagcgatcgaggtcgataatgatcagtt

SEQ ID NO: 307981 - DNA, 2133 bp, Homo sapiens
agctgagccatgtacttcaaacagaaggcagccaattactaacttctggttgctaggtgtggcttcctttaaaatcctataaaatcagaagcccaagtctccactgccagtgtgaaatcttcagagaagaatttctctttagttctttgcaagaaggtagagataaagacactttttcaaaaatggcaatggtatcagaattcctcaagcaggcctggtttattgaaaatgaagagcaggaatatgttcaaactgtgaagtcatccaaaggtggtcccggatcagcggtgagcccctatcctaccttcaatccatcctcggatgtcgctgccttgcataaggccataatggttaaaggtgtggatgaagcaaccatcattgacattctaactaagcgaaacaatgcacagcgtcaacagatcaaagcagcatatctccaggaaacaggaaagcccctggatgaaacactgaagaaagcccttacaggtcaccttgaggaggttgttttagctctgctaaaaactccagcgcaatttgatgctgatgaacttcgtgctgccatgaagggccttggaactgatgaagatactctaattgagattttggcatcaagaactaacaaagaaatcagagacattaacagggtctacagagaggaactgaagagagatctggccaaagacataacctcagacacatctggagattttcggaacgctttgctttctcttgctaagggtgaccgatctgaggactttggtgtgaatgaagacttggctgattcagatgccagggccttgtatgaagcaggagaaaggagaaaggggacagacgtaaacgtgttcaataccatccttaccaccagaagctatccacaacttcgcagagtgtttcagaaatacaccaagtacagtaagcatgacatgaacaaagttctggacctggagttgaaaggtgacattgagaaatgcctcacagctatcgtgaagtgcgccacaagcaaaccagctttctttgcagagaagcttcatcaagccatgaaaggtgttggaactcgccataaggcattgatcaggattatggtttcccgttctgaaattgacatgaatgatatcaaagcattctatcagaagatgtatggtatctccctttgccaagccatcctggatgaaaccaaaggagattatgagaaaatcctggtggctctttgtggaggaaactaaacattcccttgatggtctcaagctatgatcagaagactttaattatatattttcatcctataagcttaaataggaaagtttcttcaacaggattacagtgtagctacctacatgctgaaaaatatagcctttaaatcatttttatattataactctgtataatagagataagtccattttttaaaaatgttttccccaaaccataaaaccctatacaagttgttctagtaacaatacatgagaaagatgtctatgtagctgaaaataaaatgacgtcacaagacaaaaaaaaaaaaaaaaaaaaaaaaaaaaaaaaaaaaaaaaaaaaaaaaaaaaaaaaaaaaaaaaaaaaaaaaaaaaaaaaaaaacaaaaaaaaaaaaaaaaagagaagggggggggcgggcgagatttctttctcgccgggggggcggctacaatgagcgccaaccagaacgtctatgatgagaaaaaggggcagcaccaataatagagagaaaataaatatagacaagcgaagcagggacagcaaaaaaaaaacagagagaagagaggaaacaacagccaccagagagagacatatgaaggagaaaagaaacaccacatatatcaggaggggggggcgcacacaataatcaggacggaggggaaaaaaacacacgagtagaaggagagataaatatataaagtaacatgcgaatggggagtaaagaaataaataataataatagattaatgagaagataagaggatatattattaagaggtggattacacacacaaaacaacggaacgttgtagtaacattgtaggttgtggagcaatctagaagaaagaaactatgttgcgcagcgcacatgagaaggagaatgaatttaattaaataaagagaaattttttataatagcgggg

SEQ ID NO: 307982 - DNA, 2169 bp, Homo sapiens
agctgagccatgtacttcaaacagaaggcagccaattactaacttctggttgctaggtgtggcttcctttaaaatcctataaaatcagaagcccaagtctccactgccagtgtgaaatcttcagagaagaatttctctttagttctttgcaagaaggtagagataaagacactttttcaaaaatggcaatggtatcagaattcctcaagcaggcctggtttattgaaaatgaagagcaggaatatgttcaaactgtgaagtcatccaaaggtggtcccggatcagcggtgagcccctatcctaccttcaatccatcctcggatgtcgctgccttgcataaggccataatggttaaaggtgtggatgaagcaaccatcattgacattctaactaagcgaaacaatgcacagcgtcaacagatcaaagcagcatatctccaggaaacaggaaagcccctggatgaaacactgaagaaagcccttacaggtcaccttgaggaggttgttttagctctgctaaaaactccagcgcaatttgatgctgatgaacttcgtgctgccatgaagggccttggaactgatgaagatactctaattgagattttggcatcaagaactaacaaagaaatcagagacattaacagggtctacagagaggaactgaagagagatctggccaaagacataacctcagacacatctggagattttcggaacgctttgctttctcttgctaagggtgaccgatctgaggactttggtgtgaatgaagacttggctgattcagatgccagggccttgtatgaagcaggagaaaggagaaaggggacagacgtaaacgtgttcaataccatccttaccaccagaagctatccacaacttcgcagagtgtttcagaaatacaccaagtacagtaagcatgacatgaacaaagttctggacctggagttgaaaggtgacattgagaaatgcctcacagctatcgtgaagtgcgccacaagcaaaccagctttctttgcagagaagcttcatcaagccatgaaaggtgttggaactcgccataaggcattgatcaggattatggtttcccgttctgaaattgacatgaatgatatcaaagcattctatcagaagatgtatggtatctccctttgccaagccatcctggatgaaaccaaaggagattatgagaaaatcctggtggctctttgtggaggaaactaaacattcccttgatggtctcaagctatgatcagaagactttaattatatattttcatcctataagcttaaataggaaagtttcttcaacaggattacagtgtagctacctacatgctgaaaaatatagcctttaaatcatttttatattataactctgtataatagagataagtccattttttaaaaatgttttccccaaaccataaaaccctatacaagttgttctagtaacaatacatgagaaagatgtctatgtagctgaaaataaaatgacgtcacaagacaaaaaaaaaaaaaaaaaaaaaaaaaaaacaaaacaacaaaaaaaaaaaaaaaacaaaaaaaaaaaaaaaaaaaaaaaaaaaaaaaaaaaaaaaaaaaaaaaaaaaaaaaaaaaaaaaaaacaaaaaaaaaaaaaaaaagagaagggggggggcgggcgagatttctttctcgccgggggggcggctacaatgagcgccaaccagaacgtctatgatgagaaaaaggggcagcaccaataatagagagaaaataaatatagacaagcgaagcagggacagcaaaaaaaaaacagagagaagagaggaaacaacagccaccagagagagacatatgaaggagaaaagaaacaccacatatatcaggaggggggggcgcacacaataatcaggacggaggggaaaaaaacacacgagtagaaggagagataaatatataaagtaacatgcgaatggggagtaaagaaataaataataataatagattaatgagaagataagaggatatattattaagaggtggattacacacacaaaacaacggaacgttgtagtaacattgtaggttgtggagcaatctagaagaaagaaactatgttgcgcagcgcacatgagaaggagaatgaatttaattaaataaagagaaattttttataatagcgggg

SEQ ID NO: 307983 - DNA, 1562 bp, Homo sapiens
agctgagccatgtacttcaaacagaaggcagccaattactaacttctggttgctaggtgtggcttcctttaaaatcctataaaatcagaagcccaagtctccactgccagtgtgaaatcttcagagaagaatttctctttagttctttgcaagaaggtagagataaagacactttttcaaaaatggcaatggtatcagaattcctcaagcaggcctggtttattgaaaatgaagagcaggaatatgttcaaactgtgaagtcatccaaaggtggtcccggatcagcggtgagcccctatcctaccttcaatccatcctcggatgtcgctgccttgcataaggccataatggttaaaggtgtggatgaagcaaccatcattgacattctaactaagcgaaacaatgcacagcgtcaacagatcaaagcagcatatctccaggaaacaggaaagcccctggatgaaacactgaagaaagcccttacaggtcaccttgaggaggttgttttagctctgctaaaaactccagcgcaatttgatgctgatgaacttcgtgctgccatgaagggccttggaactgatgaagatactctaattgagattttggcatcaagaactaacaaagaaatcagagacattaacagggtctacagagaggaactgaagagagatctggccaaagacataacctcagacacatctggagattttcggaacgctttgctttctcttgctaagggtgaccgatctgaggactttggtgtgaatgaagacttggctgattcagatgccagggccttgtatgaagcaggagaaaggagaaaggggacagacgtaaacgtgttcaataccatccttaccaccagaagctatccacaacttcgcagagtgtttcagaaatacaccaagtacagtaagcatgacatgaacaaagttctggacctggagttgaaaggtgacattgagaaatgcctcacagctatcgtgaagtgcgccacaagcaaaccagctttctttgcagagaagcttcatcaagccatgaaaggtgttggaactcgccataaggcattgatcaggattatggtttcccgttctgaaattgacatgaatgatatcaaagcattctatcagaagatgtatggtatctccctttgccaagccatcctggatgaaaccaaaggagattatgagaaaatcctggtggctctttgtggaggaaactaaacattcccttgatggtctcaagctatgatcagaagactttaattatatattttcatcctataagcttaaataggaaagtttcttcaacaggattacagtgtagctacctacatgctgaaaaatatagcctttaaatcatttttatattataactctgtataatagagataagtccattttttaaaaatgttttccccaaaccataaaaccctatacaagttgttctagtaacaatacatgagaaagatgtctatgtagctgaaaataaaatgacgtcacaagacaaaaaaaaagtcgacgcgaccgcgaatttagtagtagtaggcggccgactctaga

SEQ ID NO: 307984 - DNA, 2112 bp, Homo sapiens
agctgagccatgtacttcaaacagaaggcagccaattactaacttctggttgctaggtgtggcttcctttaaaatcctataaaatcagaagcccaagtctccactgccagtgtgaaatcttcagagaagaatttctctttagttctttgcaagaaggtagagataaagacactttttcaaaaatggcaatggtatcagaattcctcaagcaggcctggtttattgaaaatgaagagcaggaatatgttcaaactgtgaagtcatccaaaggtggtcccggatcagcggtgagcccctatcctaccttcaatccatcctcggatgtcgctgccttgcataaggccataatggttaaaggtgtggatgaagcaaccatcattgacattctaactaagcgaaacaatgcacagcgtcaacagatcaaagcagcatatctccaggaaacaggaaagcccctggatgaaacactgaagaaagcccttacaggtcaccttgaggaggttgttttagctctgctaaaaactccagcgcaatttgatgctgatgaacttcgtgctgccatgaagggccttggaactgatgaagatactctaattgagattttggcatcaagaactaacaaagaaatcagagacattaacagggtctacagagaggaactgaagagagatctggccaaagacataacctcagacacatctggagattttcggaacgctttgctttctcttgctaagggtgaccgatctgaggactttggtgtgaatgaagacttggctgattcagatgccagggccttgtatgaagcaggagaaaggagaaaggggacagacgtaaacgtgttcaataccatccttaccaccagaagctatccacaacttcgcagagtgtttcagaaatacaccaagtacagtaagcatgacatgaacaaagttctggacctggagttgaaaggtgacattgagaaatgcctcacagctatcgtgaagtgcgccacaagcaaaccagctttctttgcagagaagcttcatcaagccatgaaaggtgttggaactcgccataaggcattgatcaggattatggtttcccgttctgaaattgacatgaatgatatcaaagcattctatcagaagatgtatggtatctccctttgccaagccatcctggatgaaaccaaaggagattatgagaaaatcctggtggctctttgtggaggaaactaaacattcccttgatggtctcaagctatgatcagaagactttaattatatattttcatcctataagcttaaataggaaagtttcttcaacaggattacagtgtagctacctacatgctgaaaaatatagcctttaaatcatttttatattataactctgtataatagagataagtccattttttaaaaatgttttccccaaaccataaaaccctatacaagttgttctagtaacaatacatgagaaagatgtctatgtagctgaaaataaaatgacgtcacaagacaaaaaaaaaaaaaaaaaaaaaaaaaaaaaaaaaaaaaaaaaaaaaaaaaaaaaaaaaaaaaaacaaaaaaaaaaaaaaaaagagaagggggggggcgggcgagatttctttctcgccgggggggcggctacaatgagcgccaaccagaacgtctatgatgagaaaaaggggcagcaccaataatagagagaaaataaatatagacaagcgaagcagggacagcaaaaaaaaaacagagagaagagaggaaacaacagccaccagagagagacatatgaaggagaaaagaaacaccacatatatcaggaggggggggcgcacacaataatcaggacggaggggaaaaaaacacacgagtagaaggagagataaatatataaagtaacatgcgaatggggagtaaagaaataaataataataatagattaatgagaagataagaggatatattattaagaggtggattacacacacaaaacaacggaacgttgtagtaacattgtaggttgtggagcaatctagaagaaagaaactatgttgcgcagcgcacatgagaaggagaatgaatttaattaaataaagagaaattttttataatagcgggg

SEQ ID NO: 307985 - DNA, 1833 bp, Homo sapiens
agctgagccatgtacttcaaacagaaggcagccaattactaacttctggttgctaggtgtggcttcctttaaaatcctataaaatcagaagcccaagtctccactgccagtgtgaaatcttcagagaagaatttctctttagttctttgcaagaaggtagagataaagacactttttcaaaaatggcaatggtatcagaattcctcaagcaggcctggtttattgaaaatgaagagcaggaatatgttcaaactgtgaagtcatccaaaggtggtcccggatcagcggtgagcccctatcctaccttcaatccatcctcggatgtcgctgccttgcataaggccataatggttaaaggtgtggatgaagcaaccatcattgacattctaactaagcgaaacaatgcacagcgtcaacagatcaaagcagcatatctccaggaaacaggaaagcccctggatgaaacactgaagaaagcccttacaggtcaccttgaggaggttgttttagctctgctaaaaactccagcgcaatttgatgctgatgaacttcgtgctgccatgaagggccttggaactgatgaagatactctaattgagattttggcatcaagaactaacaaagaaatcagagacattaacagggtctacagagaggaactgaagagagatctggccaaagacataacctcagacacatctggagattttcggaacgctttgctttctcttgctaagggtgaccgatctgaggactttggtgtgaatgaagacttggctgattcagatgccagggccttgtatgaagcaggagaaaggagaaaggggacagacgtaaacgtgttcaataccatccttaccaccagaagctatccacaacttcgcagagtgtttcagaaatacaccaagtacagtaagcatgacatgaacaaagttctggacctggagttgaaaggtgacattgagaaatgcctcacagctatcgtgaagtgcgccacaagcaaaccagctttctttgcagagaagcttcatcaagccatgaaaggtgttggaactcgccataaggcattgatcaggattatggtttcccgttctgaaattgacatgaatgatatcaaagcattctatcagaagatgtatggtatctccctttgccaagccatcctggatgaaaccaaaggagattatgagaaaatcctggtggctctttgtggaggaaactaaacattcccttgatggtctcaagctatgatcagaagactttaattatatattttcatcctataagcttaaataggaaagtttcttcaacaggattacagtgtagctacctacatgctgaaaaatatagcctttaaatcatttttatattataactctgtataatagagataagtccattttttaaaaatgttttccccaaaccataaaaccctatacaagttgttctagtaacaatacatgagaaagatgtctatgtagctgaaaataaaatgacgtcacaagacaaaaaagaacgacaacaaagcgacaaagaagcacatacaaacaccgcaccaagcgcaacaaacacaacaaacgaacacaaacaaccagacaagaaaaaagagccggcgacccaagcaataccccgcgggacagcaacaacagagaaccacacacttgcagagaaaggccccacgacagcagtcaacaacacaccgcggccgactacacaacagtagcagcaagacgccggtcacacaaggggacaccagggggtggcagaaacgagccaacaaacgcgaaggacgagcaaacaaatgcgaccaccaactgcgagaatgcagaacat

SEQ ID NO: 307986 - DNA, 1547 bp, Homo sapiens
agctgagccatgtacttcaaacagaaggcagccaattactaacttctggttgctaggtgtggcttcctttaaaatcctataaaatcagaagcccaagtctccactgccagtgtgaaatcttcagagaagaatttctctttagttctttgcaagaaggtagagataaagacactttttcaaaaatggcaatggtatcagaattcctcaagcaggcctggtttattgaaaatgaagagcaggaatatgttcaaactgtgaagtcatccaaaggtggtcccggatcagcggtgagcccctatcctaccttcaatccatcctcggatgtcgctgccttgcataaggccataatggttaaaggtgtggatgaagcaaccatcattgacattctaactaagcgaaacaatgcacagcgtcaacagatcaaagcagcatatctccaggaaacaggaaagcccctggatgaaacactgaagaaagcccttacaggtcaccttgaggaggttgttttagctctgctaaaaactccagcgcaatttgatgctgatgaacttcgtgctgccatgaagggccttggaactgatgaagatactctaattgagattttggcatcaagaactaacaaagaaatcagagacattaacagggtctacagagaggaactgaagagagatctggccaaagacataacctcagacacatctggagattttcggaacgctttgctttctcttgctaagggtgaccgatctgaggactttggtgtgaatgaagacttggctgattcagatgccagggccttgtatgaagcaggagaaaggagaaaggggacagacgtaaacgtgttcaataccatccttaccaccagaagctatccacaacttcgcagagtgtttcagaaatacaccaagtacagtaagcatgacatgaacaaagttctggacctggagttgaaaggtgacattgagaaatgcctcacagctatcgtgaagtgcgccacaagcaaaccagctttctttgcagagaagcttcatcaagccatgaaaggtgttggaactcgccataaggcattgatcaggattatggtttcccgttctgaaattgacatgaatgatatcaaagcattctatcagaagatgtatggtatctccctttgccaagccatcctggatgaaaccaaaggagattatgagaaaatcctggtggctctttgtggaggaaactaaacattcccttgatggtctcaagctatgatcagaagactttaattatatattttcatcctataagcttaaataggaaagtttcttcaacaggattacagtgtagctacctacatgctgaaaaatatagcctttaaatcatttttatattataactctgtataatagagataagtccattttttaaaaatgttttccccaaaccataaaaccctatacaagttgttctagtaacaatacatgagaaagatgtctatgtagctgaaaaaaatgatgatgcggccagattcctcacagtaaatagatattgtactaataatcaccttt

SEQ ID NO: 307987 - DNA, 1516 bp, Homo sapiens
agctgagccatgtacttcaaacagaaggcagccaattactaacttctggttgctaggtgtggcttcctttaaaatcctataaaatcagaagcccaagtctccactgccagtgtgaaatcttcagagaagaatttctctttagttctttgcaagaaggtagagataaagacactttttcaaaaatggcaatggtatcagaattcctcaagcaggcctggtttattgaaaatgaagagcaggaatatgttcaaactgtgaagtcatccaaaggtggtcccggatcagcggtgagcccctatcctaccttcaatccatcctcggatgtcgctgccttgcataaggccataatggttaaaggtgtggatgaagcaaccatcattgacattctaactaagcgaaacaatgcacagcgtcaacagatcaaagcagcatatctccaggaaacaggaaagcccctggatgaaacactgaagaaagcccttacaggtcaccttgaggaggttgttttagctctgctaaaaactccagcgcaatttgatgctgatgaacttcgtgctgccatgaagggccttggaactgatgaagatactctaattgagattttggcatcaagaactaacaaagaaatcagagacattaacagggtctacagagaggaactgaagagagatctggccaaagacataacctcagacacatctggagattttcggaacgctttgctttctcttgctaagggtgaccgatctgaggactttggtgtgaatgaagacttggctgattcagatgccagggccttgtatgaagcaggagaaaggagaaaggggacagacgtaaacgtgttcaataccatccttaccaccagaagctatccacaacttcgcagagtgtttcagaaatacaccaagtacagtaagcatgacatgaacaaagttctggacctggagttgaaaggtgacattgagaaatgcctcacagctatcgtgaagtgcgccacaagcaaaccagctttctttgcagagaagcttcatcaagccatgaaaggtgttggaactcgccataaggcattgatcaggattatggtttcccgttctgaaattgacatgaatgatatcaaagcattctatcagaagatgtatggtatctccctttgccaagccatcctggatgaaaccaaaggagattatgagaaaatcctggtggctctttgtggaggaaactaaacattcccttgatggtctcaagctatgatcagaagactttaattatatattttcatcctataagcttaaataggaaagtttcttcaacaggattacagtgtagctacctacatgctgaaaaatatagcctttaaatcatttttatattataactctgtataatagagataagtccattttttaaaaatgttttccccaaaccataaaaccctatacaagttgttctagtaacaatacatgagctagtgttcatatggaagggtactctagagtcgctctgcgcctgatacgat

SEQ ID NO: 307988 - DNA, 1413 bp, Homo sapiens
agctgagccatgtacttcaaacagaaggcagccaattactaacttctggttgctaggtgtggcttcctttaaaatcctataaaatcagaagcccaagtctccactgccagtgtgaaatcttcagagaagaatttctctttagttctttgcaagaaggtagagataaagacactttttcaaaaatggcaatggtatcagaattcctcaagcaggcctggtttattgaaaatgaagagcaggaatatgttcaaactgtgaagtcatccaaaggtggtcccggatcagcggtgagcccctatcctaccttcaatccatcctcggatgtcgctgccttgcataaggccataatggttaaaggtgtggatgaagcaaccatcattgacattctaactaagcgaaacaatgcacagcgtcaacagatcaaagcagcatatctccaggaaacaggaaagcccctggatgaaacactgaagaaagcccttacaggtcaccttgaggaggttgttttagctctgctaaaaactccagcgcaatttgatgctgatgaacttcgtgctgccatgaagggccttggaactgatgaagatactctaattgagattttggcatcaagaactaacaaagaaatcagagacattaacagggtctacagagaggaactgaagagagatctggccaaagacataacctcagacacatctggagattttcggaacgctttgctttctcttgctaagggtgaccgatctgaggactttggtgtgaatgaagacttggctgattcagatgccagggccttgtatgaagcaggagaaaggagaaaggggacagacgtaaacgtgttcaataccatccttaccaccagaagctatccacaacttcgcagagtgtttcagaaatacaccaagtacagtaagcatgacatgaacaaagttctggacctggagttgaaaggtgacattgagaaatgcctcacagctatcgtgaagtgcgccacaagcaaaccagctttctttgcagagaagcttcatcaagccatgaaaggtgttggaactcgccataaggcattgatcaggattatggtttcccgttctgaaattgacatgaatgatatcaaagcattctatcagaagatgtatggtatctccctttgccaagccatcctggatgaaaccaaaggagattatgagaaaatcctggtggctctttgtggaggaaactaaacattcccttgatggtctcaagctatgatcagaagactttaattatatattttcatcctataagcttaaataggaaagtttcttcaacaggattacagtgtagctacctacatgctgaaaaatatagcctttaaatcatttttatattataactctattatacagagttatagtcgacgcggccgcgaat

SEQ ID NO: 307989 - DNA, 1373 bp, Homo sapiens
agctgagccatgtacttcaaacagaaggcagccaattactaacttctggttgctaggtgtggcttcctttaaaatcctataaaatcagaagcccaagtctccactgccagtgtgaaatcttcagagaagaatttctctttagttctttgcaagaaggtagagataaagacactttttcaaaaatggcaatggtatcagaattcctcaagcaggcctggtttattgaaaatgaagagcaggaatatgttcaaactgtgaagtcatccaaaggtggtcccggatcagcggtgagcccctatcctaccttcaatccatcctcggatgtcgctgccttgcataaggccataatggttaaaggtgtggatgaagcaaccatcattgacattctaactaagcgaaacaatgcacagcgtcaacagatcaaagcagcatatctccaggaaacaggaaagcccctggatgaaacactgaagaaagcccttacaggtcaccttgaggaggttgttttagctctgctaaaaactccagcgcaatttgatgctgatgaacttcgtgctgccatgaagggccttggaactgatgaagatactctaattgagattttggcatcaagaactaacaaagaaatcagagacattaacagggtctacagagaggaactgaagagagatctggccaaagacataacctcagacacatctggagattttcggaacgctttgctttctcttgctaagggtgaccgatctgaggactttggtgtgaatgaagacttggctgattcagatgccagggccttgtatgaagcaggagaaaggagaaaggggacagacgtaaacgtgttcaataccatccttaccaccagaagctatccacaacttcgcagagtgtttcagaaatacaccaagtacagtaagcatgacatgaacaaagttctggacctggagttgaaaggtgacattgagaaatgcctcacagctatcgtgaagtgcgccacaagcaaaccagctttctttgcagagaagcttcatcaagccatgaaaggtgttggaactcgccataaggcattgatcaggattatggtttcccgttctgaaattgacatgaatgatatcaaagcattctatcagaagatgtatggtatctccctttgccaagccatcctggatgaaaccaaaggagattatgagaaaatcctggtggctctttgtggaggaaactaaacattcccttgatggtctcaagctatgatcagaagactttaattatatattttcatcctataagcttaaataggaaagtttcttcaacaggattacagtgtagctacctacatgctgaaaatacagcattaggtagggacgactcaatcg

SEQ ID NO: 307990 - DNA, 3418 bp, Homo sapiens
agctgagccatgtacttcaaacagaaggcagccaattactaacttctggttgctaggtgtggcttcctttaaaatcctataaaatcagaagcccaagtctccactgccagtgtgaaatcttcagagaagaatttctctttagttctttgcaagaaggtagagataaagacactttttcaaaaatggcaatggtatcagaattcctcaagcaggcctggtttattgaaaatgaagagcaggaatatgttcaaactgtgaagtcatccaaaggtggtcccggatcagcggtgagcccctatcctaccttcaatccatcctcggatgtcgctgccttgcataaggccataatggttaaaggtgtggatgaagcaaccatcattgacattctaactaagcgaaacaatgcacagcgtcaacagatcaaagcagcatatctccaggaaacaggaaagcccctggatgaaacactgaagaaagcccttacaggtcaccttgaggaggttgttttagctctgctaaaaactccagcgcaatttgatgctgatgaacttcgtgctgccatgaagggccttggaactgatgaagatactctaattgagattttggcatcaagaactaacaaagaaatcagagacattaacagggtctacagagaggaactgaagagagatctggccaaagacataacctcagacacatctggagattttcggaacgctttgctttctcttgctaagggtgaccgatctgaggactttggtgtgaatgaagacttggctgattcagatgccagggccttgtatgaagcaggagaaaggagaaaggggacagacgtaaacgtgttcaataccatccttaccaccagaagctatccacaacttcgcagagtgtttcagaaatacaccaagtacagtaagcatgacatgaacaaagttctggacctggagttgaaaggtgacattgagaaatgcctcacagctatcgtgaagtgcgccacaagcaaaccagctttctttgcagagaagcttcatcaagccatgaaagtatgtaccattctacttatatgtcctgcttagaggaagaattatttgtagaaagaacagaaaacctcatgttgtttgaaaatctcacatttaatatcttcccattaatgagaatcattgttctatttgatgaaagaggtaatacactaccttctcagaataaacttctgttagattcggtgcctttttttacagatgagattgtaaagtgagcctgtaagtgatttacggctcacttgtgatttgcttaaaacatgtgtcaccacgggaagggtgatgtactttcttttttaacgtgtaattttagtggcctacttcctctaaggttgtgagttttataatctcccactttatgagtctgatttgttgtttttattattctgtcttttatgccacagattaatagttgaaacttttgaaatgtcattctatgattaaggatgtagaatgatgtatttgagatcaactatgtcactttaactttactgtctgacatgcatggtattatacaaggtacctcttctattctgacattttgagcccacaaatgaatagttatgaaattatcttccttttttctttgcagctccaaaataaggaggttttcagagagagagagaaagaaagatctaactatttgaataatatgaaggaatattttgaatatatatgaataatttgaataatatgaaatgatagacatgctaggtactgctctgtagtggttagcatagttgctgccccctttctgccatagtctagtgtgatatttcgttgggtaatgatgaatacctggtgccatggaagagaaaagtgggacatatactccagactttggaaatccaggtagcattgctgtcagctaaattaacacctgaagtttaaatagaaatgagccagatgagggcaagagtggaagagatggggataaagcaagggtggtccaagaggaagaagtaacccacacacaggcttgaaggcaaaaggtaacataaccttctcaagacagtaagtatagagtgatggtgcacactggaagagatggtagaattaggcaggatattgtaagccttgaaaaagaattaggcaggatatcggaagccctgattagattctatcctaagagcaacagaagatcactgacagtgttttaaatagatagactagtttattagatttgcagtttagaagttccctttttttgtaattattggacagtgtagagaccggatggtgagagatgagttaggaagttgtgacagctctctatacctaccgctaatgtagaggattatttattttcatttcattaccattcgtgtaaggtgtgtgtgtgtgtgtgtgtgtgtgtgtgtgtgtgtgtatagctagtttctctatagaaattatatggaagagtaagaaggcttcactttaaaattcatgtttttaatgagagtattttctgaatatgagacacttaccctcatttattttggccagggtgttggaactcgccataaggcattgatcaggattatggtttcccgttctgaaattgacatgaatgatatcaaagcattctatcagaagatgtatggtatctccctttgccaagccatcctggatgaaaccaaaggagattatgagaaaatcctggtggctctttgtggaggaaactaaacattcccttgatggtctcaagctatgatcagaagactttaattatatattttcatcctataagcttaaataggaaagtttcttcaacaggattacagtgtagctacctacatgctgaaaaatatagcctttaaatcatttttatattataactctgtataatagagataagtccattttttaaaaatgttttccccaaaccataaaaccctatacaagttgttctagtaacaatacatgagaaagatgtctatgtagctgaaaataaaatgacgtcacaagacaaaacaccacacaacacaacgaaacacagaaaacaaaacaaaagaaaggacgaaagaaaaacaaaacaacccacagaggagacaaggaaagaaaaccaccagaacagaagcagacgagacaacaaagaagaggaaaaaagagaaaagaccggacgagaacacccgagcagatgacaaagactcaagagacaaagagagaaaaacaactaatgcaggggaaggagaaaggagaaaacaaaagagataaacgaacacagaaaaacaacaacggccgcagagaaaaagaacatacaagaaagaaactaagaaagagaagaatagacaagaaagacaagaaaacagaaagaaagaaacaaaatcgagacaacgaaaacacgaagaagcccgaaagaagaacaagaagcaagcgacagacaagccaagcagagc

SEQ ID NO: 307991 - DNA, 1448 bp, Homo sapiens
agctgagccatgtacttcaaacagaaggcagccaattactaacttctggttgctaggtgtggcttcctttaaaatcctataaaatcagaagcccaagtctccactgccagtgtgaaatcttcagagaagaatttctctttagttctttgcaagaaggtagagataaagacactttttcaaaaatggcaatggtatcagaattcctcaagcaggcctggtttattgaaaatgaagagcaggaatatgttcaaactgtgaagtcatccaaaggtggtcccggatcagcggtgagcccctatcctaccttcaatccatcctcggatgtcgctgccttgcataaggccataatggttaaaggtgtggatgaagcaaccatcattgacattctaactaagcgaaacaatgcacagcgtcaacagatcaaagcagcatatctccaggaaacaggaaagcccctggatgaaacactgaagaaagcccttacaggtcaccttgaggaggttgttttagctctgctaaaaactccagcgcaatttgatgctgatgaacttcgtgctgccatgaagggccttggaactgatgaagatactctaattgagattttggcatcaagaactaacaaagaaatcagagacattaacagggtctacagagaggaactgaagagagatctggccaaagacataacctcagacacatctggagattttcggaacgctttgctttctcttgctaagggtgaccgatctgaggactttggtgtgaatgaagacttggctgattcagatgccagggccttgtatgaagcaggagaaaggagaaaggggacagacgtaaacgtgttcaataccatccttaccaccagaagctatccacaacttcgcagagtgtttcagaaatacaccaagtacagtaagcatgacatgaacaaagttctggacctggagttgaaaggtgacattgagaaatgcctcacagctatcgtgaagtgcgccacaagcaaaccagctttctttgcagagaagcttcatcaagccatgaaaggtgttggaactcgccataaggcattgatcaggattatggtttcccgttctgaaattgacatgaatgatatcaaagcattctatcagaagatgtatggtatctccctttgccaagccatcctggatgaaaccaaaggagattatgagaaaatcctggtggctctttgtggaggaaactaaacattcccttgatggtctcaagcaagcgtcgcgcatgcgcgacgcttccatcaaactcatactcgtccttaccgggggccgtggccttctgtggctctgggttcttggccttgtgcttgaggcctttttcgaactcggagtccgtgttgttgccgtcgactgaactggaaggtgcgaaggatggtgcgtcttcctcttctgagctctccgtcgagctctcctcgc

SEQ ID NO: 307992 - DNA, 1212 bp, Homo sapiens
  misc_feature (1175)..(1175): n is a, c, g, or t
  misc_feature (1189)..(1189): n is a, c, g, or t
agctgagccatgtacttcaaacagaaggcagccaattactaacttctggttgctaggtgtggcttcctttaaaatcctataaaatcagaagcccaagtctccactgccagtgtgaaatcttcagagaagaatttctctttagttctttgcaagaaggtagagataaagacactttttcaaaaatggcaatggtatcagaattcctcaagcaggcctggtttattgaaaatgaagagcaggaatatgttcaaactgtgaagtcatccaaaggtggtcccggatcagcggtgagcccctatcctaccttcaatccatcctcggatgtcgctgccttgcataaggccataatggttaaaggtgtggatgaagcaaccatcattgacattctaactaagcgaaacaatgcacagcgtcaacagatcaaagcagcatatctccaggaaacaggaaagcccctggatgaaacactgaagaaagcccttacaggtcaccttgaggaggttgttttagctctgctaaaaactccagcgcaatttgatgctgatgaacttcgtgctgccatgaagggccttggaactgatgaagatactctaattgagattttggcatcaagaactaacaaagaaatcagagacattaacagggtctacagagaggaactgaagagagatctggccaaagacataacctcagacacatctggagattttcggaacgctttgctttctcttgctaagggtgaccgatctgaggactttggtgtgaatgaagacttggctgattcagatgccagggccttgtatgaagcaggagaaaggagaaaggggacagacgtaaacgtgttcaataccatccttaccaccagaagctatccacaacttcgcagagtgtttcagaaatacaccaagtacagtaagcatgacatgaacaaagttctggacctggagttgaaaggtgacattgagaaatgcctcacagctatcgtgaagtgcgccacaagcaaaccagctttctttgcagagaagcttcatcaagccatgaaaggtgttggaactcgccataaggcattgatcaggattatggtttcccgttctgaaattgacatgaatgatatcaaagcattctatcagaagatgtatggtatctccctttgccaagccatcctggatgaaccnaagggggttttggncctgggggttcttttgggggggt

SEQ ID NO: 307993 - DNA, 1255 bp, Homo sapiens
agctgagccatgtacttcaaacagaaggcagccaattactaacttctggttgctaggtgtggcttcctttaaaatcctataaaatcagaagcccaagtctccactgccagtgtgaaatcttcagagaagaatttctctttagttctttgcaagaaggtagagataaagacactttttcaaaaatggcaatggtatcagaattcctcaagcaggcctggtttattgaaaatgaagagcaggaatatgttcaaactgtgaagtcatccaaaggtggtcccggatcagcggtgagcccctatcctaccttcaatccatcctcggatgtcgctgccttgcataaggccataatggttaaaggtgtggatgaagcaaccatcattgacattctaactaagcgaaacaatgcacagcgtcaacagatcaaagcagcatatctccaggaaacaggaaagcccctggatgaaacactgaagaaagcccttacaggtcaccttgaggaggttgttttagctctgctaaaaactccagcgcaatttgatgctgatgaacttcgtgctgccatgaagggccttggaactgatgaagatactctaattgagattttggcatcaagaactaacaaagaaatcagagacattaacagggtctacagagaggaactgaagagagatctggccaaagacataacctcagacacatctggagattttcggaacgctttgctttctcttgctaagggtgaccgatctgaggactttggtgtgaatgaagacttggctgattcagatgccagggccttgtatgaagcaggagaaaggagaaaggggacagacgtaaacgtgttcaataccatccttaccaccagaagctatccacaacttcgcagagtgtttcagaaatacaccaagtacagtaagcatgacatgaacaaagttctggacctggagttgaaaggtgacattgagaaatgcctcacagctatcgtgaagtgcgccacaagcaaaccagctttctttgcagagaagcttcatcaagccatgaaaggtgttggaactcgccataaggcattgatcaggattatggtttcccgttctgaaattgacatgaatgatatcaaagcattctatcagaagatgtatggtatctccctttgccaagccatcctggtatgttttgattcctctaatgccatcccaacaaatgaaagttctttttgcaagatcttcaaggagaagagttgacttattgtatctat

SEQ ID NO: 307994 - DNA, 2895 bp, Homo sapiens
agctgagccatgtacttcaaacagaaggcagccaattactaacttctggttgctaggtgtggcttcctttaaaatcctataaaatcagaagcccaagtctccactgccagtgtgaaatcttcagagaagaatttctctttagttctttgcaagaaggtagagataaagacactttttcaaaaatggcaatggtatcagaattcctcaagcaggcctggtttattgaaaatgaagagcaggaatatgttcaaactgtgaagtcatccaaaggtggtcccggatcagcggtgagcccctatcctaccttcaatccatcctcggatgtcgctgccttgcataaggccataatggttaaaggtgtggatgaagcaaccatcattgacattctaactaagcgaaacaatgcacagcgtcaacagatcaaagcagcatatctccaggaaacaggaaagcccctggatgaaacactgaagaaagcccttacaggtcaccttgaggaggttgttttagctctgctaaaaactccagcgcaatttgatgctgatgaacttcgtgctgccatgaagggccttggaactgatgaagatactctaattgagattttggcatcaagaactaacaaagaaatcagagacattaacagggtctacagagaggaactgaagagagatctggccaaagacataacctcagacacatctggagattttcggaacgctttgctttctcttgctaagggtgaccgatctgaggactttggtgtgaatgaagacttggctgattcagatgccagggccttgtatgaagcaggagaaaggagaaaggggacagacgtaaacgtgttcaataccatccttaccaccagaagctatccacaacttcgcagagtgtttcagaaatacaccaagtacagtaagcatgacatgaacaaagttctggacctggagttgaaaggtgacattgagaaatgcctcacagctatcgtgaagtgcgccacaagcaaaccagctttctttgcagagaagcttcatcaagccatgaaagtatgtaccattctacttatatgtcctgcttagaggaagaattatttgtagaaagaacagaaaacctcatgttgtttgaaaatctcacatttaatatcttcccattaatgagaatcattgttctatttgatgaaagaggtaatacactaccttctcagaataaacttctgttagattcggtgcctttttttacagatgagattgtaaagtgagcctgtaagtgatttacggctcacttgtgatttgcttaaaacatgtgtcaccacgggaagggtgatgtactttcttttttaacgtgtaattttagtggcctacttcctctaaggttgtgagttttataatctcccactttatgagtctgatttgttgtttttattattctgtcttttatgccacagattaatagttgaaacttttgaaatgtcattctatgattaaggatgtagaatgatgtatttgagatcaactatgtcactttaactttactgtctgacatgcatggtattatacaaggtacctcttctattctgacattttgagcccacaaatgaatagttatgaaattatcttccttttttctttgcagctccaaaataaggaggttttcagagagagagagaaagaaagatctaactatttgaataatatgaaggaatattttgaatatatatgaataatttgaataatatgaaatgatagacatgctaggtactgctctgtagtggttagcatagttgctgccccctttctgccatagtctagtgtgatatttcgttgggtaatgatgaatacctggtgccatggaagagaaaagtgggacatatactccagactttggaaatccaggtagcattgctgtcagctaaattaacacctgaagtttaaatagaaatgagccagatgagggcaagagtggaagagatggggataaagcaagggtggtccaagaggaagaagtaacccacacacaggcttgaaggcaaaaggtaacataaccttctcaagacagtaagtatagagtgatggtgcacactggaagagatggtagaattaggcaggatattgtaagccttgaaaaagaattaggcaggatatcggaagccctgattagattctatcctaagagcaacagaagatcactgacagtgttttaaatagatagactagtttattagatttgcagtttagaagttccctttttttgtaattattggacagtgtagagaccggatggtgagagatgagttaggaagttgtgacagctctctatacctaccgctaatgtagaggattatttattttcatttcattaccattcgtgtaaggtgtgtgtgtgtgtgtgtgtgtgtgtgtgtgtgtgtgtatagctagtttctctatagaaattatatggaagagtaagaaggcttcactttaaaattcatgtttttaatgagagtattttctgaatatgagacacttaccctcatttattttggccagggtgttggaactcgccataaggcattgatcaggattatggtttcccgttctgaaattgacatgaatgatatcaaagcattctatcagaagatgtatggtatctccctttgccaagccatcctggatgaaaccaaaggagattatgagaaaatcctggtggctctttgtggaggaaactaaacattcccttgatggtctcaagctatgatcagaagactttaattatatattttcatcctataagcttaaataggaaagtttcttcaacaggattacagtgtagctacctacatgctgaaaaatatagcctttaaatcatttttatattataactctattatacagagttatagtcgacgcggccgcgaat

SEQ ID NO: 307995 - DNA, 1080 bp, Homo sapiens
agctgagccatgtacttcaaacagaaggcagccaattactaacttctggttgctaggtgtggcttcctttaaaatcctataaaatcagaagcccaagtctccactgccagtgtgaaatcttcagagaagaatttctctttagttctttgcaagaaggtagagataaagacactttttcaaaaatggcaatggtatcagaattcctcaagcaggcctggtttattgaaaatgaagagcaggaatatgttcaaactgtgaagtcatccaaaggtggtcccggatcagcggtgagcccctatcctaccttcaatccatcctcggatgtcgctgccttgcataaggccataatggttaaaggtgtggatgaagcaaccatcattgacattctaactaagcgaaacaatgcacagcgtcaacagatcaaagcagcatatctccaggaaacaggaaagcccctggatgaaacactgaagaaagcccttacaggtcaccttgaggaggttgttttagctctgctaaaaactccagcgcaatttgatgctgatgaacttcgtgctgccatgaagggccttggaactgatgaagatactctaattgagattttggcatcaagaactaacaaagaaatcagagacattaacagggtctacagagaggaactgaagagagatctggccaaagacataacctcagacacatctggagattttcggaacgctttgctttctcttgctaagggtgaccgatctgaggactttggtgtgaatgaagacttggctgattcagatgccagggccttgtatgaagcaggagaaaggagaaaggggacagacgtaaacgtgttcaataccatccttaccaccagaagctatccacaacttcgcagagtgtttcagaaatacaccaagtacagtaagcatgacatgaacaaagttctggacctggagttgaaaggtgacattgagaaatgcctcacagctatcggtatgtagtccagcagttgaaagagttttctaactagaaattgtattttcaaagctatcctatacttaacaagaacaacagcaacaaaaccaataa

SEQ ID NO: 307996 - DNA, 4540 bp, Homo sapiens
agctgagccatgtacttcaaacagaaggcagccaattactaacttctggttgctaggtgtggcttcctttaaaatcctataaaatcagaagcccaagtctccactgccagtgtgaaatcttcagagaagaatttctctttagttctttgcaagaaggtagagataaaggtaagtcttggttttccttttagttagttttggttgttttgaaaacttttctcatcactatgttaaatgttactgcttctacaggatttatggttagttgcatttaacatgataagtcattcataaatctttctgtagaattacattggatatttatattttaggaatcacaaattacaatatttttgttctacttagttaacaaatacaagtaaaaataagataagtttgcttaatactggctcattgtactcttggtaagttaccatgagaaagaagggaagaatgtgctttccctctggtagccttaaaagaatgtgtttttcctttccttccccttgaaatatttcttcccaagagctgtgtgttttacagagaaatcgtgatgggggctgctttttgggggcaagaacaaaagtgataggagtgggctgcagggaactgtttcaaaatagtaggactttcataatttattttcttcttttgtaaggaaaacaagatagattcagacctcaaagtgctaatcatgctctttgtaataaacatttaaaaatatatgttatatttgcttatgctatttttccttttcttgtaggctctgtgtcatatacagtcttttcaagtgctggctggaaaacctaaaaagaagggaaatactttctgggtagtgtcagatacattatcctaggggaatgtcagtgaggccctccaacagctattccacttgattgttgcatgagctaatggccataaaactccttagaaaagcacaaagcaaaactaaagaagagtatttactagtgttggatatatttgtaaaagtgagattacaaatcatgtatctggctatttttttcttaaacatgttccttcaagaatttttctgttcgttcattttaaatatttattaaatgttctgatttcttatgttcactgctagctaattaacaaggatggaatttttcttgccttggttatatctaaaagattgtaaaaactttgagaaagcaatgttgccctctttccacaggagtattttggtagctgtaagagaatgcacattgcaaatgactcaaatgtggtaaaatgttggtttcataattctgaaatggcctcttccccaaaagtgacagtaacaccctagctccaggctcaaccacatccagcacatagccaacatttaacagatgttgacaaaatagttaataataatattattaaggaaccagccagagtttcatgcttattaaatactttttcaaccagaaggtctgcaaaggttgatttctgaatatgacgttagctctctctagacctattaatttacgacatttcaaatcagaggtaaaccagcagacctattatttttcaatgataaactataaacagttttttgaagtcaactatttccttttcctttaaaattggacagaatttcatcaggaagctcagaacaatccaatttatataatgccttccttcattatgctaattttcttcatcttcatctacttgaagtaatatttaagattggcacttcagagctgtaaatggatcttagatgataattacttcaacattcttattttataaacgaagaccctctggagaagctaaatgtttttcttgaggtcagatcgccagataatcaagaaccagtatacttcaatttgtattttatatcctatagttgtgggtagaaaatgttcattaaattagtgtagatatgttttttaaaatattagcaatgatacatgatattcattcaataatacttattaacatcctaaattccaggcattttgctagggattggaagtacatacataatgaatattattatttgtatgttagcacgggcctcatggcctgctcctggggaatataaacaagccaatggaaagtgataatacagaaaggtggggctggtgtaggggtgaagtcaggatgctttgggagagcatggaaggtcaccgaatccagtgctgaggaactaatgaagggtttctgaagaacgtgatgagatcaatgctgatgagtcacttagaagtagcaattagttaggcaaagggaagtgaatgtggaggaggaacaagcattccaggcaagaagaacaccctatcgaaaagcctggaagcaaaacattagtgaggctacctttcataaattgctttctgtaagtcatgccattgtgtagtcttaattgctttctctcaccagggaaggtgtgggaaggacttgtgaaatacatattcgaggaaaaactatgcacaaggccgtgcatttaaaaataaactccctaaggctggggtgaaacctgctacggtctgcgcaagttgactgttaatgaatttgattctcaggtgtgagtgattaaaagaacactgatcatgtcattttctttttggtcactaattccctccctcccttctctttcttttcttttttcttttcttttctttttctttctttcttcccgacagagtcttgttatgtcgcccaggatggagtgtagtggtacaatctcggctcactgcagcctccgcctcttcctgggttcaagtgattctcctgcctcagccttctgagtagatgggactacagacactttttcaaaaatggcaatggtatcagaattcctcaagcaggcctggtttattgaaaatgaagagcaggaatatgttcaaactgtgaagtcatccaaaggtggtcccggatcagcggtgagcccctatcctaccttcaatccatcctcggatgtcgctgccttgcataaggccataatggttaaaggtgtggatgaagcaaccatcattgacattctaactaagcgaaacaatgcacagcgtcaacagatcaaagcagcatatctccaggaaacaggaaagcccctggatgaaacactgaagaaagcccttacaggtcaccttgaggaggttgttttagctctgctaaaaactccagcgcaatttgatgctgatgaacttcgtgctgccatgaagggccttggaactgatgaagatactctaattgagattttggcatcaagaactaacaaagaaatcagagacattaacagggtctacagagaggaactgaagagagatctggccaaagacataacctcagacacatctggagattttcggaacgctttgctttctcttgctaagggtgaccgatctgaggactttggtgtgaatgaagacttggctgattcagatgccagggccttgtatgaagcaggagaaaggagaaaggggacagacgtaaacgtgttcaataccatccttaccaccagaagctatccacaacttcgcagagtgtttcagaaatacaccaagtacagtaagcatgacatgaacaaagttctggacctggagttgaaaggtgacattgagaaatgcctcacagctatcgtgaagtgcgccacaagcaaaccagctttctttgcagagaagcttcatcaagccatgaaaggtgttggaactcgccataaggcattgatcaggattatggtttcccgttctgaaattgacatgaatgatatcaaagcattctatcagaagatgtatggtatctccctttgccaagccatcctggatgaaaccaaaggagattatgagaaaatcctggtggctctttgtggaggaaactaaacattcccttgatggtctcaagctatgatcagaagactttaattatatattttcatcctataagcttaaataggaaagtttcttcaacaggattacagtgtagctacctacatgctgaaaaatatagcctttaaatcatttttatattataactctgtataatagagataagtccattttttaaaaatgttttccccaaaccataaaaccctatacaagttgttctagtaacaatacatgagaaagatgtctatgtagctgaaaataaaatgacgtcacaagacaaaacaccacacaacacaacgaaacacagaaaacaaaacaaaagaaaggacgaaagaaaaacaaaacaacccacagaggagacaaggaaagaaaaccaccagaacagaagcagacgagacaacaaagaagaggaaaaaagagaaaagaccggacgagaacacccgagcagatgacaaagactcaagagacaaagagagaaaaacaactaatgcaggggaaggagaaaggagaaaacaaaagagataaacgaacacagaaaaacaacaacggccgcagagaaaaagaacatacaagaaagaaactaagaaagagaagaatagacaagaaagacaagaaaacagaaagaaagaaacaaaatcgagacaacgaaaacacgaagaagcccgaaagaagaacaagaagcaagcgacagacaagccaagcagagc

SEQ ID NO: 307997 - DNA, 2057 bp, Homo sapiens
agctgagccatgtacttcaaacagaaggcagccaattactaacttctggttgctaggtgtggcttcctttaaaatcctataaaatcagaagcccaagtctccactgccagtgtgaaatcttcagagaagaatttctctttagttctttgcaagaaggtagagataaagagtcttgttatgtcgcccaggatggagtgtagtggtacaatctcggctcactgcagcctccgcctcttcctgggttcaagtgattctcctgcctcagccttctgagtagatgggactacagacactttttcaaaaatggcaatggtatcagaattcctcaagcaggcctggtttattgaaaatgaagagcaggaatatgttcaaactgtgaagtcatccaaaggtggtcccggatcagcggtgagcccctatcctaccttcaatccatcctcggatgtcgctgccttgcataaggccataatggttaaaggtgtggatgaagcaaccatcattgacattctaactaagcgaaacaatgcacagcgtcaacagatcaaagcagcatatctccaggaaacaggaaagcccctggatgaaacactgaagaaagcccttacaggtcaccttgaggaggttgttttagctctgctaaaaactccagcgcaatttgatgctgatgaacttcgtgctgccatgaagggccttggaactgatgaagatactctaattgagattttggcatcaagaactaacaaagaaatcagagacattaacagggtctacagagaggaactgaagagagatctggccaaagacataacctcagacacatctggagattttcggaacgctttgctttctcttgctaagggtgaccgatctgaggactttggtgtgaatgaagacttggctgattcagatgccagggccttgtatgaagcaggagaaaggagaaaggggacagacgtaaacgtgttcaataccatccttaccaccagaagctatccacaacttcgcagagtgtttcagaaatacaccaagtacagtaagcatgacatgaacaaagttctggacctggagttgaaaggtgacattgagaaatgcctcacagctatcgtgaagtgcgccacaagcaaaccagctttctttgcagagaagcttcatcaagccatgaaaggtgttggaactcgccataaggcattgatcaggattatggtttcccgttctgaaattgacatgaatgatatcaaagcattctatcagaagatgtatggtatctccctttgccaagccatcctggatgaaaccaaaggagattatgagaaaatcctggtggctctttgtggaggaaactaaacattcccttgatggtctcaagctatgatcagaagactttaattatatattttcatcctataagcttaaataggaaagtttcttcaacaggattacagtgtagctacctacatgctgaaaaatatagcctttaaatcatttttatattataactctgtataatagagataagtccattttttaaaaatgttttccccaaaccataaaaccctatacaagttgttctagtaacaatacatgagaaagatgtctatgtagctgaaaataaaatgacgtcacaagacaaaacaccacacaacacaacgaaacacagaaaacaaaacaaaagaaaggacgaaagaaaaacaaaacaacccacagaggagacaaggaaagaaaaccaccagaacagaagcagacgagacaacaaagaagaggaaaaaagagaaaagaccggacgagaacacccgagcagatgacaaagactcaagagacaaagagagaaaaacaactaatgcaggggaaggagaaaggagaaaacaaaagagataaacgaacacagaaaaacaacaacggccgcagagaaaaagaacatacaagaaagaaactaagaaagagaagaatagacaagaaagacaagaaaacagaaagaaagaaacaaaatcgagacaacgaaaacacgaagaagcccgaaagaagaacaagaagcaagcgacagacaagccaagcagagc

SEQ ID NO: 307998 - DNA, 1819 bp, Homo sapiens
cgactctagaggtcccccattcgcggattcaccaagaaggtagagataaagacactttttcaaaaatggcaatggtatcagaattcctcaagcaggcctggtttattgaaaatgaagagcaggaatatgttcaaactgtgaagtcatccaaaggtggtcccggatcagcggtgagcccctatcctaccttcaatccatcctcggatgtcgctgccttgcataaggccataatggttaaaggtgtggatgaagcaaccatcattgacattctaactaagcgaaacaatgcacagcgtcaacagatcaaagcagcatatctccaggaaacaggaaagcccctggatgaaacactgaagaaagcccttacaggtcaccttgaggaggttgttttagctctgctaaaaactccagcgcaatttgatgctgatgaacttcgtgctgccatgaagggccttggaactgatgaagatactctaattgagattttggcatcaagaactaacaaagaaatcagagacattaacagggtctacagagaggaactgaagagagatctggccaaagacataacctcagacacatctggagattttcggaacgctttgctttctcttgctaagggtgaccgatctgaggactttggtgtgaatgaagacttggctgattcagatgccagggccttgtatgaagcaggagaaaggagaaaggggacagacgtaaacgtgttcaataccatccttaccaccagaagctatccacaacttcgcagagtgtttcagaaatacaccaagtacagtaagcatgacatgaacaaagttctggacctggagttgaaaggtgacattgagaaatgcctcacagctatcgtgaagtgcgccacaagcaaaccagctttctttgcagagaagcttcatcaagccatgaaaggtgttggaactcgccataaggcattgatcaggattatggtttcccgttctgaaattgacatgaatgatatcaaagcattctatcagaagatgtatggtatctccctttgccaagccatcctggatgaaaccaaaggagattatgagaaaatcctggtggctctttgtggaggaaactaaacattcccttgatggtctcaagctatgatcagaagactttaattatatattttcatcctataagcttaaataggaaagtttcttcaacaggattacagtgtagctacctacatgctgaaaaatatagcctttaaatcatttttatattataactctgtataatagagataagtccattttttaaaaatgttttccccaaaccataaaaccctatacaagttgttctagtaacaatacatgagaaagatgtctatgtagctgaaaataaaatgacgtcacaagacaaaacaccacacaacacaacgaaacacagaaaacaaaacaaaagaaaggacgaaagaaaaacaaaacaacccacagaggagacaaggaaagaaaaccaccagaacagaagcagacgagacaacaaagaagaggaaaaaagagaaaagaccggacgagaacacccgagcagatgacaaagactcaagagacaaagagagaaaaacaactaatgcaggggaaggagaaaggagaaaacaaaagagataaacgaacacagaaaaacaacaacggccgcagagaaaaagaacatacaagaaagaaactaagaaagagaagaatagacaagaaagacaagaaaacagaaagaaagaaacaaaatcgagacaacgaaaacacgaagaagcccgaaagaagaacaagaagcaagcgacagacaagccaagcagagc

SEQ ID NO: 307999 - DNA, 2081 bp, Homo sapiens
agctgagccatgtacttcaaacagaaggcagccaattactaacttctggttgctaggtgtggcttcctttaaaatcctataaaatcagaagcccaagtctccactgccagtgtgaaatcttcagagaagaatttctctttagttctttgcaagaaggtagagataaagggaaggtgtgggaaggacttgtgaaatacatattcgaggaaaaactatgcacaaggccgtgcatttaaaaataaactccctaaggctggggtgaaacctgctacggtctgcgcaagttgactgttaatgaatttgattctcaggtacactttttcaaaaatggcaatggtatcagaattcctcaagcaggcctggtttattgaaaatgaagagcaggaatatgttcaaactgtgaagtcatccaaaggtggtcccggatcagcggtgagcccctatcctaccttcaatccatcctcggatgtcgctgccttgcataaggccataatggttaaaggtgtggatgaagcaaccatcattgacattctaactaagcgaaacaatgcacagcgtcaacagatcaaagcagcatatctccaggaaacaggaaagcccctggatgaaacactgaagaaagcccttacaggtcaccttgaggaggttgttttagctctgctaaaaactccagcgcaatttgatgctgatgaacttcgtgctgccatgaagggccttggaactgatgaagatactctaattgagattttggcatcaagaactaacaaagaaatcagagacattaacagggtctacagagaggaactgaagagagatctggccaaagacataacctcagacacatctggagattttcggaacgctttgctttctcttgctaagggtgaccgatctgaggactttggtgtgaatgaagacttggctgattcagatgccagggccttgtatgaagcaggagaaaggagaaaggggacagacgtaaacgtgttcaataccatccttaccaccagaagctatccacaacttcgcagagtgtttcagaaatacaccaagtacagtaagcatgacatgaacaaagttctggacctggagttgaaaggtgacattgagaaatgcctcacagctatcgtgaagtgcgccacaagcaaaccagctttctttgcagagaagcttcatcaagccatgaaaggtgttggaactcgccataaggcattgatcaggattatggtttcccgttctgaaattgacatgaatgatatcaaagcattctatcagaagatgtatggtatctccctttgccaagccatcctggatgaaaccaaaggagattatgagaaaatcctggtggctctttgtggaggaaactaaacattcccttgatggtctcaagctatgatcagaagactttaattatatattttcatcctataagcttaaataggaaagtttcttcaacaggattacagtgtagctacctacatgctgaaaaatatagcctttaaatcatttttatattataactctgtataatagagataagtccattttttaaaaatgttttccccaaaccataaaaccctatacaagttgttctagtaacaatacatgagaaagatgtctatgtagctgaaaataaaatgacgtcacaagacaaaacaccacacaacacaacgaaacacagaaaacaaaacaaaagaaaggacgaaagaaaaacaaaacaacccacagaggagacaaggaaagaaaaccaccagaacagaagcagacgagacaacaaagaagaggaaaaaagagaaaagaccggacgagaacacccgagcagatgacaaagactcaagagacaaagagagaaaaacaactaatgcaggggaaggagaaaggagaaaacaaaagagataaacgaacacagaaaaacaacaacggccgcagagaaaaagaacatacaagaaagaaactaagaaagagaagaatagacaagaaagacaagaaaacagaaagaaagaaacaaaatcgagacaacgaaaacacgaagaagcccgaaagaagaacaagaagcaagcgacagacaagccaagcagagc

SEQ ID NO: 308000 - DNA, 2883 bp, Homo sapiens
actttgggaggccgaggcgggcagatcacttggggtcatgagttcaaaatcagcctagccaacatggtgaaaacctgtctctactaaaaatacaaaaattagccgggcgtggtggctggtgcctgtaatcccagctactcaggaggctgaggcaggagaattgcttgaacccaggagacggaggttgcagtgagtcgagatttcaccactgcactccagcctgggcgacagagaaagactccatctcaaaaaaaaaaaaaaaaaaaaaagcaatcattaagcttttcatctagccattacttttgtacaggctctcattaattccacatagatggtctaatggtctactaaatagtattctaatcctccatcttgtctatctcttagccattctccatgataaaggatgaatggtctttcggaaacataaatgaaaccatgctgctttaaaaaaacaaacaaacaaaaagaaacccattaatgttttcccaaagctttgtggacacattgaagcttcttgtttcagcttctgccaacatttctcgctccagcaaactttcttctgcttcccaaatatgacaagcttcttctttaacttttctgccaggttaatcttgactcatttcaagagaggcttgggtcagccagggcctactctaagaagtttctttagcccttatgttttcctatggagagcacacactagctttaagtcctgagggtacttaagatgatatttcaatgtttttgtactcttagtgcttggcatatggtgggtggtctacaaatttagaacaatgtagtgaaccacaaactcctctcttcagcctgtgtgcttacttgtagtagttgtctgatctctaaaatttagaactgaatatgccaagaaagagttcaatttcagagaggagggtatggtttcattttaagtataaaagcttcctttaaaaaaaattacgtcttacattttgttatgctcctaagtgtaattgatcctggaaagtaagcgcaaggctactctctaatgctaactcttatgtatgtaagaggtgaggaaggagaggttgtgtgtggtgcatttgttttgtaaaagcatctaactgttttctttccagacactttttcaaaaatggcaatggtatcagaattcctcaagcaggcctggtttattgaaaatgaagagcaggaatatgttcaaactgtgaagtcatccaaaggtggtcccggatcagcggtgagcccctatcctaccttcaatccatcctcggatgtcgctgccttgcataaggccataatggttaaaggtgtggatgaagcaaccatcattgacattctaactaagcgaaacaatgcacagcgtcaacagatcaaagcagcatatctccaggaaacaggaaagcccctggatgaaacactgaagaaagcccttacaggtcaccttgaggaggttgttttagctctgctaaaaactccagcgcaatttgatgctgatgaacttcgtgctgccatgaagggccttggaactgatgaagatactctaattgagattttggcatcaagaactaacaaagaaatcagagacattaacagggtctacagagaggaactgaagagagatctggccaaagacataacctcagacacatctggagattttcggaacgctttgctttctcttgctaagggtgaccgatctgaggactttggtgtgaatgaagacttggctgattcagatgccagggccttgtatgaagcaggagaaaggagaaaggggacagacgtaaacgtgttcaataccatccttaccaccagaagctatccacaacttcgcagagtgtttcagaaatacaccaagtacagtaagcatgacatgaacaaagttctggacctggagttgaaaggtgacattgagaaatgcctcacagctatcgtgaagtgcgccacaagcaaaccagctttctttgcagagaagcttcatcaagccatgaaaggtgttggaactcgccataaggcattgatcaggattatggtttcccgttctgaaattgacatgaatgatatcaaagcattctatcagaagatgtatggtatctccctttgccaagccatcctggatgaaaccaaaggagattatgagaaaatcctggtggctctttgtggaggaaactaaacattcccttgatggtctcaagctatgatcagaagactttaattatatattttcatcctataagcttaaataggaaagtttcttcaacaggattacagtgtagctacctacatgctgaaaaatatagcctttaaatcatttttatattataactctgtataatagagataagtccattttttaaaaatgttttccccaaaccataaaaccctatacaagttgttctagtaacaatacatgagaaagatgtctatgtagctgaaaataaaatgacgtcacaagacaaaacaccacacaacacaacgaaacacagaaaacaaaacaaaagaaaggacgaaagaaaaacaaaacaacccacagaggagacaaggaaagaaaaccaccagaacagaagcagacgagacaacaaagaagaggaaaaaagagaaaagaccggacgagaacacccgagcagatgacaaagactcaagagacaaagagagaaaaacaactaatgcaggggaaggagaaaggagaaaacaaaagagataaacgaacacagaaaaacaacaacggccgcagagaaaaagaacatacaagaaagaaactaagaaagagaagaatagacaagaaagacaagaaaacagaaagaaagaaacaaaatcgagacaacgaaaacacgaagaagcccgaaagaagaacaagaagcaagcgacagacaagccaagcagagc

SEQ ID NO: 308001 - DNA, 1747 bp, Homo sapiens
agctgagccatgtacttcaaacagaaggcagccaattactaacttctggttgctaggtgtggcttcctttaaaatcctataaaatcagaagcccaagtctccactgccagtgtgaaatcttcagagaagaatttctctttagttctttgcaagaaggtagagataaaggtgtggatgaagcaaccatcattgacattctaactaagcgaaacaatgcacagcgtcaacagatcaaagcagcatatctccaggaaacaggaaagcccctggatgaaacactgaagaaagcccttacaggtcaccttgaggaggttgttttagctctgctaaaaactccagcgcaatttgatgctgatgaacttcgtgctgccatgaagggccttggaactgatgaagatactctaattgagattttggcatcaagaactaacaaagaaatcagagacattaacagggtctacagagaggaactgaagagagatctggccaaagacataacctcagacacatctggagattttcggaacgctttgctttctcttgctaagggtgaccgatctgaggactttggtgtgaatgaagacttggctgattcagatgccagggccttgtatgaagcaggagaaaggagaaaggggacagacgtaaacgtgttcaataccatccttaccaccagaagctatccacaacttcgcagagtgtttcagaaatacaccaagtacagtaagcatgacatgaacaaagttctggacctggagttgaaaggtgacattgagaaatgcctcacagctatcgtgaagtgcgccacaagcaaaccagctttctttgcagagaagcttcatcaagccatgaaaggtgttggaactcgccataaggcattgatcaggattatggtttcccgttctgaaattgacatgaatgatatcaaagcattctatcagaagatgtatggtatctccctttgccaagccatcctggatgaaaccaaaggagattatgagaaaatcctggtggctctttgtggaggaaactaaacattcccttgatggtctcaagctatgatcagaagactttaattatatattttcatcctataagcttaaataggaaagtttcttcaacaggattacagtgtagctacctacatgctgaaaaatatagcctttaaatcatttttatattataactctgtataatagagataagtccattttttaaaaatgttttccccaaaccataaaaccctatacaagttgttctagtaacaatacatgagaaagatgtctatgtagctgaaaataaaatgacgtcacaagacaaaacaccacacaacacaacgaaacacagaaaacaaaacaaaagaaaggacgaaagaaaaacaaaacaacccacagaggagacaaggaaagaaaaccaccagaacagaagcagacgagacaacaaagaagaggaaaaaagagaaaagaccggacgagaacacccgagcagatgacaaagactcaagagacaaagagagaaaaacaactaatgcaggggaaggagaaaggagaaaacaaaagagataaacgaacacagaaaaacaacaacggccgcagagaaaaagaacatacaagaaagaaactaagaaagagaagaatagacaagaaagacaagaaaacagaaagaaagaaacaaaatcgagacaacgaaaacacgaagaagcccgaaagaagaacaagaagcaagcgacagacaagccaagcagagc

SEQ ID NO: 308002 - DNA, 1799 bp, Homo sapiens
  misc_feature (84)..(84): n is a, c, g, or t
gagtgtgaaatcttcagaagaaagaaattttctcctttagcttctttggccaagcaaagcgtagagcattaaacgaccaccctntcaaatgcagtatcagatctcagcagctggttatgaaatgagagcagattgtcaacgtgagtctcaagtgtcgcgatcagcgtgagcctatctactcatcatctcggatgtcgctgctgcataggcatatgttaaggtgtggatgaagcaaccatcattgacattctaactaagcgaaacaatgcacagcgtcaacagatcaaagcagcatatctccaggaaacaggaaagcccctggatgaaacactgaagaaagcccttacaggtcaccttgaggaggttgttttagctctgctaaaaactccagcgcaatttgatgctgatgaacttcgtgctgccatgaagggccttggaactgatgaagatactctaattgagattttggcatcaagaactaacaaagaaatcagagacattaacagggtctacagagaggaactgaagagagatctggccaaagacataacctcagacacatctggagattttcggaacgctttgctttctcttgctaagggtgaccgatctgaggactttggtgtgaatgaagacttggctgattcagatgccagggccttgtatgaagcaggagaaaggagaaaggggacagacgtaaacgtgttcaataccatccttaccaccagaagctatccacaacttcgcagagtgtttcagaaatacaccaagtacagtaagcatgacatgaacaaagttctggacctggagttgaaaggtgacattgagaaatgcctcacagctatcgtgaagtgcgccacaagcaaaccagctttctttgcagagaagcttcatcaagccatgaaaggtgttggaactcgccataaggcattgatcaggattatggtttcccgttctgaaattgacatgaatgatatcaaagcattctatcagaagatgtatggtatctccctttgccaagccatcctggatgaaaccaaaggagattatgagaaaatcctggtggctctttgtggaggaaactaaacattcccttgatggtctcaagctatgatcagaagactttaattatatattttcatcctataagcttaaataggaaagtttcttcaacaggattacagtgtagctacctacatgctgaaaaatatagcctttaaatcatttttatattataactctgtataatagagataagtccattttttaaaaatgttttccccaaaccataaaaccctatacaagttgttctagtaacaatacatgagaaagatgtctatgtagctgaaaataaaatgacgtcacaagacaaaacaccacacaacacaacgaaacacagaaaacaaaacaaaagaaaggacgaaagaaaaacaaaacaacccacagaggagacaaggaaagaaaaccaccagaacagaagcagacgagacaacaaagaagaggaaaaaagagaaaagaccggacgagaacacccgagcagatgacaaagactcaagagacaaagagagaaaaacaactaatgcaggggaaggagaaaggagaaaacaaaagagataaacgaacacagaaaaacaacaacggccgcagagaaaaagaacatacaagaaagaaactaagaaagagaagaatagacaagaaagacaagaaaacagaaagaaagaaacaaaatcgagacaacgaaaacacgaagaagcccgaaagaagaacaagaagcaagcgacagacaagccaagcagagc

SEQ ID NO: 308003 - DNA, 1558 bp, Homo sapiens
ctctggatgcaaagtgtcctctggatgcaaagcgtcaacagatcaaagcagcatatctccaggaaacaggaaagcccctggatgaaacactgaagaaagcccttacaggtcaccttgaggaggttgttttagctctgctaaaaactccagcgcaatttgatgctgatgaacttcgtgctgccatgaagggccttggaactgatgaagatactctaattgagattttggcatcaagaactaacaaagaaatcagagacattaacagggtctacagagaggaactgaagagagatctggccaaagacataacctcagacacatctggagattttcggaacgctttgctttctcttgctaagggtgaccgatctgaggactttggtgtgaatgaagacttggctgattcagatgccagggccttgtatgaagcaggagaaaggagaaaggggacagacgtaaacgtgttcaataccatccttaccaccagaagctatccacaacttcgcagagtgtttcagaaatacaccaagtacagtaagcatgacatgaacaaagttctggacctggagttgaaaggtgacattgagaaatgcctcacagctatcgtgaagtgcgccacaagcaaaccagctttctttgcagagaagcttcatcaagccatgaaaggtgttggaactcgccataaggcattgatcaggattatggtttcccgttctgaaattgacatgaatgatatcaaagcattctatcagaagatgtatggtatctccctttgccaagccatcctggatgaaaccaaaggagattatgagaaaatcctggtggctctttgtggaggaaactaaacattcccttgatggtctcaagctatgatcagaagactttaattatatattttcatcctataagcttaaataggaaagtttcttcaacaggattacagtgtagctacctacatgctgaaaaatatagcctttaaatcatttttatattataactctgtataatagagataagtccattttttaaaaatgttttccccaaaccataaaaccctatacaagttgttctagtaacaatacatgagaaagatgtctatgtagctgaaaataaaatgacgtcacaagacaaaacaccacacaacacaacgaaacacagaaaacaaaacaaaagaaaggacgaaagaaaaacaaaacaacccacagaggagacaaggaaagaaaaccaccagaacagaagcagacgagacaacaaagaagaggaaaaaagagaaaagaccggacgagaacacccgagcagatgacaaagactcaagagacaaagagagaaaaacaactaatgcaggggaaggagaaaggagaaaacaaaagagataaacgaacacagaaaaacaacaacggccgcagagaaaaagaacatacaagaaagaaactaagaaagagaagaatagacaagaaagacaagaaaacagaaagaaagaaacaaaatcgagacaacgaaaacacgaagaagcccgaaagaagaacaagaagcaagcgacagacaagccaagcagagc

SEQ ID NO: 308004 - DNA, 1219 bp, Homo sapiens
agctgagccatgtacttcaaacagaaggcagccaattactaacttctggttgctaggtgtggcttcctttaaaatcctataaaatcagaagcccaagtctccactgccagtgtgaaatcttcagagaagaatttctctttagttctttgcaagaaggtagagataaagacactttttcaaaaatggcaatggtatcagaattcctcaagcaggcctggtttattgaaaatgaagagcaggaatatgttcaaactgtgaagtcatccaaaggtggtcccggatcagcggtgagcccctatcctaccttcaatccatcctcggatgtcgctgccttgcataaggccataatggttaaaggtgtggatgaagcaaccatcattgacattctaactaagcgaaacaatgcacagcgtcaacagatcaaagcagcatatctccaggaaacaggaaagcccctggatgaaacactgaagaaagcccttacaggtcaccttgaggaggttgttttagctctgctaaaaactccagcgcaatttgatgctgatgaacttcgtgctgccatgaagggccttggaactgatgaagatactctaattgagattttggcatcaagaactaacaaagaaatcagagacattaacagggtctacagagaggaactgaagagagatctggccaaagacataacctcagacacatctggagattttcggaacgctttgctttctcttgctaagggtgaccgatctgaggactttggtgtgaatgaagacttggctgattcagatgccagggccttgtatgaagcaggagaaaggagaaaggggacagacgtaaacgtgttcaataccatccttaccaccagaagctatccacaacttcgcagaggtaacaataaatttctttttctggaatctgtttatggaagatgcaattttcttttttgatgacaaataagagaaagtaaaaacagaaccctttttcaatatcactcctgtatcaaacagatacagtgttcctgacccattgttatttgtcaatttgtccaattttgtacagccgctactttatcatatttaatacattttgtgacttgggcatgtggaacataattttgttattttcactgcttttactcccctaaaagatttggaatatgtgtgggaaaagacatgcataacagaacaaatgaaattagaatgaagaaaaacaaaaaaaa

SEQ ID NO: 308005 - DNA, 1010 bp, Homo sapiens
  misc_feature (899)..(899): n is a, c, g, or t
agctgagccatgtacttcaaacagaaggcagccaattactaacttctggttgctaggtgtggcttcctttaaaatcctataaaatcagaagcccaagtctccactgccagtgtgaaatcttcagagaagaatttctctttagttctttgcaagaaggtagagataaagacactttttcaaaaatggcaatggtatcagaattcctcaagcaggcctggtttattgaaaatgaagagcaggaatatgttcaaactgtgaagtcatccaaaggtggtcccggatcagcggtgagcccctatcctaccttcaatccatcctcggatgtcgctgccttgcataaggccataatggttaaaggtgtggatgaagcaaccatcattgacattctaactaagcgaaacaatgcacagcgtcaacagatcaaagcagcatatctccaggaaacaggaaagcccctggatgaaacactgaagaaagcccttacaggtcaccttgaggaggttgttttagctctgctaaaaactccagcgcaatttgatgctgatgaacttcgtgctgccatgaagggccttggaactgatgaagatactctaattgagattttggcatcaagaactaacaaagaaatcagagacattaacagggtctacagagaggaactgaagagagatctggccaaagacataacctcagacacatctggagattttcggaacgctttgctttctcttgctaagggtgaccgatctgaggactttggtgtgaatgaagacttggctgattcagatgccagggccttgtatgaagcaggagaaaggagaaaggggacagacgtaaacgtgttcaataccatccttaccaccagaagctatccacaacttcgcagcatgcctatgacntgggtatatacccagagcaacacaaacattctaccataaagacacatgcactcgaatatttgttgcgcctgttcacatagcaagacccccaaaggggtcctctggcgcccg

SEQ ID NO: 308006 - DNA, 1885 bp, Homo sapiens
agctgagccatgtacttcaaacagaaggcagccaattactaacttctggttgctaggtgtggcttcctttaaaatcctataaaatcagaagcccaagtctccactgccagtgtgaaatcttcagagaagaatttctctttagttctttgcaagaaggtagagataaagacactttttcaaaaatggcaatggtatcagaattcctcaagcaggcctggtttattgaaaatgaagagcaggaatatgttcaaactgtgaagtcatccaaaggtggtcccggatcagcggtgagcccctatcctaccttcaatccatcctcggatgtcgctgccttgcataaggccataatggttaaaggtgtggatgaagcaaccatcattgacattctaactaagcgaaacaatgcacagcgtcaacagatcaaagcagcatatctccaggaaacaggaaagcccctggatgaaacactgaagaaagcccttacaggtcaccttgaggaggttgttttagctctgggccttggaactgatgaagatactctaattgagattttggcatcaagaactaacaaagaaatcagagacattaacagggtctacagagaggaactgaagagagatctggccaaagacataacctcagacacatctggagattttcggaacgctttgctttctcttgctaagggtgaccgatctgaggactttggtgtgaatgaagacttggctgattcagatgccagggccttgtatgaagcaggagaaaggagaaaggggacagacgtaaacgtgttcaataccatccttaccaccagaagctatccacaacttcgcagagtgtttcagaaatacaccaagtacagtaagcatgacatgaacaaagttctggacctggagttgaaaggtgacattgagaaatgcctcacagctatcgtgaagtgcgccacaagcaaaccagctttctttgcagagaagcttcatcaagccatgaaaggtgttggaactcgccataaggcattgatcaggattatggtttcccgttctgaaattgacatgaatgatatcaaagcattctatcagaagatgtatggtatctccctttgccaagccatcctggatgaaaccaaaggagattatgagaaaatcctggtggctctttgtggaggaaactaaacattcccttgatggtctcaagctatgatcagaagactttaattatatattttcatcctataagcttaaataggaaagtttcttcaacaggattacagtgtagctacctacatgctgaaaaatatagcctttaaatcatttttatattataactctgtataatagagataagtccattttttaaaaatgttttccccaaaccataaaaccctatacaagttgttctagtaacaatacatgagaaagatgtctatgtagctgaaaataaaatgacgtcacaagacaaaacaccacacaacacaacgaaacacagaaaacaaaacaaaagaaaggacgaaagaaaaacaaaacaacccacagaggagacaaggaaagaaaaccaccagaacagaagcagacgagacaacaaagaagaggaaaaaagagaaaagaccggacgagaacacccgagcagatgacaaagactcaagagacaaagagagaaaaacaactaatgcaggggaaggagaaaggagaaaacaaaagagataaacgaacacagaaaaacaacaacggccgcagagaaaaagaacatacaagaaagaaactaagaaagagaagaatagacaagaaagacaagaaaacagaaagaaagaaacaaaatcgagacaacgaaaacacgaagaagcccgaaagaagaacaagaagcaagcgacagacaagccaagcagagc

SEQ ID NO: 308007 - DNA, 1299 bp, Homo sapiens
ccaggagccacaccaagagccccacgaagagccgcacgacgagcctcgcaaagtgccacacgaagagccgcaccaggaccacaccaagagcggctcatggggtgaccgatctgaggactttggtgtgaatgaagacttggctgattcagatgccagggccttgtatgaagcaggagaaaggagaaaggggacagacgtaaacgtgttcaataccatccttaccaccagaagctatccacaacttcgcagagtgtttcagaaatacaccaagtacagtaagcatgacatgaacaaagttctggacctggagttgaaaggtgacattgagaaatgcctcacagctatcgtgaagtgcgccacaagcaaaccagctttctttgcagagaagcttcatcaagccatgaaaggtgttggaactcgccataaggcattgatcaggattatggtttcccgttctgaaattgacatgaatgatatcaaagcattctatcagaagatgtatggtatctccctttgccaagccatcctggatgaaaccaaaggagattatgagaaaatcctggtggctctttgtggaggaaactaaacattcccttgatggtctcaagctatgatcagaagactttaattatatattttcatcctataagcttaaataggaaagtttcttcaacaggattacagtgtagctacctacatgctgaaaaatatagcctttaaatcatttttatattataactctgtataatagagataagtccattttttaaaaatgttttccccaaaccataaaaccctatacaagttgttctagtaacaatacatgagaaagatgtctatgtagctgaaaataaaatgacgtcacaagacaaaacaccacacaacacaacgaaacacagaaaacaaaacaaaagaaaggacgaaagaaaaacaaaacaacccacagaggagacaaggaaagaaaaccaccagaacagaagcagacgagacaacaaagaagaggaaaaaagagaaaagaccggacgagaacacccgagcagatgacaaagactcaagagacaaagagagaaaaacaactaatgcaggggaaggagaaaggagaaaacaaaagagataaacgaacacagaaaaacaacaacggccgcagagaaaaagaacatacaagaaagaaactaagaaagagaagaatagacaagaaagacaagaaaacagaaagaaagaaacaaaatcgagacaacgaaaacacgaagaagcccgaaagaagaacaagaagcaagcgacagacaagccaagcagagc

SEQ ID NO: 308008 - DNA, 1540 bp, Homo sapiens
agctgagccatgtacttcaaacagaaggcagccaattactaacttctggttgctaggtgtggcttcctttaaaatcctataaaatcagaagcccaagtctccactgccagtgtgaaatcttcagagaagaatttctctttagttctttgcaagaaggtagagataaagacactttttcaaaaatggcaatggtatcagaattcctcaagcaggcctggtttattggatcagcggtgagcccctatcctaccttcaatccatcctcggatgtcgctgccttgcataaggccataatggttaaaggtgtggatgaagcaaccatcattgacattctaactaagcgaaacaatgcacagcgtcaacagatcaaagcagcatatctccaggaaacaggaaaggccttgtatgaagcaggagaaaggagaaaggggacagacgtaaacgtgttcaataccatccttaccaccagaagctatccacaacttcgcagagtgtttcagaaatacaccaagtacagtaagcatgacatgaacaaagttctggacctggagttgaaaggtgacattgagaaatgcctcacagctatcgtgaagtgcgccacaagcaaaccagctttctttgcagagaagcttcatcaagccatgaaaggtgttggaactcgccataaggcattgatcaggattatggtttcccgttctgaaattgacatgaatgatatcaaagcattctatcagaagatgtatggtatctccctttgccaagccatcctggatgaaaccaaaggagattatgagaaaatcctggtggctctttgtggaggaaactaaacattcccttgatggtctcaagctatgatcagaagactttaattatatattttcatcctataagcttaaataggaaagtttcttcaacaggattacagtgtagctacctacatgctgaaaaatatagcctttaaatcatttttatattataactctgtataatagagataagtccattttttaaaaatgttttccccaaaccataaaaccctatacaagttgttctagtaacaatacatgagaaagatgtctatgtagctgaaaataaaatgacgtcacaagacaaaacaccacacaacacaacgaaacacagaaaacaaaacaaaagaaaggacgaaagaaaaacaaaacaacccacagaggagacaaggaaagaaaaccaccagaacagaagcagacgagacaacaaagaagaggaaaaaagagaaaagaccggacgagaacacccgagcagatgacaaagactcaagagacaaagagagaaaaacaactaatgcaggggaaggagaaaggagaaaacaaaagagataaacgaacacagaaaaacaacaacggccgcagagaaaaagaacatacaagaaagaaactaagaaagagaagaatagacaagaaagacaagaaaacagaaagaaagaaacaaaatcgagacaacgaaaacacgaagaagcccgaaagaagaacaagaagcaagcgacagacaagccaagcagagc

SEQ ID NO: 308009 - DNA, 1507 bp, Homo sapiens
gagtgcaagatttagctctgggcctcttggaagtgaaggcgatggaaaagttatgacaattaccaaagttcaccatcttataatagtatactgatttctactgttaaatgtaagagaaatttagtgcacaggtctttatataagggaagatccatttgctgtggctcttagaactgctgtaggaagtgctatagttgtcaatcacatgccgtttctaataactgtcaacatttgcaaacatttcgccaaaatatataggaataccaaaatggccaggtaagttacattcctaggagaggatgaagtattcacgttatgattaattgggtatattgctttaaaaggtgtagccaaagttgttattctaaaaaattctttgagtcagttgccttgattttgctaaagctttctaaagaaaaggatgttttgcatgtatcttagtttgaatttaatattcagtgtttcagaaatacaccaagtacagtaagcatgacatgaacaaagttctggacctggagttgaaaggtgacattgagaaatgcctcacagctatcgtgaagtgcgccacaagcaaaccagctttctttgcagagaagcttcatcaagccatgaaaggtgttggaactcgccataaggcattgatcaggattatggtttcccgttctgaaattgacatgaatgatatcaaagcattctatcagaagatgtatggtatctccctttgccaagccatcctggatgaaaccaaaggagattatgagaaaatcctggtggctctttgtggaggaaactaaacattcccttgatggtctcaagctatgatcagaagactttaattatatattttcatcctataagcttaaataggaaagtttcttcaacaggattacagtgtagctacctacatgctgaaaaatatagcctttaaatcatttttatattataactctgtataatagagataagtccattttttaaaaatgttttccccaaaccataaaaccctatacaagttgttctagtaacaatacatgagaaagatgtctatgtagctgaaaataaaatgacgtcacaagacaaaacaccacacaacacaacgaaacacagaaaacaaaacaaaagaaaggacgaaagaaaaacaaaacaacccacagaggagacaaggaaagaaaaccaccagaacagaagcagacgagacaacaaagaagaggaaaaaagagaaaagaccggacgagaacacccgagcagatgacaaagactcaagagacaaagagagaaaaacaactaatgcaggggaaggagaaaggagaaaacaaaagagataaacgaacacagaaaaacaacaacggccgcagagaaaaagaacatacaagaaagaaactaagaaagagaagaatagacaagaaagacaagaaaacagaaagaaagaaacaaaatcgagacaacgaaaacacgaagaagcccgaaagaagaacaagaagcaagcgacagacaagccaagcagagc

SEQ ID NO: 308010 - DNA, 1056 bp, Homo sapiens
  misc_feature (796)..(796): n is a, c, g, or t
agctgagccatgtacttcaaacagaaggcagccaattactaacttctggttgctaggtgtggcttcctttaaaatcctataaaatcagaagcccaagtctccactgccagtgtgaaatcttcagagaagaatttctctttagttctttgcaagaaggtagagataaagacactttttcaaaaatggcaatggtatcagaattcctcaagcaggcctggtttattgaaaatgaagagcaggaatatgttcaaactgtgaagtcatccaaaggtggtcccggatcagcggtgagcccctatcctaccttcaatccatcctcggatgtcgctgccttgcataaggccataatggttaaaggtgtggatgaagcaaccatcattgacattctaactaagcgaaacaatgcacagcgtcaacagatcaaagcagcatatctccaggaaacaggaaagcccctggatgaaacactgaagaaagcccttacaggtcaccttgaggaggttgttttagctctgctaaaaactccagcgcaatttgatgctgatgaacttcgtgctgccatgaagggccttggaactgatgaagatactctaattgagattttggcatcaagaactaacaaagaaatcagagacattaacagggtctacagagaggaactgaagagagatctggccaaagacataacctcagacacatctggagattttcggaacgctttgctttctcttgctaagggtgaccgatctgaggactttggtgtgaatgaagacttggctgattcagatgccaggcnttgtatgaagcaaaagaaagttgctgaggaaaagagtgaaaggaagactgaaaaatcacctcagaatgatgccaaagaaaaagtagctcttggatcctgacgggggcagatgatcctgaagggggcagatctttctacttttatgacaagagccatgtttcttgtccaattctctatggaattctctttatttgaatcattgctttaaaaaatattgtctccaaattgatgttgtattaaagttgtctaagttgttgaac

SEQ ID NO: 308011 - DNA, 1500 bp, Homo sapiens
agctgagccatgtacttcaaacagaaggcagccaattactaacttctggttgctaggtgtggcttcctttaaaatcctataaaatcagaagcccaagtctccactgccagtgtgaaatcttcagagaagaatttctctttagttctttgcaagaaggtagagataaagacactttttcaaaaatggcaatggtatcagaattcctcaagcaggcctggtttattgaaaatgaagagcaggaatatgttcaaactgtgaagtcatccaaaggtggtcccggatcagcggtgagcccctatcctaccttcaatccatcctcggatgtcgctgccttgcataaggccataatggttaaaggtgtggatgaagcaaccatcattgacattctaactaagcgaaacaatgcacagcgtcaacagatcaaagcagcatatctccaggaaacaggaaagcccctggatgaaacactgaagaaagcccttacaggtcaccttgaggaggttgttttagctctgctaaaaactccagcgcaatttgatgctgatgaacttcgtgctgccatgaagggccttggaactgatgaagatactctaattgagattttggcatcaagaactaacaaagaaatcagagacattaacagggtctacagagaggaactgaagagagatctggccaaagacataacctcagacacatctggagattttcggaacgctttgctttctcttgctaagggtgaccgatctgaggactttggtgtgaatgaagacttggctgattcagatgccagggtaaggaagtgcttacaaaatactgctgcagttcatcttcctaccttaagtggggctaccacatgatcccctgtgaaagcaaatctaagatcttctgagagaccaatggcttcttaatgttcatttcctgaatgaccatgtctttctgtagcccccacacacaaaaaagtagtctttgtaagttttcaatatctctcattattcgtaaaaccagagagaactgaagaaggacaatacaaatttgatttgtcattcccaagaattgtttgttaaaaaaaactctgacctttcgttgtactaggtataagaaggggaaatgtaatttttttattatgtgcaatggaaagagtaagcatatttaacgttatttttaacagagaactttggaatggtttatagatgtcaatttatattgtcaaaatattactgcaatgatataacaagagtataggataaattataataatatatgctttctaacatattgttttatttagtttcagtgacattgctgattatttatatgccaaaccactggcaacataagaaaaatcatatcattttaaagcctggaatttccatttctagagaattcattacagtgcttcactaaggatagagatttctttgtgcacccccatccacttctgctataccagtacattatcatgtacataataggcactcatgaactttttgttcaaca

SEQ ID NO: 308012 - DNA, 828 bp, Homo sapiens
  misc_feature (796)..(796): n is a, c, g, or t
  misc_feature (804)..(804): n is a, c, g, or t
agctgagccatgtacttcaaacagaaggcagccaattactaacttctggttgctaggtgtggcttcctttaaaatcctataaaatcagaagcccaagtctccactgccagtgtgaaatcttcagagaagaatttctctttagttctttgcaagaaggtagagataaagacactttttcaaaaatggcaatggtatcagaattcctcaagcaggcctggtttattgaaaatgaagagcaggaatatgttcaaactgtgaagtcatccaaaggtggtcccggatcagcggtgagcccctatcctaccttcaatccatcctcggatgtcgctgccttgcataaggccataatggttaaaggtgtggatgaagcaaccatcattgacattctaactaagcgaaacaatgcacagcgtcaacagatcaaagcagcatatctccaggaaacaggaaagcccctggatgaaacactgaagaaagcccttacaggtcaccttgaggaggttgttttagctctgctaaaaactccagcgcaatttgatgctgatgaacttcgtgctgccatgaagggccttggaactgatgaagatactctaattgagattttggcatcaagaactaacaaagaaatcagagacattaacagggtctacagagaggaactgaagagagatctggccaaagacataacctcagacacatctggagattttcggaacgctttgctttctcttgctaagggtgaccgatctgaggactttggtgtgaatgaagacttggctgattcagatgccaggcntgtatgangcagcagtgtcaaggcagtgttct

SEQ ID NO: 308013 - DNA, 4068 bp, Homo sapiens
agctgagccatgtacttcaaacagaaggcagccaattactaacttctggttgctaggtgtggcttcctttaaaatcctataaaatcagaagcccaagtctccactgccagtgtgaaatcttcagagaagaatttctctttagttctttgcaagaaggtagagataaaggtaagtcttggttttccttttagttagttttggttgttttgaaaacttttctcatcactatgttaaatgttactgcttctacaggatttatggttagttgcatttaacatgataagtcattcataaatctttctgtagaattacattggatatttatattttaggaatcacaaattacaatatttttgttctacttagttaacaaatacaagtaaaaataagataagtttgcttaatactggctcattgtactcttggtaagttaccatgagaaagaagggaagaatgtgctttccctctggtagccttaaaagaatgtgtttttcctttccttccccttgaaatatttcttcccaagagctgtgtgttttacagagaaatcgtgatgggggctgctttttgggggcaagaacaaaagtgataggagtgggctgcagggaactgtttcaaaatagtaggactttcataatttattttcttcttttgtaaggaaaacaagatagattcagacctcaaagtgctaatcatgctctttgtaataaacatttaaaaatatatgttatatttgcttatgctatttttccttttcttgtaggctctgtgtcatatacagtcttttcaagtgctggctggaaaacctaaaaagaagggaaatactttctgggtagtgtcagatacattatcctaggggaatgtcagtgaggccctccaacagctattccacttgattgttgcatgagctaatggccataaaactccttagaaaagcacaaagcaaaactaaagaagagtatttactagtgttggatatatttgtaaaagtgagattacaaatcatgtatctggctatttttttcttaaacatgttccttcaagaatttttctgttcgttcattttaaatatttattaaatgttctgatttcttatgttcactgctagctaattaacaaggatggaatttttcttgccttggttatatctaaaagattgtaaaaactttgagaaagcaatgttgccctctttccacaggagtattttggtagctgtaagagaatgcacattgcaaatgactcaaatgtggtaaaatgttggtttcataattctgaaatggcctcttccccaaaagtgacagtaacaccctagctccaggctcaaccacatccagcacatagccaacatttaacagatgttgacaaaatagttaataataatattattaaggaaccagccagagtttcatgcttattaaatactttttcaaccagaaggtctgcaaaggttgatttctgaatatgacgttagctctctctagacctattaatttacgacatttcaaatcagaggtaaaccagcagacctattatttttcaatgataaactataaacagttttttgaagtcaactatttccttttcctttaaaattggacagaatttcatcaggaagctcagaacaatccaatttatataatgccttccttcattatgctaattttcttcatcttcatctacttgaagtaatatttaagattggcacttcagagctgtaaatggatcttagatgataattacttcaacattcttattttataaacgaagaccctctggagaagctaaatgtttttcttgaggtcagatcgccagataatcaagaaccagtatacttcaatttgtattttatatcctatagttgtgggtagaaaatgttcattaaattagtgtagatatgttttttaaaatattagcaatgatacatgatattcattcaataatacttattaacatcctaaattccaggcattttgctagggattggaagtacatacataatgaatattattatttgtatgttagcacgggcctcatggcctgctcctggggaatataaacaagccaatggaaagtgataatacagaaaggtggggctggtgtaggggtgaagtcaggatgctttgggagagcatggaaggtcaccgaatccagtgctgaggaactaatgaagggtttctgaagaacgtgatgagatcaatgctgatgagtcacttagaagtagcaattagttaggcaaagggaagtgaatgtggaggaggaacaagcattccaggcaagaagaacaccctatcgaaaagcctggaagcaaaacattagtgaggctacctttcataaattgctttctgtaagtcatgccattgtgtagtcttaattgctttctctcaccagggaaggtgtgggaaggacttgtgaaatacatattcgaggaaaaactatgcacaaggccgtgcatttaaaaataaactccctaaggctggggtgaaacctgctacggtctgcgcaagttgactgttaatgaatttgattctcaggtgtgagtgattaaaagaacactgatcatgtcattttctttttggtcactaattccctccctcccttctctttcttttcttttttcttttcttttctttttctttctttcttcccgacagagtcttgttatgtcgcccaggatggagtgtagtggtacaatctcggctcactgcagcctccgcctcttcctgggttcaagtgattctcctgcctcagccttctgagtagatgggactacagacactttttcaaaaatggcaatggtatcagaattcctcaagcaggcctggtttattgaaaatgaagagcaggaatatgttcaaactgtgaagtcatccaaaggtggtcccggatcagcggtgagcccctatcctaccttcaatccatcctcggatgtcgctgccttgcataaggccataatggttaaaggtgtggatgaagcaaccatcattgacattctaactaagcgaaacaatgcacagcgtcaacagatcaaagcagcatatctccaggaaacaggaaagcccctggatgaaacaggaaagcccctggatgaaacattgagaaatgcctcacagctatcgtgaagtgcgccacaagcaaaccagctttctttgcagagaagcttcatcaagccatgaaaggtgttggaactcgccataaggcattgatcaggattatggtttcccgttctgaaattgacatgaatgatatcaaagcattctatcagaagatgtatggtatctccctttgccaagccatcctggatgaaaccaaaggagattatgagaaaatcctggtggctctttgtggaggaaactaaacattcccttgatggtctcaagctatgatcagaagactttaattatatattttcatcctataagcttaaataggaaagtttcttcaacaggattacagtgtagctacctacatgctgaaaaatatagcctttaaatcatttttatattataactctgtataatagagataagtccattttttaaaaatgttttccccaaaccataaaaccctatacaagttgttctagtaacaatacatgagaaagatgtctatgtagctgaaaataaaatgacgtcacaagacaaaacaccacacaacacaacgaaacacagaaaacaaaacaaaagaaaggacgaaagaaaaacaaaacaacccacagaggagacaaggaaagaaaaccaccagaacagaagcagacgagacaacaaagaagaggaaaaaagagaaaagaccggacgagaacacccgagcagatgacaaagactcaagagacaaagagagaaaaacaactaatgcaggggaaggagaaaggagaaaacaaaagagataaacgaacacagaaaaacaacaacggccgcagagaaaaagaacatacaagaaagaaactaagaaagagaagaatagacaagaaagacaagaaaacagaaagaaagaaacaaaatcgagacaacgaaaacacgaagaagcccgaaagaagaacaagaagcaagcgacagacaagccaagcagagc

SEQ ID NO: 308014 - DNA, 4244 bp, Homo sapiens
agctgagccatgtacttcaaacagaaggcagccaattactaacttctggttgctaggtgtggcttcctttaaaatcctataaaatcagaagcccaagtctccactgccagtgtgaaatcttcagagaagaatttctctttagttctttgcaagaaggtagagataaaggtaagtcttggttttccttttagttagttttggttgttttgaaaacttttctcatcactatgttaaatgttactgcttctacaggatttatggttagttgcatttaacatgataagtcattcataaatctttctgtagaattacattggatatttatattttaggaatcacaaattacaatatttttgttctacttagttaacaaatacaagtaaaaataagataagtttgcttaatactggctcattgtactcttggtaagttaccatgagaaagaagggaagaatgtgctttccctctggtagccttaaaagaatgtgtttttcctttccttccccttgaaatatttcttcccaagagctgtgtgttttacagagaaatcgtgatgggggctgctttttgggggcaagaacaaaagtgataggagtgggctgcagggaactgtttcaaaatagtaggactttcataatttattttcttcttttgtaaggaaaacaagatagattcagacctcaaagtgctaatcatgctctttgtaataaacatttaaaaatatatgttatatttgcttatgctatttttccttttcttgtaggctctgtgtcatatacagtcttttcaagtgctggctggaaaacctaaaaagaagggaaatactttctgggtagtgtcagatacattatcctaggggaatgtcagtgaggccctccaacagctattccacttgattgttgcatgagctaatggccataaaactccttagaaaagcacaaagcaaaactaaagaagagtatttactagtgttggatatatttgtaaaagtgagattacaaatcatgtatctggctatttttttcttaaacatgttccttcaagaatttttctgttcgttcattttaaatatttattaaatgttctgatttcttatgttcactgctagctaattaacaaggatggaatttttcttgccttggttatatctaaaagattgtaaaaactttgagaaagcaatgttgccctctttccacaggagtattttggtagctgtaagagaatgcacattgcaaatgactcaaatgtggtaaaatgttggtttcataattctgaaatggcctcttccccaaaagtgacagtaacaccctagctccaggctcaaccacatccagcacatagccaacatttaacagatgttgacaaaatagttaataataatattattaaggaaccagccagagtttcatgcttattaaatactttttcaaccagaaggtctgcaaaggttgatttctgaatatgacgttagctctctctagacctattaatttacgacatttcaaatcagaggtaaaccagcagacctattatttttcaatgataaactataaacagttttttgaagtcaactatttccttttcctttaaaattggacagaatttcatcaggaagctcagaacaatccaatttatataatgccttccttcattatgctaattttcttcatcttcatctacttgaagtaatatttaagattggcacttcagagctgtaaatggatcttagatgataattacttcaacattcttattttataaacgaagaccctctggagaagctaaatgtttttcttgaggtcagatcgccagataatcaagaaccagtatacttcaatttgtattttatatcctatagttgtgggtagaaaatgttcattaaattagtgtagatatgttttttaaaatattagcaatgatacatgatattcattcaataatacttattaacatcctaaattccaggcattttgctagggattggaagtacatacataatgaatattattatttgtatgttagcacgggcctcatggcctgctcctggggaatataaacaagccaatggaaagtgataatacagaaaggtggggctggtgtaggggtgaagtcaggatgctttgggagagcatggaaggtcaccgaatccagtgctgaggaactaatgaagggtttctgaagaacgtgatgagatcaatgctgatgagtcacttagaagtagcaattagttaggcaaagggaagtgaatgtggaggaggaacaagcattccaggcaagaagaacaccctatcgaaaagcctggaagcaaaacattagtgaggctacctttcataaattgctttctgtaagtcatgccattgtgtagtcttaattgctttctctcaccagggaaggtgtgggaaggacttgtgaaatacatattcgaggaaaaactatgcacaaggccgtgcatttaaaaataaactccctaaggctggggtgaaacctgctacggtctgcgcaagttgactgttaatgaatttgattctcaggtgtgagtgattaaaagaacactgatcatgtcattttctttttggtcactaattccctccctcccttctctttcttttcttttttcttttcttttctttttctttctttcttcccgacagagtcttgttatgtcgcccaggatggagtgtagtggtacaatctcggctcactgcagcctccgcctcttcctgggttcaagtgattctcctgcctcagccttctgagtagatgggactacagacactttttcaaaaatggcaatggtatcagaattcctcaagcaggcctggtttattgaaaatgaagagcaggaatatgttcaaactgtgaagtcatccaaaggtggtcccggatcagcggtgagcccctatcctaccttcaatccatcctcggatgtcgctgccttgcataaggccataatggttaaaggtgtggatgaagcaaccatcattgacattctaactaagcgaaacaatgcacagcgtcaacagatcaaagcagcatatctccaggaaacaggaaagcccctggatgaaacaggaaagcccctggatgaaacattgagaaatgcctcacagctatcgtgaagtgcgccacaagcaaaccagctttctttgcagagaagcttcatcaagccatgaaaggtgttggaactcgccataaggcattgatcaggattatggtttcccgttctgaaattgacatgaatgatatcaaagcattctatcagaagatgtatggtatctccctttgccaagccatcctggatgaaaccaaaggagattatgagaaaatcctggtggctctttgtggaggaaactaaacattcccttgatggtctcaagctatgatcagaagactttaattatatattttcatcctataagcttaaataggaaagtttcttcaacaggattacagtgtagctacctacatgctgaaaaatatagcctttaaatcatttttatattataactctgtataatagagataagtccattttttaaaaatgttttccccaaaccataaaaccctatacaagttgttctagtaacaatacatgagaaagatgtctatgtagctgaaaataaaatgacgtcacaagacaaaaaaaaaaaaaaaaaaaaaaaaaaaaaaaaaaaaaaaaaaaaaaaaaaaaaaaaaaaaaaacaaaaaaaaaaaaaaaaagagaagggggggggcgggcgagatttctttctcgccgggggggcggctacaatgagcgccaaccagaacgtctatgatgagaaaaaggggcagcaccaataatagagagaaaataaatatagacaagcgaagcagggacagcaaaaaaaaaacagagagaagagaggaaacaacagccaccagagagagacatatgaaggagaaaagaaacaccacatatatcaggaggggggggcgcacacaataatcaggacggaggggaaaaaaacacacgagtagaaggagagataaatatataaagtaacatgcgaatggggagtaaagaaataaataataataatagattaatgagaagataagaggatatattattaagaggtggattacacacacaaaacaacggaacgttgtagtaacattgtaggttgtggagcaatctagaagaaagaaactatgttgcgcagcgcacatgagaaggagaatgaatttaattaaataaagagaaattttttataatagcgggg

SEQ ID NO: 308015 - DNA, 2910 bp, Homo sapiens
gggtgttctgcactcaggcagtgagcatagtacccaataagtagttttttgaccaatgccccttctctccctgccctctctagtagtctgcagtgtctgttgttcatagggtgttctttttaaatgttcttatagtaacataaataaagtatttacataggcttgaacacctagtggcttctccactcccaaggagaatatatgttggatagcgcaaactactgaagttgctcttgagatgtatttaaggtaataaaaaaattgatcgtcagggaaaagaatattcaaaaccaccatctagagagtcacaaataccttctcagaagttaactgccctatattgggagatgagaggtgaagaatgatgatgagggatagaacactgttggcaaaattctatatttcctgtttctttcatatggatatttcatttttttcatggtaaatacatcaactaaaattttcttctctaacagtgaagtgcgccacaagcaaaccagctttctttgcagagaagcttcatcaagccatgaaagtatgtaccattctacttatatgtcctgcttagaggaagaattatttgtagaaagaacagaaaacctcatgttgtttgaaaatctcacatttaatatcttcccattaatgagaatcattgttctatttgatgaaagaggtaatacactaccttctcagaataaacttctgttagattcggtgcctttttttacagatgagattgtaaagtgagcctgtaagtgatttacggctcacttgtgatttgcttaaaacatgtgtcaccacgggaagggtgatgtactttcttttttaacgtgtaattttagtggcctacttcctctaaggttgtgagttttataatctcccactttatgagtctgatttgttgtttttattattctgtcttttatgccacagattaatagttgaaacttttgaaatgtcattctatgattaaggatgtagaatgatgtatttgagatcaactatgtcactttaactttactgtctgacatgcatggtattatacaaggtacctcttctattctgacattttgagcccacaaatgaatagttatgaaattatcttccttttttctttgcagctccaaaataaggaggttttcagagagagagagaaagaaagatctaactatttgaataatatgaaggaatattttgaatatatatgaataatttgaataatatgaaatgatagacatgctaggtactgctctgtagtggttagcatagttgctgccccctttctgccatagtctagtgtgatatttcgttgggtaatgatgaatacctggtgccatggaagagaaaagtgggacatatactccagactttggaaatccaggtagcattgctgtcagctaaattaacacctgaagtttaaatagaaatgagccagatgagggcaagagtggaagagatggggataaagcaagggtggtccaagaggaagaagtaacccacacacaggcttgaaggcaaaaggtaacataaccttctcaagacagtaagtatagagtgatggtgcacactggaagagatggtagaattaggcaggatattgtaagccttgaaaaagaattaggcaggatatcggaagccctgattagattctatcctaagagcaacagaagatcactgacagtgttttaaatagatagactagtttattagatttgcagtttagaagttccctttttttgtaattattggacagtgtagagaccggatggtgagagatgagttaggaagttgtgacagctctctatacctaccgctaatgtagaggattatttattttcatttcattaccattcgtgtaaggtgtgtgtgtgtgtgtgtgtgtgtgtgtgtgtgtgtgtatagctagtttctctatagaaattatatggaagagtaagaaggcttcactttaaaattcatgtttttaatgagagtattttctgaatatgagacacttaccctcatttattttggccagggtgttggaactcgccataaggcattgatcaggattatggtttcccgttctgaaattgacatgaatgatatcaaagcattctatcagaagatgtatggtatctccctttgccaagccatcctggatgaaaccaaaggagattatgagaaaatcctggtggctctttgtggaggaaactaaacattcccttgatggtctcaagctatgatcagaagactttaattatatattttcatcctataagcttaaataggaaagtttcttcaacaggattacagtgtagctacctacatgctgaaaaatatagcctttaaatcatttttatattataactctgtataatagagataagtccattttttaaaaatgttttccccaaaccataaaaccctatacaagttgttctagtaacaatacatgagaaagatgtctatgtagctgaaaataaaatgacgtcacaagacaaaacaccacacaacacaacgaaacacagaaaacaaaacaaaagaaaggacgaaagaaaaacaaaacaacccacagaggagacaaggaaagaaaaccaccagaacagaagcagacgagacaacaaagaagaggaaaaaagagaaaagaccggacgagaacacccgagcagatgacaaagactcaagagacaaagagagaaaaacaactaatgcaggggaaggagaaaggagaaaacaaaagagataaacgaacacagaaaaacaacaacggccgcagagaaaaagaacatacaagaaagaaactaagaaagagaagaatagacaagaaagacaagaaaacagaaagaaagaaacaaaatcgagacaacgaaaacacgaagaagcccgaaagaagaacaagaagcaagcgacagacaagccaagcagagc

SEQ ID NO: 308016 - DNA, 1116 bp, Homo sapiens
  misc_feature (4)..(4): n is a, c, g, or t
  misc_feature (16)..(16): n is a, c, g, or t
  misc_feature (28)..(29): n is a, c, g, or t
  misc_feature (37)..(37): n is a, c, g, or t
  misc_feature (50)..(50): n is a, c, g, or t
  misc_feature (55)..(55): n is a, c, g, or t
  misc_feature (58)..(58): n is a, c, g, or t
  misc_feature (69)..(69): n is a, c, g, or t
  misc_feature (100)..(100): n is a, c, g, or t
  misc_feature (112)..(112): n is a, c, g, or t
  misc_feature (122)..(122): n is a, c, g, or t
gcgngagaaagggganaggcacagcagnnacagcgcncacaccaccttcnccacnagncgcaccccacnactcccgcagcggttcgcgacaccccccccngccccgtgcgcntcgacagaanagtctggcctggagtgaaagtgacatgacacaccctccacagcttcgtgagcgcgccacagcaaaccagctttctgccagagaagctcatcacgcccatgaggtgttggaactcgccataaggcattgatcaggattatggtttcccgttctgaaattgacatgaatgatatcaaagcattctatcagaagatgtatggtatctccctttgccaagccatcctggatgaaaccaaaggagattatgagaaaatcctggtggctctttgtggaggaaactaaacattcccttgatggtctcaagctatgatcagaagactttaattatatattttcatcctataagcttaaataggaaagtttcttcaacaggattacagtgtagctacctacatgctgaaaaatatagcctttaaatcatttttatattataactctgtataatagagataagtccattttttaaaaatgttttccccaaaccataaaaccctatacaagttgttctagtaacaatacatgagaaagatgtctatgtagctgaaaataaaatgacgtcacaagacaaaacaccacacaacacaacgaaacacagaaaacaaaacaaaagaaaggacgaaagaaaaacaaaacaacccacagaggagacaaggaaagaaaaccaccagaacagaagcagacgagacaacaaagaagaggaaaaaagagaaaagaccggacgagaacacccgagcagatgacaaagactcaagagacaaagagagaaaaacaactaatgcaggggaaggagaaaggagaaaacaaaagagataaacgaacacagaaaaacaacaacggccgcagagaaaaagaacatacaagaaagaaactaagaaagagaagaatagacaagaaagacaagaaaacagaaagaaagaaacaaaatcgagacaacgaaaacacgaagaagcccgaaagaagaacaagaagcaagcgacagacaagccaagcagagc

SEQ ID NO: 308017 - DNA, 1064 bp, Homo sapiens
agctgagccatgtacttcaaacagaaggcagccaattactaacttctggttgctaggtgtggcttcctttaaaatcctataaaatcagaagcccaagtctccactgccagtgtgaaatcttcagagaagaatttctctttagttctttgcaagaaggtagagataaagacactttttcaaaaatggcaatggtatcagaattcctcaagcaggcctggtttattgaaaatgaagagcaggaatatgttcaaactgtgaagtcatccaaaggtggtcccggatcagcggtgagcccctatcctaccttcaatccatcctcggatgtcgctgccttgcataaggccataatggttaaaggtgtggatgaagcaaccatcattgacattctaactaagcgaaacaatgcacagcgtcaacagatcaaagcagcatatctccaggaaacaggaaagcccctggatgaaacactgaagaaagcccttacaggtcaccttgaggaggttgttttagctctgctaaaaactccagcgcaatttgatgctgatgaacttcgtgctgccatgaagggccttggaactgatgaagatactctaattgagattttggcatcaagaactaacaaagaaatcagagacattaacagggtctacagagaggaactgaagagagatctggccaaagacataacctcagacacatctggagattttcggaacgctttgctttctcttgctaaggtacaactcagatactttaggaaatgcctcttgttttataaagactaatttcttagtccattttgtgttgctataagggaatatctgaggctaggtaatttttaaagataaaaaggtttatttggctcaggattctgatggctaacaaattcaagtttgggtatctatgtctggtgagagcctcaggctgcttccactcctgacagaagaggaaagggagctggtgtgtgcagagaccacatggcaagaaaggaagcaagagagagaatggggaggtgccagcctcgttaacaaccagctctcgtggttctcatgagcaagaactca

SEQ ID NO: 308018 - DNA, 830 bp, Homo sapiens
  misc_feature (753)..(753): n is a, c, g, or t
agctgagccatgtacttcaaacagaaggcagccaattactaacttctggttgctaggtgtggcttcctttaaaatcctataaaatcagaagcccaagtctccactgccagtgtgaaatcttcagagaagaatttctctttagttctttgcaagaaggtagagataaagacactttttcaaaaatggcaatggtatcagaattcctcaagcaggcctggtttattgaaaatgaagagcaggaatatgttcaaactgtgaagtcatccaaaggtggtcccggatcagcggtgagcccctatcctaccttcaatccatcctcggatgtcgctgccttgcataaggccataatggttaaaggtgtggatgaagcaaccatcattgacattctaactaagcgaaacaatgcacagcgtcaacagatcaaagcagcatatctccaggaaacaggaaagcccctggatgaaacactgaagaaagcccttacaggtcaccttgaggaggttgttttagctctgctaaaaactccagcgcaatttgatgctgatgaacttcgtgctgccatgaagggccttggaactgatgaagatactctaattgagattttggcatcaagaactaacaaagaaatcagagacattaacagggtctacagagaggaactgaagagagatctggccaaagacataacctcagacactttgcatccagagacactttgcatccagagacactttgcatccagagacactttgnatccagagacactttgcatccagagacactttgcatccagaggacactttgcatccagaggggatcctctaggctcg

SEQ ID NO: 308019 - DNA, 717 bp, Homo sapiens
  misc_feature (640)..(640): n is a, c, g, or t
agctgagccatgtacttcaaacagaaggcagccaattactaacttctggttgctaggtgtggcttcctttaaaatcctataaaatcagaagcccaagtctccactgccagtgtgaaatcttcagagaagaatttctctttagttctttgcaagaaggtagagataaagacactttttcaaaaatggcaatggtatcagaattcctcaagcaggcctggtttattgaaaatgaagagcaggaatatgttcaaactgtgaagtcatccaaaggtggtcccggatcagcggtgagcccctatcctaccttcaatccatcctcggatgtcgctgccttgcataaggccataatggttaaaggtgtggatgaagcaaccatcattgacattctaactaagcgaaacaatgcacagcgtcaacagatcaaagcagcatatctccaggaaacaggaaagcccctggatgaaacactgaagaaagcccttacaggtcaccttgaggaggttgttttagctctgctaaaaactccagcgcaatttgatgctgatgaacttcgtgctgccatgaagggccttggaactgatgaagatactctaattgagattttggcatcaagaactaacaaagaaatcagagactttgnatccagagacactttgcatccagagacactttgcatccagaggacactttgcatccagaggggatcctctaggctcg

SEQ ID NO: 308020 - DNA, 3668 bp, Homo sapiens
agctgagccatgtacttcaaacagaaggcagccaattactaacttctggttgctaggtgtggcttcctttaaaatcctataaaatcagaagcccaagtctccactgccagtgtgaaatcttcagagaagaatttctctttagttctttgcaagaaggtagagataaaggtaagtcttggttttccttttagttagttttggttgttttgaaaacttttctcatcactatgttaaatgttactgcttctacaggatttatggttagttgcatttaacatgataagtcattcataaatctttctgtagaattacattggatatttatattttaggaatcacaaattacaatatttttgttctacttagttaacaaatacaagtaaaaataagataagtttgcttaatactggctcattgtactcttggtaagttaccatgagaaagaagggaagaatgtgctttccctctggtagccttaaaagaatgtgtttttcctttccttccccttgaaatatttcttcccaagagctgtgtgttttacagagaaatcgtgatgggggctgctttttgggggcaagaacaaaagtgataggagtgggctgcagggaactgtttcaaaatagtaggactttcataatttattttcttcttttgtaaggaaaacaagatagattcagacctcaaagtgctaatcatgctctttgtaataaacatttaaaaatatatgttatatttgcttatgctatttttccttttcttgtaggctctgtgtcatatacagtcttttcaagtgctggctggaaaacctaaaaagaagggaaatactttctgggtagtgtcagatacattatcctaggggaatgtcagtgaggccctccaacagctattccacttgattgttgcatgagctaatggccataaaactccttagaaaagcacaaagcaaaactaaagaagagtatttactagtgttggatatatttgtaaaagtgagattacaaatcatgtatctggctatttttttcttaaacatgttccttcaagaatttttctgttcgttcattttaaatatttattaaatgttctgatttcttatgttcactgctagctaattaacaaggatggaatttttcttgccttggttatatctaaaagattgtaaaaactttgagaaagcaatgttgccctctttccacaggagtattttggtagctgtaagagaatgcacattgcaaatgactcaaatgtggtaaaatgttggtttcataattctgaaatggcctcttccccaaaagtgacagtaacaccctagctccaggctcaaccacatccagcacatagccaacatttaacagatgttgacaaaatagttaataataatattattaaggaaccagccagagtttcatgcttattaaatactttttcaaccagaaggtctgcaaaggttgatttctgaatatgacgttagctctctctagacctattaatttacgacatttcaaatcagaggtaaaccagcagacctattatttttcaatgataaactataaacagttttttgaagtcaactatttccttttcctttaaaattggacagaatttcatcaggaagctcagaacaatccaatttatataatgccttccttcattatgctaattttcttcatcttcatctacttgaagtaatatttaagattggcacttcagagctgtaaatggatcttagatgataattacttcaacattcttattttataaacgaagaccctctggagaagctaaatgtttttcttgaggtcagatcgccagataatcaagaaccagtatacttcaatttgtattttatatcctatagttgtgggtagaaaatgttcattaaattagtgtagatatgttttttaaaatattagcaatgatacatgatattcattcaataatacttattaacatcctaaattccaggcattttgctagggattggaagtacatacataatgaatattattatttgtatgttagcacgggcctcatggcctgctcctggggaatataaacaagccaatggaaagtgataatacagaaaggtggggctggtgtaggggtgaagtcaggatgctttgggagagcatggaaggtcaccgaatccagtgctgaggaactaatgaagggtttctgaagaacgtgatgagatcaatgctgatgagtcacttagaagtagcaattagttaggcaaagggaagtgaatgtggaggaggaacaagcattccaggcaagaagaacaccctatcgaaaagcctggaagcaaaacattagtgaggctacctttcataaattgctttctgtaagtcatgccattgtgtagtcttaattgctttctctcaccagggaaggtgtgggaaggacttgtgaaatacatattcgaggaaaaactatgcacaaggccgtgcatttaaaaataaactccctaaggctggggtgaaacctgctacggtctgcgcaagttgactgttaatgaatttgattctcaggtgtgagtgattaaaagaacactgatcatgtcattttctttttggtcactaattccctccctcccttctctttcttttcttttttcttttcttttctttttctttctttcttcccgacagagtcttgttatgtcgcccaggatggagtgtagtggtacaatctcggctcactgcagcctccgcctcttcctgggttcaagtgattctcctgcctcagccttctgagtagatgggactacagacactttttcaaaaatggcaatggtatcagaattcctcaagcaggcctggtttattgaaaatgaagagcaggaatatgttcaaactgtgaagtcatccaaaggtggtcccggatcagcggtgagcccctatcctaccttcaatccatcctcggatgtcgctgccttgcataaggccataatggttaaaggtgtggatgaagcaaccatcattgacattctaactaagcgaaacaatgcacagcgtcaacagatcaaagcagcatatctccaggaaacaggaaagcccctggatgaaacactgaagaaagcccttacaggtcaccttgaggaggttgttttagctctgctaaaaactccagcgcaatttgatgctgatgaacttcgtgctgccatgaagggccttggaactgatgaagatactctaattgagattttggcatcaagaactaacaaagaaatcagagacattaacagggtctacagagaggaactgaagagagatctggccaaagacataacctcagacacatctggagattttcggaacgctttgctttctcttgctaaggtacaactcagatactttaggaaatgcctcttgttttataaagactaatttcttagtccattttgtgttgctataagggaatatctgaggctaggtaatttttaaagataaaaaggtttatttggctcaggattctgatggctaacaaattcaagtttgggtatctatgtctggtgagagcctcaggctgcttccactcctgacagaagaggaaagggagctggtgtgtgcagagaccacatggcaagaaaggaagcaagagagagaatggggaggtgccagcctcgttaacaaccagctctcgtggttctcatgagcaagaactca

SEQ ID NO: 308021 - DNA, 1131 bp, Homo sapiens
tacaggcactatacatttctcttcttctggtgagtgaatcaggtatctcctcacataagatatgagattatattgtgttatacttatttaattttgtgtgatatttcattcatagaaaataatggcactaatataaaacataattaattcagaaaagtttgtaatctcagtcttgaaggctattgcttttttatgcaatgataaaaaatcagttatctgttgtatatattgtttaattaagtgaatggtaatgtgtaatctcatctacagctaagtctaaaaataattcttctataagtaaaaaaaaatagagaattatggtttcgactaacattaagtatacctttttttgaatcaacaggatgaaaccaaaggagattatgagaaaatcctggtggctctttgtggaggaaactaaacattcccttgatggtctcaagctatgatcagaagactttaattatatattttcatcctataagcttaaataggaaagtttcttcaacaggattacagtgtagctacctacatgctgaaaaatatagcctttaaatcatttttatattataactctgtataatagagataagtccattttttaaaaatgttttccccaaaccataaaaccctatacaagttgttctagtaacaatacatgagaaagatgtctatgtagctgaaaataaaatgacgtcacaagacaaaacaccacacaacacaacgaaacacagaaaacaaaacaaaagaaaggacgaaagaaaaacaaaacaacccacagaggagacaaggaaagaaaaccaccagaacagaagcagacgagacaacaaagaagaggaaaaaagagaaaagaccggacgagaacacccgagcagatgacaaagactcaagagacaaagagagaaaaacaactaatgcaggggaaggagaaaggagaaaacaaaagagataaacgaacacagaaaaacaacaacggccgcagagaaaaagaacatacaagaaagaaactaagaaagagaagaatagacaagaaagacaagaaaacagaaagaaagaaacaaaatcgagacaacgaaaacacgaagaagcccgaaagaagaacaagaagcaagcgacagacaagccaagcagagc

SEQ ID NO: 308022 - DNA, 3369 bp, Homo sapiens
agctgagccatgtacttcaaacagaaggcagccaattactaacttctggttgctaggtgtggcttcctttaaaatcctataaaatcagaagcccaagtctccactgccagtgtgaaatcttcagagaagaatttctctttagttctttgcaagaaggtagagataaaggtaagtcttggttttccttttagttagttttggttgttttgaaaacttttctcatcactatgttaaatgttactgcttctacaggatttatggttagttgcatttaacatgataagtcattcataaatctttctgtagaattacattggatatttatattttaggaatcacaaattacaatatttttgttctacttagttaacaaatacaagtaaaaataagataagtttgcttaatactggctcattgtactcttggtaagttaccatgagaaagaagggaagaatgtgctttccctctggtagccttaaaagaatgtgtttttcctttccttccccttgaaatatttcttcccaagagctgtgtgttttacagagaaatcgtgatgggggctgctttttgggggcaagaacaaaagtgataggagtgggctgcagggaactgtttcaaaatagtaggactttcataatttattttcttcttttgtaaggaaaacaagatagattcagacctcaaagtgctaatcatgctctttgtaataaacatttaaaaatatatgttatatttgcttatgctatttttccttttcttgtaggctctgtgtcatatacagtcttttcaagtgctggctggaaaacctaaaaagaagggaaatactttctgggtagtgtcagatacattatcctaggggaatgtcagtgaggccctccaacagctattccacttgattgttgcatgagctaatggccataaaactccttagaaaagcacaaagcaaaactaaagaagagtatttactagtgttggatatatttgtaaaagtgagattacaaatcatgtatctggctatttttttcttaaacatgttccttcaagaatttttctgttcgttcattttaaatatttattaaatgttctgatttcttatgttcactgctagctaattaacaaggatggaatttttcttgccttggttatatctaaaagattgtaaaaactttgagaaagcaatgttgccctctttccacaggagtattttggtagctgtaagagaatgcacattgcaaatgactcaaatgtggtaaaatgttggtttcataattctgaaatggcctcttccccaaaagtgacagtaacaccctagctccaggctcaaccacatccagcacatagccaacatttaacagatgttgacaaaatagttaataataatattattaaggaaccagccagagtttcatgcttattaaatactttttcaaccagaaggtctgcaaaggttgatttctgaatatgacgttagctctctctagacctattaatttacgacatttcaaatcagaggtaaaccagcagacctattatttttcaatgataaactataaacagttttttgaagtcaactatttccttttcctttaaaattggacagaatttcatcaggaagctcagaacaatccaatttatataatgccttccttcattatgctaattttcttcatcttcatctacttgaagtaatatttaagattggcacttcagagctgtaaatggatcttagatgataattacttcaacattcttattttataaacgaagaccctctggagaagctaaatgtttttcttgaggtcagatcgccagataatcaagaaccagtatacttcaatttgtattttatatcctatagttgtgggtagaaaatgttcattaaattagtgtagatatgttttttaaaatattagcaatgatacatgatattcattcaataatacttattaacatcctaaattccaggcattttgctagggattggaagtacatacataatgaatattattatttgtatgttagcacgggcctcatggcctgctcctggggaatataaacaagccaatggaaagtgataatacagaaaggtggggctggtgtaggggtgaagtcaggatgctttgggagagcatggaaggtcaccgaatccagtgctgaggaactaatgaagggtttctgaagaacgtgatgagatcaatgctgatgagtcacttagaagtagcaattagttaggcaaagggaagtgaatgtggaggaggaacaagcattccaggcaagaagaacaccctatcgaaaagcctggaagcaaaacattagtgaggctacctttcataaattgctttctgtaagtcatgccattgtgtagtcttaattgctttctctcaccagggaaggtgtgggaaggacttgtgaaatacatattcgaggaaaaactatgcacaaggccgtgcatttaaaaataaactccctaaggctggggtgaaacctgctacggtctgcgcaagttgactgttaatgaatttgattctcaggtgtgagtgattaaaagaacactgatcatgtcattttctttttggtcactaattccctccctcccttctctttcttttcttttttcttttcttttctttttctttctttcttcccgacagagtcttgttatgtcgcccaggatggagtgtagtggtacaatctcggctcactgcagcctccgcctcttcctgggttcaagtgattctcctgcctcagccttctgagtagatgggactacagacactttttcaaaaatggcaatggtatcagaattcctcaagcaggcctggtttattgaaaatgaagagcaggaatatgttcaaactgtgaagtcatccaaaggtggtcccggatcagcggtgagcccctatcctaccttcaatccatcctcggatgtcgctgccttgcataaggccataatggttaaaggtaacgtgtttcctcaaaacagttccctcctggacatttcagaatggctatttgaatgactgtcaaaaaacagacatgtgcaatggaaagaatctgtttcattttgaagataaaaacatttctttgccaaacgaagatgtaattatttacttaacactgaggaaattgtgttcacatcagtggaatctctattgttacagcagatattactggctcatttctagcagaaattccatgctgaaattaaaagctctgttcacatatagagttgcaactagtatcaaacactgcaacactgagggccaggaaaagttaattgtctcttcctttctcactcgaatgaaatgtcattctcccaagtgcttccttgatatgtagtatagcatcgattttttaggctgatatata

SEQ ID NO: 308023 - DNA, 3769 bp, Homo sapiens
agctgagccatgtacttcaaacagaaggcagccaattactaacttctggttgctaggtgtggcttcctttaaaatcctataaaatcagaagcccaagtctccactgccagtgtgaaatcttcagagaagaatttctctttagttctttgcaagaaggtagagataaaggtaagtcttggttttccttttagttagttttggttgttttgaaaacttttctcatcactatgttaaatgttactgcttctacaggatttatggttagttgcatttaacatgataagtcattcataaatctttctgtagaattacattggatatttatattttaggaatcacaaattacaatatttttgttctacttagttaacaaatacaagtaaaaataagataagtttgcttaatactggctcattgtactcttggtaagttaccatgagaaagaagggaagaatgtgctttccctctggtagccttaaaagaatgtgtttttcctttccttccccttgaaatatttcttcccaagagctgtgtgttttacagagaaatcgtgatgggggctgctttttgggggcaagaacaaaagtgataggagtgggctgcagggaactgtttcaaaatagtaggactttcataatttattttcttcttttgtaaggaaaacaagatagattcagacctcaaagtgctaatcatgctctttgtaataaacatttaaaaatatatgttatatttgcttatgctatttttccttttcttgtaggctctgtgtcatatacagtcttttcaagtgctggctggaaaacctaaaaagaagggaaatactttctgggtagtgtcagatacattatcctaggggaatgtcagtgaggccctccaacagctattccacttgattgttgcatgagctaatggccataaaactccttagaaaagcacaaagcaaaactaaagaagagtatttactagtgttggatatatttgtaaaagtgagattacaaatcatgtatctggctatttttttcttaaacatgttccttcaagaatttttctgttcgttcattttaaatatttattaaatgttctgatttcttatgttcactgctagctaattaacaaggatggaatttttcttgccttggttatatctaaaagattgtaaaaactttgagaaagcaatgttgccctctttccacaggagtattttggtagctgtaagagaatgcacattgcaaatgactcaaatgtggtaaaatgttggtttcataattctgaaatggcctcttccccaaaagtgacagtaacaccctagctccaggctcaaccacatccagcacatagccaacatttaacagatgttgacaaaatagttaataataatattattaaggaaccagccagagtttcatgcttattaaatactttttcaaccagaaggtctgcaaaggttgatttctgaatatgacgttagctctctctagacctattaatttacgacatttcaaatcagaggtaaaccagcagacctattatttttcaatgataaactataaacagttttttgaagtcaactatttccttttcctttaaaattggacagaatttcatcaggaagctcagaacaatccaatttatataatgccttccttcattatgctaattttcttcatcttcatctacttgaagtaatatttaagattggcacttcagagctgtaaatggatcttagatgataattacttcaacattcttattttataaacgaagaccctctggagaagctaaatgtttttcttgaggtcagatcgccagataatcaagaaccagtatacttcaatttgtattttatatcctatagttgtgggtagaaaatgttcattaaattagtgtagatatgttttttaaaatattagcaatgatacatgatattcattcaataatacttattaacatcctaaattccaggcattttgctagggattggaagtacatacataatgaatattattatttgtatgttagcacgggcctcatggcctgctcctggggaatataaacaagccaatggaaagtgataatacagaaaggtggggctggtgtaggggtgaagtcaggatgctttgggagagcatggaaggtcaccgaatccagtgctgaggaactaatgaagggtttctgaagaacgtgatgagatcaatgctgatgagtcacttagaagtagcaattagttaggcaaagggaagtgaatgtggaggaggaacaagcattccaggcaagaagaacaccctatcgaaaagcctggaagcaaaacattagtgaggctacctttcataaattgctttctgtaagtcatgccattgtgtagtcttaattgctttctctcaccagggaaggtgtgggaaggacttgtgaaatacatattcgaggaaaaactatgcacaaggccgtgcatttaaaaataaactccctaaggctggggtgaaacctgctacggtctgcgcaagttgactgttaatgaatttgattctcaggtgtgagtgattaaaagaacactgatcatgtcattttctttttggtcactaattccctccctcccttctctttcttttcttttttcttttcttttctttttctttctttcttcccgacagagtcttgttatgtcgcccaggatggagtgtagtggtacaatctcggctcactgcagcctccgcctcttcctgggttcaagtgattctcctgcctcagccttctgagtagatgggactacagacactttttcaaaaatggcaatggtatcagaattcctcaagcaggcctggtttattgaaaatgaagagcaggaatatgttcaaactgtgaagtcatccaaaggtggtcccggatcagcggtgagcccctatcctaccttcaatccatcctcggatgtcgctgccttgcataaggccataatggttaaaggtgtggatgaagcaaccatcattgacattctaactaagcgaaacaatgcacagcgtcaacagatcaaagcagcatatctccaggaaacaggaaagggtaagttagagtggtaaatttagatatttaatttcagcatagttatacttaaccatggattcggaagcacagttacctagttctttaaggttctaaccactgttttctcattacatctatgattgggattgcagtgtttatccactttgttgcaatttaatcaattttatcaaatttcctatttttatacattagtcatcttggtgtatattgtttgcagatgtggtgctctggggacaaatttttaatttgaacgtaaacatcgagattgctgctgtcaataaagaatatggtctgattgaaatgtactaatatttaaactgaactgtttaatgcctaaattttatatataattctactttaaaaataagccttatgtcttttataccaaatatgagtagttttctaaagcaatgaaattagaaaactatataatttcagtatctgattatactgcttgttatttgagaagtacaaacctcaaagattggaaacatgaatatattattttaaaagtaattttacttctgttttctgttagcacacagtcctctgtgttttgatctttgtgatttctcccctgtgtataagattactaaccctatgctttaagaagttattgatgaattcagtaaattttattttaatccctctagatctggaagggtaagataatgtttcaaaatatttggtacactttgtatgtgaaggg

SEQ ID NO: 308024 - DNA, 452 bp, Homo sapiens
  misc_feature (375)..(375): n is a, c, g, or t
ctctggatgcaaagtgtcctctggatgcaaagcgtcaacagatcaaagcagcatatctccaggaaacaggaaagcccctggatgaaacactgaagaaagcccttacaggtcaccttgaggaggttgttttagctctgctaaaaactccagcgcaatttgatgctgatgaacttcgtgctgccatgaagggccttggaactgatgaagatactctaattgagattttggcatcaagaactaacaaagaaatcagagacattaacagggtctacagagaggaactgaagagagatctggccaaagacataacctcagacactttgcatccagagacactttgcatccagagacactttgcatccagagacactttgnatccagagacactttgcatccagagacactttgcatccagaggacactttgcatccagaggggatcctctaggctcg

SEQ ID NO: 308025 - DNA, 1165 bp, Homo sapiens
agctgagccatgtacttcaaacagaaggcagccaattactaacttctggttgctaggtgtggcttcctttaaaatcctataaaatcagaagcccaagtctccactgccagtgtgaaatcttcagagaagaatttctctttagttctttgcaagaaggtagagataaagacactttttcaaaaatggcaatggtatcagaattcctcaagcaggcctggtttattgaaaatgaagagcaggaatatgttcaaactgtgaagtcatccaaaggtggtcccggatcagcggtgagcccctatcctaccttcaatccatcctcggatgtcgctgccttgcataaggccataatggttaaaggtgtggatgaagcaaccatcattgacattctaactaagcgaaacaatgcacagcgtcaacagatcaaagcagcatatctccaggaaacaggaaagggtaagttagagtggtaaatttagatatttaatttcagcatagttatacttaaccatggattcggaagcacagttacctagttctttaaggttctaaccactgttttctcattacatctatgattgggattgcagtgtttatccactttgttgcaatttaatcaattttatcaaatttcctatttttatacattagtcatcttggtgtatattgtttgcagatgtggtgctctggggacaaatttttaatttgaacgtaaacatcgagattgctgctgtcaataaagaatatggtctgattgaaatgtactaatatttaaactgaactgtttaatgcctaaattttatatataattctactttaaaaataagccttatgtcttttataccaaatatgagtagttttctaaagcaatgaaattagaaaactatataatttcagtatctgattatactgcttgttatttgagaagtacaaacctcaaagattggaaacatgaatatattattttaaaagtaattttacttctgttttctgttagcacacagtcctctgtgttttgatctttgtgatttctcccctgtgtataagattactaaccctatgctttaagaagttattgatgaattcagtaaattttattttaatccctctagatctggaagggtaagataatgtttcaaaatatttggtacactttgtatgtgaaggg

SEQ ID NO: 308026 - DNA, 377 bp, Homo sapiens
caagaacaaaagtgataggagtgggctgcagggaactgtttcaaaatagtaggactttcataatttattttcttcttttgtaaggaaaacaagatagattcagacctcaaagtgctaatcatgctctttgtaataaacatttaaaaatatatgttatatttgcttatgctatttaaaataagaaggtccgcttattacttttttcatttaaagagggtgtggccacattccttttcttgtaggctctgtgtcatatacagtcttttcaagtgctggctggaaaacctaaaaagaagggaaatactttctgggtagtgtcagatacattatcctaggggaatgtcagtgaggccctccaacagctattccacttgatt

SEQ ID NO: 308027 - DNA, 1753 bp, Homo sapiens
ttttttttttttggagttgaaagatgtgagacagtattcagaataatgaagataataataatgattattataataatgatgatgattccaaggaaaaaacctacagcgaatgttccatttctaccccgcacgcagacactctccctaacactgataacctgagcccccagcactggacggaagaatgctggcgtctccgtgtgtactggttcagggttctggccccagccttgtcaggaccccctggtgtccagagcccccacccctcccgcaacaagcagctgatgccccagtgattctctatacatttttcacctcggccaatatgtccaggaaaactgcttacttctcttttcttgcctggagcttcattgttcacccttacgttgcaatataggaattaatgctacaaaataaaagtaaagcttacctgaaaagtgcatagtttggggcaatggtatctacatctcccactgtgggaaaaccagcaaagcatcaaaactctcaattctcctgttaccgaatgcagatctgaattataagatgtttatgtttgaccattgtttcaacaatgggattttgttacgaattatccctttaactgaaaccctcagttttactgtttacattattaggaaaacagggatatcttttgaatctaaaaatttgatgtacagcatgtgatttttgaagtttacatgtaaagtcacagtataggtgaaataacgtttgtcatattttgagacgtatcctgcagccatgtttttacgtgagtgttttagtcaaagtacatggtagacagtctttcacaataaaaggaaaaggattttttttcctccaaatgtacatttatcaacctaatgattgatttttttaaaaagagatttcgccccagtctggtttatgaaagttcattgccctaaactgtgctgattgtttttaatcaagttataaatttccaacctagatcatgtatctaccaactctcctgcattttccaaaaggcattgagcttaaatattagtcttgcttagagtaggttatccacttacatgctgcgctaaagccatgcctttgaaactccttgtttaaaacatgatatgatttttgtgggcagtttcagaaaagaaaacaaacaaacaaaaatcgaccctttaattattacttgcaactcaacagatctccctgccgtactgccttttccaggaactttacttcagggctgtccagattgcagttgtgccccgtgtatgtggatctagttcacagagtctttggaagccagcagtcgtgccctccgtatactgtccactcattttatgtagatttggtatcctcagcagccagtgttaacaccactgtcacgtagtgtacagattcatcttttatgtatttaaagtaatccatactatgatttggtttttccctgcaccattaattctggcatcagatcagtttttgtgttgtgaagttctactgtggtttgacccaagaccacaaccatgagaccctgaagtaaagataaggtacacatacattatttgagtaactgtttccttgggggccaatctgtgtatgcttttagaagtttacagaatgcttttatttttgtctataacaaacagtctgtcatttatttctgttgataaaccatttggacagagtgaggacgtttgccctgttatctcctagtgctaacaatacactccagtcatgagccgggctttacaaataaagcacttttgatgactca

SEQ ID NO: 308028 - DNA, 1879 bp, Homo sapiens
ttttttttttttggagttgaaagatgtgagacagtattcagaataatgaagataataataatgattattataataatgatgatgattccaaggaaaaaacctacagcgaatgttccatttctaccccgcacgcagacactctccctaacactgataacctgagcccccagcactggacggaagaatgctggcgtctccgtgtgtactggttcagggttctggccccagccttgtcaggaccccctggtgtccagagcccccacccctcccgcaacaagcagctgatgccccagtgattctctatacatttttcacctcggccaatatgtccaggaaaactgcttacttctcttttcttgcctggagcttcattgttcacccttacgttgcaatataggaattaatgctacaaaataaaagtaaagcttacctgaaaagtgcatagtttggggcaatggtatctacatctcccactgtgggaaaaccagcaaagcatcaaaactctcaattctcctgttaccgaatgcagatctgaattataagatgtttatgtttgaccattgtttcaacaatgggattttgttacgaattatccctttaactgaaaccctcagttttactgtttacattattaggaaaacagggatatcttttgaatctaaaaatttgatgtacagcatgtgatttttgaagtttacatgtaaagtcacagtataggtgaaataacgtttgtcatattttgagacgtatcctgcagccatgtttttacgtgagtgttttagtcaaagtacatggtagacagtctttcacaataaaaggaaaaggattttttttcctccaaatgtacatttatcaacctaatgattgatttttttaaaaagagatttcgccccagtctggtttatgaaagttcattgccctaaactgtgctgattgtttttaatcaagttataaatttccaacctagatcatgtatctaccaactctcctgcattttccaaaaggcattgagcttaaatattagtcttgcttagagtaggttatccacttacatgctgcgctaaagccatgcctttgaaactccttgtttaaaacatgatatgatttttgtgggcagtttcagaaaagaaaacaaacaaacaaaaatcgaccctttaattattacttgcaactcaacagatctccctgccgtactgccttttccaggaactttacttcagggctgtccagattgcagttgtgccccgtgtatgtggatctagttcacagagtctttggaagccagcagtcgtgccctccgtatactgtccactcattttatgtagatttggtatcctcagcagccagtgttaacaccactgtcacgtagtgtacagattcatcttttatgtatttaaagtaatccatactatgatttggtttttccctgcaccattaattctggcatcagatcagtttttgtgttgtgaagttctactgtggtttgacccaagaccacaaccatgagaccctgaagtaaagataaggtacacatacattatttgagtaactgtttccttgggggccaatctgtgtatgcttttagaagtttacagaatgcttttatttttgtctataacaaacagtctgtcatttatttctgttgataaaccatttggacagagtgaggacgtttgccctgttatctcctagtgctaacaatacactccagtcatgagccgggctttacaaataaagcacttttgatgactcacaagatgaatccttttttcctctgtcccaattgtgtgtctctgttccaaacacattttaaatactcggtcctgacagtgtctttagctaatccttgaagaaataaaagtggaattgaatctttaaa

SEQ ID NO: 308029 - DNA, 1937 bp, Homo sapiens
ttttttttttttggagttgaaagatgtgagacagtattcagaataatgaagataataataatgattattataataatgatgatgattccaaggaaaaaacctacagcgaatgttccatttctaccccgcacgcagacactctccctaacactgataacctgagcccccagcactggacggaagaatgctggcgtctccgtgtgtactggttcagggttctggccccagccttgtcaggaccccctggtgtccagagcccccacccctcccgcaacaagcagctgatgccccagtgattctctatacatttttcacctcggccaatatgtccaggaaaactgcttacttctcttttcttgcctggagcttcattgttcacccttacgttgcaatataggaattaatgctacaaaataaaagtaaagcttacctgaaaagtgcatagtttggggcaatggtatctacatctcccactgtgggaaaaccagcaaagcatcaaaactctcaattctcctgttaccgaatgcagatctgaattataagatgtttatgtttgaccattgtttcaacaatgggattttgttacgaattatccctttaactgaaaccctcagttttactgtttacattattaggaaaacagggatatcttttgaatctaaaaatttgatgtacagcatgtgatttttgaagtttacatgtaaagtcacagtataggtgaaataacgtttgtcatattttgagacgtatcctgcagccatgtttttacgtgagtgttttagtcaaagtacatggtagacagtctttcacaataaaaggaaaaggattttttttcctccaaatgtacatttatcaacctaatgattgatttttttaaaaagagatttcgccccagtctggtttatgaaagttcattgccctaaactgtgctgattgtttttaatcaagttataaatttccaacctagatcatgtatctaccaactctcctgcattttccaaaaggcattgagcttaaatattagtcttgcttagagtaggttatccacttacatgctgcgctaaagccatgcctttgaaactccttgtttaaaacatgatatgatttttgtgggcagtttcagaaaagaaaacaaacaaacaaaaatcgaccctttaattattacttgcaactcaacagatctccctgccgtactgccttttccaggaactttacttcagggctgtccagattgcagttgtgccccgtgtatgtggatctagttcacagagtctttggaagccagcagtcgtgccctccgtatactgtccactcattttatgtagatttggtatcctcagcagccagtgttaacaccactgtcacgtagtgtacagattcatcttttatgtatttaaagtaatccatactatgatttggtttttccctgcaccattaattctggcatcagatcagtttttgtgttgtgaagttctactgtggtttgacccaagaccacaaccatgagaccctgaagtaaagataaggtacacatacattatttgagtaactgtttccttgggggccaatctgtgtatgcttttagaagtttacagaatgcttttatttttgtctataacaaacagtctgtcatttatttctgttgataaaccatttggacagagtgaggacgtttgccctgttatctcctagtgctaacaatacactccagtcatgagccgggctttacaaataaagcacttttgatgactcacaagatgaatccttttttcctctgtcccaattgtgtgtctctgttccaaacacattttaaatactcggtcctgacagtgtctttagctaaaatgtgtttggaacagagacattctaaagacactgtcaggaccgagtatttagctaatccttgaagaaataaaagtggaattgaaaaaaaaaaa

SEQ ID NO: 308030 - DNA, 1542 bp, Homo sapiens
ttttttttttttggagttgaaagatgtgagacagtattcagaataatgaagataataataatgattattataataatgatgatgattctctatacatttttcacctcggccaatatgtccaggaaaactgcttacttctcttttcttgcctggagcttcattgttcacccttacgttgcaatataggaattaatgctacaaaataaaagtaaagcttacctgaaaagtgcatagtttggggcaatggtatctacatctcccactgtgggaaaaccagcaaagcatcaaaactctcaattctcctgttaccgaatgcagatctgaattataagatgtttatgtttgaccattgtttcaacaatgggattttgttacgaattatccctttaactgaaaccctcagttttactgtttacattattaggaaaacagggatatcttttgaatctaaaaatttgatgtacagcatgtgatttttgaagtttacatgtaaagtcacagtataggtgaaataacgtttgtcatattttgagacgtatcctgcagccatgtttttacgtgagtgttttagtcaaagtacatggtagacagtctttcacaataaaaggaaaaggattttttttcctccaaatgtacatttatcaacctaatgattgatttttttaaaaagagatttcgccccagtctggtttatgaaagttcattgccctaaactgtgctgattgtttttaatcaagttataaatttccaacctagatcatgtatctaccaactctcctgcattttccaaaaggcattgagcttaaatattagtcttgcttagagtaggttatccacttacatgctgcgctaaagccatgcctttgaaactccttgtttaaaacatgatatgatttttgtgggcagtttcagaaaagaaaacaaacaaacaaaaatcgaccctttaattattacttgcaactcaacagatctccctgccgtactgccttttccaggaactttacttcagggctgtccagattgcagttgtgccccgtgtatgtggatctagttcacagagtctttggaagccagcagtcgtgccctccgtatactgtccactcattttatgtagatttggtatcctcagcagccagtgttaacaccactgtcacgtagtgtacagattcatcttttatgtatttaaagtaatccatactatgatttggtttttccctgcaccattaattctggcatcagatcagtttttgtgttgtgaagttctactgtggtttgacccaagaccacaaccatgagaccctgaagtaaagataaggtacacatacattatttgagtaactgtttccttgggggccaatctgtgtatgcttttagaagtttacagaatgcttttatttttgtctataacaaacagtctgtcatttatttctgttgataaaccatttggacagagtgaggacgtttgccctgttatctcctagtgctaacaatacactccagtcatgagccgggctttacaaataaagcacttttgatgactca

SEQ ID NO: 308031 - DNA, 2547 bp, Homo sapiens
acagggaggtggtggcgccatcagtgtgggctgtgccgtggctggaagttactgtgaggcggcggctaagaaggcggctctggtggcggcggtggaggctgaggcggcggccgaggcggcgacggaggaaacagaagatggcagattttttgaaaggactgcctgtctacaacaaaagcaattttagtcgatttcacgcggactccgtgtgcaaagcctcgaaccgacggccctcagtctacctgcctacccgcgagtacccgtctgaacagatcatcgtgacagaaaagacaaacatcctcctgcgctacctgcatcagcaatgggacaaaaagaacgctgccaagaagagagaccaggagcaagtggagctggaaggcgagagctccgcacctccccgcaaggtggcgcggaccgacagcccagacatgcacgaggacacttaagactctcaactccacaggcgcctcctgccaggtctgctcctcggtcgcccacccgcctgcccgccatgttgcgtgctccgtgtccaccccaataaaagggtctttcctacttgaactcgcgtctttgctccacacaccttggctgcagaggacggagcccctgggagtcatccctgttgtcaccaagaggagtgagaagggccccccacgccagggccccaggaccggctggattctctcgtgggcttgctgaggccaccatgttcaaggccaagacctgcctggaccatcccctctgcctctcctgtcaaggtgaccccaaggacaggtcattcctgagagacggtccatggtgccaaggatggagcggggtcagccccctgcctgggataccgccaagcagggcagcgcacctgtcagacaccgcagagatggccggcctcatccgggggcctggggtctctggcctctgctgctcccctgaggcatggtgacagtacagacggcatctggccggtcttgctgtcctaggtggtggcctcacccttgctgggtcatagaggagctgtacagaaggttggcacctggcagttggcatgtgccatggccgctcatggggacccctcttccgccagctgggctgggtttggggctgagcttgggtatgtaggggtgttcgggctctgggcagaaggtttgtggccctgaccactgagcctggggctgggggaacaccgcttctccccttattgcccccactggtggtggtggggatctcagttttcttttgttttgttttgtttgtttgtttgagttggggtcttgtactctttcccaggctggagtgcagtggcgtaatcacagctcactgcagcctcgacctcaagccttcctcccacctcagccttccaagccgctgggaccacaggcacccaccaccatgcctggctaatttttttttttttttgagatggagtctcgctgtgtctcccaggctggagtgcagtggcaagatctcagctcactacaacctccgcctcccaggttcaagtgattctcctacctcagcctcctgagtagctgggattacacgcgtgcgcccctacacccagctaatttttctatttttagtggagacggcgttttgtcatgttggccaggctggtctcgaactcctgacctcaggtgcttcgcctgcctcggcctcccaaagtgctgtgaccgcacctggctgcctggctaatattttaaaaattttttgtagagacagggtttcaccatgttgcccaggctggtctcaaactcctgggctcaagtcatccaccttcctcagcctcccaaagtgctggggttacagacgtgagccaccgtgcctggcagaggtctctgttttgagagctgagtctgagggcgttgggatggtgtagggttgggccacagagctagcagacactccgggctatggagggtccgcctgccccagattccactgtggagggccctgcctgtgtcagaccctcgggcctaggcggcccatctctcccaaggacggagagtgccagggtgggctcccgtcctacacaaggagtggctgaccaggcccaggcacagcacagccaccctgctgtacctcccagctcccggcagtgtctacaccacagtgatggtgctacaggggccatgtggtcacaggacaggtggtcaggaaatgcacacttgactgcggtcgatggtgccgggtccggctgaatgccctggaggctcccaggccagctggggagtcccagtccccagggttggtgtgacctgggcaggcctgcggtgtccatctgtgaatgactgagatggtgggacttcagcttccaaggccaggggccagagtgggagcagggggcactcccgcctttcccctcggcctgtctagacctctctggctcccagtttctgctttgagtggctgggggctgtctcctgcctgtgctgtctgcccgtcgctctgcagggctgctgggcgggcacctccttcccctcccctacctcagctccctcctttggggtctgagggctgtgccccagcttgcctccctgtggcctcccccta

SEQ ID NO: 308032 - DNA, 2020 bp, Homo sapiens
tatttcatgcaggggctggggctttacattgatacttacttgtcgtcgctcttcactttacatgcagaggacggagcccctgggagtcatccctgttgtcaccaagaggagtgagaagggccccccacgccagggccccaggaccggctggattctctcgtgggcttgctgaggccaccatgttcaaggccaagacctgcctggaccatcccctctgcctctcctgtcaaggtgaccccaaggacaggtcattcctgagagacggtccatggtgccaaggatggagcggggtcagccccctgcctgggataccgccaagcagggcagcgcacctgtcagacaccgcagagatggccggcctcatccgggggcctggggtctctggcctctgctgctcccctgaggcatggtgacagtacagacggcatctggccggtcttgctgtcctaggtggtggcctcacccttgctgggtcatagaggagctgtacagaaggttggcacctggcagttggcatgtgccatggccgctcatggggacccctcttccgccagctgggctgggtttggggctgagcttgggtatgtaggggtgttcgggctctgggcagaaggtttgtggccctgaccactgagcctggggctgggggaacaccgcttctccccttattgcccccactggtggtggtggggatctcagttttcttttgttttgttttgtttgtttgtttgagttggggtcttgtactctttcccaggctggagtgcagtggcgtaatcacagctcactgcagcctcgacctcaagccttcctcccacctcagccttccaagccgctgggaccacaggcacccaccaccatgcctggctaatttttttttttttttgagatggagtctcgctgtgtctcccaggctggagtgcagtggcaagatctcagctcactacaacctccgcctcccaggttcaagtgattctcctacctcagcctcctgagtagctgggattacacgcgtgcgcccctacacccagctaatttttctatttttagtggagacggcgttttgtcatgttggccaggctggtctcgaactcctgacctcaggtgcttcgcctgcctcggcctcccaaagtgctgtgaccgcacctggctgcctggctaatattttaaaaattttttgtagagacagggtttcaccatgttgcccaggctggtctcaaactcctgggctcaagtcatccaccttcctcagcctcccaaagtgctggggttacagacgtgagccaccgtgcctggcagaggtctctgttttgagagctgagtctgagggcgttgggatggtgtagggttgggccacagagctagcagacactccgggctatggagggtccgcctgccccagattccactgtggagggccctgcctgtgtcagaccctcgggcctaggcggcccatctctcccaaggacggagagtgccagggtgggctcccgtcctacacaaggagtggctgaccaggcccaggcacagcacagccaccctgctgtacctcccagctcccggcagtgtctacaccacagtgatggtgctacaggggccatgtggtcacaggacaggtggtcaggaaatgcacacttgactgcggtcgatggtgccgggtccggctgaatgccctggaggctcccaggccagctggggagtcccagtccccagggttggtgtgacctgggcaggcctgcggtgtccatctgtgaatgactgagatggtgggacttcagcttccaaggccaggggccagagtgggagcagggggcactcccgcctttcccctcggcctgtctagacctctctggctcccagtttctgctttgagtggctgggggctgtctcctgcctgtgctgtctgcccgtcgctctgcagggctgctgggcgggcacctccttcccctcccctacctcagctccctcctttggggtctgagggctgtgccccagcttgcctccctgtggcctcccccta

SEQ ID NO: 308033 - DNA, 1114 bp, Homo sapiens
acagggaggtggtggcgccatcagtgtgggctgtgccgtggctggaagttactgtgaggcggcggctaagaaggcggctctggtggcggcggtggaggctgaggcggcggccgaggcggcgacggaggaaacagaagatggcagattttttgaaaggactgcctgtctacaacaaaagcaattttagtcgatttcacgcggactccgtgtgcaaagcctcgaaccgacggccctcagtctacctgcctacccgcgagtacccgtctgaacagatcatcgtgacagaaaagacaaacatcctcctgcgctacctgcatcagcaatgggacaaaaagaacgctgccaagaagagagaccaggagcaagtggagctggaaggcgagagctccgcacctccccgcaaggtggcgcggaccgacagcccagacatgcacgaggacacttaagactctcaactccacaggcgcctcctgccaggtctgctcctcggtcgcccacccgcctgcccgccatgtgtaagcaccccgcccgcccgcctccctgccggcccatccacaccctgcgtccacaccacttccaacctcataggagccgatgtatttattttccttgagtttttatttatgctgtaacctgtatcaagcgttggttaaaggggacatcagacccagtagtgtgatgttggtagatgctttttaaaaaaaacaacattgtccccccgacccccgccttccatcgggccagttccccgattcctgcccccagttctccagagaaccagagtgtgtctgtgagagtctctagcgggggctttactgtggccgggcgacaggggcgggcccggggtggcctgacctaccaggacagccgagtggccttctcccccccaacaccggtccaggccattgagactcggtcttgtcccacgcttcgcccggaactttcccatgcccagacctcactcagcgtgcacgcacgttggggagaagtcggcccttgggatctttctcttgagtcattttatttttatcatggactagtgcgtgctccgtgtccaccccaataaaagggtctttcctacttgaactcgcgtctttgctccacacaccttggc

SEQ ID NO: 308034 - DNA, 3072 bp, Homo sapiens
acagggaggtggtggcgccatcagtgtgggctgtgccgtggctggaagttactgtgaggcggcggctaagaaggcggctctggtggcggcggtggaggctgaggcggcggccgaggcggcgacggaggaaacagaagatggcagattttttgaaaggactgcctgtctacaacaaaagcaattttagtcgatttcacgcggactccgtgtgcaaagcctcgaaccgacggccctcagtctacctgcctacccgcgagtacccgtctgaacagatcatcgtgacagaaaagacaaacatcctcctgcgctacctgcatcagcaatgggacaaaaagaacgctgccaagaagagagaccaggagcaagtggagctggaaggcgagagctccgcacctccccgcaaggtggcgcggaccgacagcccagacatgcacgaggacacttaagactctcaactccacaggcgcctcctgccaggtctgctcctcggtcgcccacccgcctgcccgccatgtgtaagcaccccgcccgcccgcctccctgccggcccatccacaccctgcgtccacaccacttccaacctcataggagccgatgtatttattttccttgagtttttatttatgctgtaacctgtatcaagcgttggttaaaggggacatcagacccagtagtgtgatgttggtagatgctttttaaaaaaaacaacattgtccccccgacccccgccttccatcgggccagttccccgattcctgcccccagttctccagagaaccagagtgtgtctgtgagagtctctagcgggggctttactgtggccgggcgacaggggcgggcccggggtggcctgacctaccaggacagccgagtggccttctcccccccaacaccggtccaggccattgagactcggtcttgtcccacgcttcgcccggaactttcccatgcccagacctcactcagcgtgcacgcacgttggggagaagtcggcccttgggatctttctcttgagtcattttatttttatcatggactagtgcgtgctccgtgtccaccccaataaaagggtctttcctacttgaactcgcgtctttgctccacacaccttggctgcagaggacggagcccctgggagtcatccctgttgtcaccaagaggagtgagaagggccccccacgccagggccccaggaccggctggattctctcgtgggcttgctgaggccaccatgttcaaggccaagacctgcctggaccatcccctctgcctctcctgtcaaggtgaccccaaggacaggtcattcctgagagacggtccatggtgccaaggatggagcggggtcagccccctgcctgggataccgccaagcagggcagcgcacctgtcagacaccgcagagatggccggcctcatccgggggcctggggtctctggcctctgctgctcccctgaggcatggtgacagtacagacggcatctggccggtcttgctgtcctaggtggtggcctcacccttgctgggtcatagaggagctgtacagaaggttggcacctggcagttggcatgtgccatggccgctcatggggacccctcttccgccagctgggctgggtttggggctgagcttgggtatgtaggggtgttcgggctctgggcagaaggtttgtggccctgaccactgagcctggggctgggggaacaccgcttctccccttattgcccccactggtggtggtggggatctcagttttcttttgttttgttttgtttgtttgtttgagttggggtcttgtactctttcccaggctggagtgcagtggcgtaatcacagctcactgcagcctcgacctcaagccttcctcccacctcagccttccaagccgctgggaccacaggcacccaccaccatgcctggctaatttttttttttttttgagatggagtctcgctgtgtctcccaggctggagtgcagtggcaagatctcagctcactacaacctccgcctcccaggttcaagtgattctcctacctcagcctcctgagtagctgggattacacgcgtgcgcccctacacccagctaatttttctatttttagtggagacggcgttttgtcatgttggccaggctggtctcgaactcctgacctcaggtgcttcgcctgcctcggcctcccaaagtgctgtgaccgcacctggctgcctggctaatattttaaaaattttttgtagagacagggtttcaccatgttgcccaggctggtctcaaactcctgggctcaagtcatccaccttcctcagcctcccaaagtgctggggttacagacgtgagccaccgtgcctggcagaggtctctgttttgagagctgagtctgagggcgttgggatggtgtagggttgggccacagagctagcagacactccgggctatggagggtccgcctgccccagattccactgtggagggccctgcctgtgtcagaccctcgggcctaggcggcccatctctcccaaggacggagagtgccagggtgggctcccgtcctacacaaggagtggctgaccaggcccaggcacagcacagccaccctgctgtacctcccagctcccggcagtgtctacaccacagtgatggtgctacaggggccatgtggtcacaggacaggtggtcaggaaatgcacacttgactgcggtcgatggtgccgggtccggctgaatgccctggaggctcccaggccagctggggagtcccagtccccagggttggtgtgacctgggcaggcctgcggtgtccatctgtgaatgactgagatggtgggacttcagcttccaaggccaggggccagagtgggagcagggggcactcccgcctttcccctcggcctgtctagacctctctggctcccagtttctgctttgagtggctgggggctgtctcctgcctgtgctgtctgcccgtcgctctgcagggctgctgggcgggcacctccttcccctcccctacctcagctccctcctttggggtctgagggctgtgccccagcttgcctccctgtggcctcccccta

SEQ ID NO: 308035 - DNA, 1138 bp, Homo sapiens
taggtagagaccagggatgctgctgaacaccccgcaatgcacaggatgcccccgccgttcgcaaagcacagctgtgctttgggcggcggctaagaaggcggctctggtggcggcggtggaggctgaggcggcggccgaggcggcgacggaggaaacagaagatggcagattttttgaaaggactgcctgtctacaacaaaagcaattttagtcgatttcacgcggactccgtgtgcaaagcctcgaaccgacggccctcagtctacctgcctacccgcgagtacccgtctgaacagatcatcgtgacagaaaagacaaacatcctcctgcgctacctgcatcagcaatgggacaaaaagaacgctgccaagaagagagaccaggagcaagtggagctggaaggcgagagctccgcacctccccgcaaggtggcgcggaccgacagcccagacatgcacgaggacacttaagactctcaactccacaggcgcctcctgccaggtctgctcctcggtcgcccacccgcctgcccgccatgtgtaagcaccccgcccgcccgcctccctgccggcccatccacaccctgcgtccacaccacttccaacctcataggagccgatgtatttattttccttgagtttttatttatgctgtaacctgtatcaagcgttggttaaaggggacatcagacccagtagtgtgatgttggtagatgctttttaaaaaaaacaacattgtccccccgacccccgccttccatcgggccagttccccgattcctgcccccagttctccagagaaccagagtgtgtctgtgagagtctctagcgggggctttactgtggccgggcgacaggggcgggcccggggtggcctgacctaccaggacagccgagtggccttctcccccccaacaccggtccaggccattgagactcggtcttgtcccacgcttcgcccggaactttcccatgcccagacctcactcagcgtgcacgcacgttggggagaagtcggcccttgggatctttctcttgagtcattttatttttatcatggactagtgcgtgctccgtgtccaccccaataaaagggtctttcctacttgaactcgcgtctttgctccacacaccttggc

SEQ ID NO: 308036 - DNA, 1104 bp, Homo sapiens
acagggaggtggtggcgccatcagtgtgggctgtgccgtggctggaagttactgtgaggcggcggctaagaaggcggctctggtggcggcggtggaggctgaggcggcggccgaggcggcgacggaggaaacagaagatggcagattttttgaaaggactgcctgtctacaacaaaagcaattttagtcgatttcacgcggactccgtgtgcaaagcctcgaaccgacggccctcagtctacctgcctacccgcgagtacccgtctgaacagatcatcgtgacagaaaagacaaacatcctcctgcgctacctgcatcagcaatgggacaaaaagaacgctgccaagaagagagaccaggagcaagtggagctggaaggcgagagctccgcacctccccgcaaggtggcgcggaccgacagcccagacatgcacgaggacacttaagactctcaactccacaggcgcctcctgccaggtctgctcctcggtcgcccacccgcctgcccgccatgtgtaagcaccccgcccgcccgcctccctgccggcccatccacaccctgcgtccacaccacttccaacctcataggagccgatgtatttattttccttgagtttttatttatgctgtaacctgtatcaagcgttggttaaaggggacatcagacccagtagtgtgatgttggtagatgctttttctgcccccagttctccagagaaccagagtgtgtctgtgagagtctctagcgggggctttactgtggccgggcgacaggggcgggcccggggtggcctgacctaccaggacagccgagtggccttctcccccccaacaccggtccaggccattgagactcggtcttgtcccacgcttcgcccggaactttcccatgcccagacctcactcagcgtgcacgcacgttggggagaagtcggcccttgggatctttctcttgagtcaacacaccctgtcgctcatggactactgcgtgcaccgagaacaacccaacgggcaaaccaaacacacacacccacaccaccaaacagcacaaccccacacccacaccccacgggcacgagagcccaacccaacacccgacccgtc

SEQ ID NO: 308037 - DNA, 1055 bp, Homo sapiens
  misc_feature (71)..(71): n is a, c, g, or t
  misc_feature (73)..(73): n is a, c, g, or t
gtgagagtgagccgcaggcttcgggaggcgagggggcggggggagcagcgcctgaggcggcgacggaggananagaagatggcagattttttgaaaggactgcctgtctacaacaaaagcaattttagtcgatttcacgcggactccgtgtgcaaagcctcgaaccgacggccctcagtctacctgcctacccgcgagtacccgtctgaacagatcatcgtgacagaaaagacaaacatcctcctgcgctacctgcatcagcaatgggacaaaaagaacgctgccaagaagagagaccaggagcaagtggagctggaaggcgagagctccgcacctccccgcaaggtggcgcggaccgacagcccagacatgcacgaggacacttaagactctcaactccacaggcgcctcctgccaggtctgctcctcggtcgcccacccgcctgcccgccatgtgtaagcaccccgcccgcccgcctccctgccggcccatccacaccctgcgtccacaccacttccaacctcataggagccgatgtatttattttccttgagtttttatttatgctgtaacctgtatcaagcgttggttaaaggggacatcagacccagtagtgtgatgttggtagatgctttttaaaaaaaacaacattgtccccccgacccccgccttccatcgggccagttccccgattcctgcccccagttctccagagaaccagagtgtgtctgtgagagtctctagcgggggctttactgtggccgggcgacaggggcgggcccggggtggcctgacctaccaggacagccgagtggccttctcccccccaacaccggtccaggccattgagactcggtcttgtcccacgcttcgcccggaactttcccatgcccagacctcactcagcgtgcacgcacgttggggagaagtcggcccttgggatctttctcttgagtcattttatttttatcatggactagtgcgtgctccgtgtccaccccaataaaagggtctttcctacttgaactcgcgtctttgctccacacaccttggc

SEQ ID NO: 308038 - DNA, 1066 bp, Homo sapiens
  misc_feature (82)..(82): n is a, c, g, or t
  misc_feature (84)..(84): n is a, c, g, or t
taattccatcccgggccggcgttttcacttgttagattcctggcccgtggctgtcaatttacacgaggcggcgacggaggananagaagatggcagattttttgaaaggactgcctgtctacaacaaaagcaattttagtcgatttcacgcggactccgtgtgcaaagcctcgaaccgacggccctcagtctacctgcctacccgcgagtacccgtctgaacagatcatcgtgacagaaaagacaaacatcctcctgcgctacctgcatcagcaatgggacaaaaagaacgctgccaagaagagagaccaggagcaagtggagctggaaggcgagagctccgcacctccccgcaaggtggcgcggaccgacagcccagacatgcacgaggacacttaagactctcaactccacaggcgcctcctgccaggtctgctcctcggtcgcccacccgcctgcccgccatgtgtaagcaccccgcccgcccgcctccctgccggcccatccacaccctgcgtccacaccacttccaacctcataggagccgatgtatttattttccttgagtttttatttatgctgtaacctgtatcaagcgttggttaaaggggacatcagacccagtagtgtgatgttggtagatgctttttaaaaaaaacaacattgtccccccgacccccgccttccatcgggccagttccccgattcctgcccccagttctccagagaaccagagtgtgtctgtgagagtctctagcgggggctttactgtggccgggcgacaggggcgggcccggggtggcctgacctaccaggacagccgagtggccttctcccccccaacaccggtccaggccattgagactcggtcttgtcccacgcttcgcccggaactttcccatgcccagacctcactcagcgtgcacgcacgttggggagaagtcggcccttgggatctttctcttgagtcattttatttttatcatggactagtgcgtgctccgtgtccaccccaataaaagggtctttcctacttgaactcgcgtctttgctccacacaccttggc

SEQ ID NO: 308039 - DNA, 1003 bp, Homo sapiens
gagtagctgcgagtgtgctcagaagcaaaaacatgggacttttggagatctctggagttgggggtactgagttccagccccaaaaagacctcccagggcagtgtcaggggaggagcctggggaggggaggcgtctgcgactttctctatctttcctccttagtcatcgtgacagaaaagacaaacatcctcctgcgctacctgcatcagcaatgggacaaaaagaacgctgccaagaagagagaccaggagcaagtggagctggaaggcgagagctccgcacctccccgcaaggtggcgcggaccgacagcccagacatgcacgaggacacttaagactctcaactccacaggcgcctcctgccaggtctgctcctcggtcgcccacccgcctgcccgccatgtgtaagcaccccgcccgcccgcctccctgccggcccatccacaccctgcgtccacaccacttccaacctcataggagccgatgtatttattttccttgagtttttatttatgctgtaacctgtatcaagcgttggttaaaggggacatcagacccagtagtgtgatgttggtagatgctttttaaaaaaaacaacattgtccccccgacccccgccttccatcgggccagttccccgattcctgcccccagttctccagagaaccagagtgtgtctgtgagagtctctagcgggggctttactgtggccgggcgacaggggcgggcccggggtggcctgacctaccaggacagccgagtggccttctcccccccaacaccggtccaggccattgagactcggtcttgtcccacgcttcgcccggaactttcccatgcccagacctcactcagcgtgcacgcacgttggggagaagtcggcccttgggatctttctcttgagtcattttatttttatcatggactagtgcgtgctccgtgtccaccccaataaaagggtctttcctacttgaactcgcgtctttgctccacacaccttggc

SEQ ID NO: 308040 - DNA, 1056 bp, Homo sapiens
acagggaggtggtggcgccatcagtgtgggctgtgccgtggctggaagttactgtgaggcggcggctaagaaggcggctctggtggcggcggtggaggctgaggcggcggccgaggcggcgacggaggaaacagaagatggcagattttttgaaaggactgcctgtctacaacaaaagcaattttagtcgatttcacgcggactccgtgtgcaaagcctcgaaccgacggccctcagtctacctgcctacccgcgagtacccgtctgaacagatcatcgtgacagaaaagacaaacatcctcctgcgctacctgcatcagcaatgggacaaaaagctccccgcaaggtggcgcggaccgacagcccagacatgcacgaggacacttaagactctcaactccacaggcgcctcctgccaggtctgctcctcggtcgcccacccgcctgcccgccatgtgtaagcaccccgcccgcccgcctccctgccggcccatccacaccctgcgtccacaccacttccaacctcataggagccgatgtatttattttccttgagtttttatttatgctgtaacctgtatcaagcgttggttaaaggggacatcagacccagtagtgtgatgttggtagatgctttttaaaaaaaacaacattgtccccccgacccccgccttccatcgggccagttccccgattcctgcccccagttctccagagaaccagagtgtgtctgtgagagtctctagcgggggctttactgtggccgggcgacaggggcgggcccggggtggcctgacctaccaggacagccgagtggccttctcccccccaacaccggtccaggccattgagactcggtcttgtcccacgcttcgcccggaactttcccatgcccagacctcactcagcgtgcacgcacgttggggagaagtcggcccttgggatctttctcttgagtcattttatttttatcatggactagtgcgtgctccgtgtccaccccaataaaagggtctttcctacttgaactcgcgtctttgctccacacaccttggc

SEQ ID NO: 308041 - DNA, 1193 bp, Homo sapiens
atgtggtgggggtgactccgggtgccaggaaacacctgtctatcaccaggcatgggtccagaaagtgctctgggcagggcttagtggggcaggtcctggtggtaggaggggctgcctagccagggaccctggggccccccactgtactccaggcctacctctgtgatgctgctgcaggggcctgggctggcattatgactctgggagcttcacccacgtgaagactcacagcctccagctgggcaacatagtgaaacccccatgtctaccaaaagtaaaaatattaagcgtggtggtatgtgcctgtagtcctagctactccagaggctgagctgggaggattgcttgagcccagaaggttgaggctgtccgaaaaaaaagactcacagcccctctcttttccctgtcccccagaacgctgccaagaagagagaccaggagcaagtggagctggaaggcgagagctccgcacctccccgcaaggtggcgcggaccgacagcccagacatgcacgaggacacttaagactctcaactccacaggcgcctcctgccaggtctgctcctcggtcgcccacccgcctgcccgccatgtgtaagcaccccgcccgcccgcctccctgccggcccatccacaccctgcgtccacaccacttccaacctcataggagccgatgtatttattttccttgagtttttatttatgctgtaacctgtatcaagcgttggttaaaggggacatcagacccagtagtgtgatgttggtagatgctttttaaaaaaaacaacattgtccccccgacccccgccttccatcgggccagttccccgattcctgcccccagttctccagagaaccagagtgtgtctgtgagagtctctagcgggggctttactgtggccgggcgacaggggcgggcccggggtggcctgacctaccaggacagccgagtggccttctcccccccaacaccggtccaggccattgagactcggtcttgtcccacgcttcgcccggaactttcccatgcccagacctcactcagcgtgcacgcacgttggggagaagtcggcccttgggatctttctcttgagtcattttatttttatcatggactagtgcgtgctccgtgtccaccccaataaaagggtctttcctacttgaactcgcgtctttgctccacacaccttggc

SEQ ID NO: 308042 - DNA, 855 bp, Homo sapiens
agtcctttcaaaaaatctgccatcttctgtttcctccgtcgccgccttgccgccgcctcagcaatgggacaaaaagaacgctgccaagaagagagaccaggagcaagtggagctggaaggcgagagctccgcacctccccgcaaggtggcgcggaccgacagcccagacatgcacgaggacacttaagactctcaactccacaggcgcctcctgccaggtctgctcctcggtcgcccacccgcctgcccgccatgtgtaagcaccccgcccgcccgcctccctgccggcccatccacaccctgcgtccacaccacttccaacctcataggagccgatgtatttattttccttgagtttttatttatgctgtaacctgtatcaagcgttggttaaaggggacatcagacccagtagtgtgatgttggtagatgctttttaaaaaaaacaacattgtccccccgacccccgccttccatcgggccagttccccgattcctgcccccagttctccagagaaccagagtgtgtctgtgagagtctctagcgggggctttactgtggccgggcgacaggggcgggcccggggtggcctgacctaccaggacagccgagtggccttctcccccccaacaccggtccaggccattgagactcggtcttgtcccacgcttcgcccggaactttcccatgcccagacctcactcagcgtgcacgcacgttggggagaagtcggcccttgggatctttctcttgagtcattttatttttatcatggactagtgcgtgctccgtgtccaccccaataaaagggtctttcctacttgaactcgcgtctttgctccacacaccttggc

SEQ ID NO: 308043 - DNA, 3471 bp, Homo sapiens
tgtgtgtgccttctccgctctcgctatctttctccttcgtctggtccctctcttgttgcgctttgtcctgtttctacttgcctttgttctggtcttgcctcgtctggtgtgttccctccgtttcttcttgatgtcttcttggttcgtcgtcgtgttgtctccgcgtgtctgtgcacatctcgtccaactgattttccctcttctctcggttcgtgtccaatcgcttgtggtccattagtcagctgtcatgtttcagtgagtagcgttattagttttctatgtctgtcgtatgtgtttgtttgttttattttttgattttattctcttgtttgtttgttctaattgtttgttaattgtttgagtttttgtgtttgtctttaattgtttgttttttgtagtgtgtgtgcgtctctctggttatctgggtctagcttcctgcccgtcatcctcttggatgtctggcgtccctagcgtgtctacttgtctcgtcctgattgtggtatctactgttcgatatggctcgttgtgtgcgcatatccttttttgctgtcctgctgtcttgccctttcctcctgtgcccattgggtgtcgtctcttctgtctgcttctgtgtgtcggtgtgtctgattctctcgtcttttgtttcttggctatgttgtgttttaatggtggttcttttcgtcgtttgtgtgcgtcggcgtctttcgcgcgtcgttctgtgtgtcgctgtatgttcctatttcatgtccttcttgggttggttctcttttctctcggtagcgtgtgtgcttattccttcttctagtttatgtgattgctcttgtctgtttttttctacttgtttccctttgtcgtttcttttatctttttatcttgtctggttttattccccttgtttttcattatgtctgtttttggttttttctatgtgggtgttctattcacgattctctctttgttaggtttgttgatttgtttgggtatgattgtcgtttgtttttagttctgtttatcttagcattttgtgcctcccgttctgttctctctcgtctcttcgcagtcatgtgctcatgtttctctcttgaggtttctcttgttcgctccatgtatgcttctcaggagatatctcatgtatgttgtagtacttgttgatgtagttctgcttattcgtgtgtgtgctgttatctgtggtccgtggctgacagggtgcatggtctctcgtgtggtggcctgatcctatcctatggatcatgccgtatgtggcattctgcctcctctctctaatccaacaccggtccaggccattgagactcggtcttgtcccacgcttcgcccggaactttcccatgcccagacctcactcagcgtgcacgcacgttggggagaagtcggcccttgggatctttctcttgagtcattttatttttatcatggactagtgcgtgctccgtgtccaccccaataaaagggtctttcctacttgaactcgcgtctttgctccacacaccttggctgcagaggacggagcccctgggagtcatccctgttgtcaccaagaggagtgagaagggccccccacgccagggccccaggaccggctggattctctcgtgggcttgctgaggccaccatgttcaaggccaagacctgcctggaccatcccctctgcctctcctgtcaaggtgaccccaaggacaggtcattcctgagagacggtccatggtgccaaggatggagcggggtcagccccctgcctgggataccgccaagcagggcagcgcacctgtcagacaccgcagagatggccggcctcatccgggggcctggggtctctggcctctgctgctcccctgaggcatggtgacagtacagacggcatctggccggtcttgctgtcctaggtggtggcctcacccttgctgggtcatagaggagctgtacagaaggttggcacctggcagttggcatgtgccatggccgctcatggggacccctcttccgccagctgggctgggtttggggctgagcttgggtatgtaggggtgttcgggctctgggcagaaggtttgtggccctgaccactgagcctggggctgggggaacaccgcttctccccttattgcccccactggtggtggtggggatctcagttttcttttgttttgttttgtttgtttgtttgagttggggtcttgtactctttcccaggctggagtgcagtggcgtaatcacagctcactgcagcctcgacctcaagccttcctcccacctcagccttccaagccgctgggaccacaggcacccaccaccatgcctggctaatttttttttttttttgagatggagtctcgctgtgtctcccaggctggagtgcagtggcaagatctcagctcactacaacctccgcctcccaggttcaagtgattctcctacctcagcctcctgagtagctgggattacacgcgtgcgcccctacacccagctaatttttctatttttagtggagacggcgttttgtcatgttggccaggctggtctcgaactcctgacctcaggtgcttcgcctgcctcggcctcccaaagtgctgtgaccgcacctggctgcctggctaatattttaaaaattttttgtagagacagggtttcaccatgttgcccaggctggtctcaaactcctgggctcaagtcatccaccttcctcagcctcccaaagtgctggggttacagacgtgagccaccgtgcctggcagaggtctctgttttgagagctgagtctgagggcgttgggatggtgtagggttgggccacagagctagcagacactccgggctatggagggtccgcctgccccagattccactgtggagggccctgcctgtgtcagaccctcgggcctaggcggcccatctctcccaaggacggagagtgccagggtgggctcccgtcctacacaaggagtggctgaccaggcccaggcacagcacagccaccctgctgtacctcccagctcccggcagtgtctacaccacagtgatggtgctacaggggccatgtggtcacaggacaggtggtcaggaaatgcacacttgactgcggtcgatggtgccgggtccggctgaatgccctggaggctcccaggccagctggggagtcccagtccccagggttggtgtgacctgggcaggcctgcggtgtccatctgtgaatgactgagatggtgggacttcagcttccaaggccaggggccagagtgggagcagggggcactcccgcctttcccctcggcctgtctagacctctctggctcccagtttctgctttgagtggctgggggctgtctcctgcctgtgctgtctgcccgtcgctctgcagggctgctgggcgggcacctccttcccctcccctacctcagctccctcctttggggtctgagggctgtgccccagcttgcctccctgtggcctcccccta

SEQ ID NO: 308044 - DNA, 3312 bp, Homo sapiens
agatctcccgttgtgtgagagaaacgcaagcacggagctcccttgacctgctgcatcctcctcggcaattttttttttttaagtcaaaaagcttggatttcctgaaattgttgaactggatgcggctgttgaagagtgaacttggatcattcattacagactattttcagaaccagcttcttgcaaaaggactgttctttgtggaggagaagatcaagctgtgtgaaggtgaaaatcgcattgaggttctggctgaagtctgggaccacttcttcactgagactctccctaccctgcaggcaatattttatccagttcagagtgttcacgagcccacaggcccaagtgagagttatttgcaactggaggagctggtgaagcaagtggtttctcctttcctcggcatcagcggggaccgtagcttctcaggccccacgtacacgctggccaggcggcactccagggtccggcccaaggtgactgtcctgaactatgcctccccgataaccgcagtcagccggccactgaatgagatggtcttgaccccactgacagagcaggagggggaagcctacctggagaagtgtggcagcgtgcggcggcacacggtggccaatgcccactcggacatccagctgctggccatggccaccatgatgcactcgggcctgggggaggaggccagcagtgagaacaagtgcctgctcctgccacccagcttccccccgccccaccggcagtgctccagtgagcccaacatcaccgacaaccctgacggactggaggagggggccaggggcagccaggagggctcggagctgaactgtgcttccctcagctgagtcgccacccctgggcctttccatctcctgttttgcaaccaggatgaggacccctccatctccgtggattactgaggggggctcttgctttatgcgatgctgccttatttcctttagggtactgtcctggtcaaaatgacctaaggggaaaccgttgttgtaaacctctttattttggtgactgtgaccacttctttgtagccaccaattgtagtgaccagttgcctaatggtcactttctgactccagccttgccagcctgactcagatcctcatctctgggcctttctccctccgatgttggactgcctgatgctcccaatgacatatccaatgctcctggcatttctggagcaggaggttgtcaggacaacacatataaccaccaaggatgtgttggcctttggagttcccctttaggttcctagtgatgtggaggtttatgggtgaaaaattagtggagagggaactcctctcccccattttgtgtagagtgaaaatagcctgaagcccctactcagcagggctctgggaatgtgccttccttattttagtttcagaattgctgggaaagttaccccactggtgggtgaggatctatcctcaacctacatccagatcctatgtgctgcttgcacagaggcctttggcttttgacccaggagggccgcgaggctggagctgccctgtctttcattgagccttagcatttccctctcaggcttcctctcaagctcaaggaactcacccccagataagaagctggtgcctcttgtctctctcatttcagaaacggactttctcatcatgctttcctatggtgggtatgaggggccagctgataccaaccaactggcctgtatctatctatctggatttgacttgaatttttaaaatgtgtatcgtttaaaaaaaaaaatgtttgcaaattttgcacataggatcttgcactgttcattttcagtggggtgagtcttcacactaaaaacacaagcagagctcctgggaaaagagactggaagtggttcaggataaagagatccatggtgggcagggctgttaggtcacagagctctagaagcagctggacttgaacccacaatggcttgtgtaaattcgtaaatttcatggtttctaggaaaagctgcattggggtggggagacccagtttgcctcataggcagaggattctccaggaagcatggaaaatggaatgtttccatgctttacagtgctgggagagaggggagatgtgggcaggaccttttggaaggatgtttattctctgtggttaaagaaatgctgagaatttctagcatgtgaagcacttgggggcagcaggccttggcacggtgctgcatccttctactgctccctccaggtctgggggcttttatccaccttgaatccctatcctcctctttgtagttgtcggtctcactgataacagctccagaaaaaaagacaaggctccccctctgacccttcctgttggtatttatgaaatctcaaagagatgagccaccttggcttccaatatggcaagagggtgctgggagaaggtgaagatcagtctaagctgccacggtgatgagaccttctcattatttaactcttgatggcatttcccttctgagtgaagatttgaaatatgattgattagaattgtgctcttgatggctgggaatttagaaattttattttaagagttatttcattttcatcctaagagtgatgggagagaaatgtccaaaagagatctgctgatctgctgagaatttcaaacaaacaaaaaaataatctctatgtatgtgttggataaagtctacagactgactaacatgcattagcaaatggagcatcagtaggtagcaacatgataatttatgtaactgatagcttctgtccttattagtacacttaacatttgagactagtatttattgatccaggcaaagtaattaattaatcatgcttgggcttactttttcagtttgtaaggttaagcatatgtgcatgcatgcgtgtgtatataaatgccttttccatatcttaaatgtccctgatgaggagagcagtcatcaattaaatatataagctcttaaaatgagaatggaagtgtcagtatagacccagtgtacttaagtgctgatgactgttagccagtttacaactttttaccatcgatgtacacatttgatatttgtgcagtaaatagactgtacctataaaaaattttattgatgtttatggtcatgttagctatcagagagctattggagtgagagctgaggtgtccttaaccactttttctctcctagattcattttcattatttatgctaggattttcttatggttgacatttgatgacaggaagcaatcatgactcttcaagtgagctcacagaaacctttcatgttgtctgtttccaaaatggattcaataaacaacattttgtccatgttacc

SEQ ID NO: 308045 - DNA, 3031 bp, Homo sapiens
  misc_feature (3)..(3): n is a, c, g, or t
  misc_feature (6)..(8): n is a, c, g, or t
  misc_feature (57)..(57): n is a, c, g, or t
ggnagnnngggagatcaaaagcctgggaaccaagtccccaacaaaggacccgagganggccttatccaggctttgcatctctctgggggtttgaaaggagctgctcttgctggctccggtgcaggggatgaatgccagtgaatgccagtgttcagcagggctcctgccaggcggcactccagggtccggcccaaggtgactgtcctgaactatgcctccccgataaccgcagtcagccggccactgaatgagatggtcttgaccccactgacagagcaggagggggaagcctacctggagaagtgtggcagcgtgcggcggcacacggtggccaatgcccactcggacatccagctgctggccatggccaccatgatgcactcgggcctgggggaggaggccagcagtgagaacaagtgcctgctcctgccacccagcttccccccgccccaccggcagtgctccagtgagcccaacatcaccgacaaccctgacggactggaggagggggccaggggcagccaggagggctcggagctgaactgtgcttccctcagctgagtcgccacccctgggcctttccatctcctgttttgcaaccaggatgaggacccctccatctccgtggattactgaggggggctcttgctttatgcgatgctgccttatttcctttagggtactgtcctggtcaaaatgacctaaggggaaaccgttgttgtaaacctctttattttggtgactgtgaccacttctttgtagccaccaattgtagtgaccagttgcctaatggtcactttctgactccagccttgccagcctgactcagatcctcatctctgggcctttctccctccgatgttggactgcctgatgctcccaatgacatatccaatgctcctggcatttctggagcaggaggttgtcaggacaacacatataaccaccaaggatgtgttggcctttggagttcccctttaggttcctagtgatgtggaggtttatgggtgaaaaattagtggagagggaactcctctcccccattttgtgtagagtgaaaatagcctgaagcccctactcagcagggctctgggaatgtgccttccttattttagtttcagaattgctgggaaagttaccccactggtgggtgaggatctatcctcaacctacatccagatcctatgtgctgcttgcacagaggcctttggcttttgacccaggagggccgcgaggctggagctgccctgtctttcattgagccttagcatttccctctcaggcttcctctcaagctcaaggaactcacccccagataagaagctggtgcctcttgtctctctcatttcagaaacggactttctcatcatgctttcctatggtgggtatgaggggccagctgataccaaccaactggcctgtatctatctatctggatttgacttgaatttttaaaatgtgtatcgtttaaaaaaaaaaatgtttgcaaattttgcacataggatcttgcactgttcattttcagtggggtgagtcttcacactaaaaacacaagcagagctcctgggaaaagagactggaagtggttcaggataaagagatccatggtgggcagggctgttaggtcacagagctctagaagcagctggacttgaacccacaatggcttgtgtaaattcgtaaatttcatggtttctaggaaaagctgcattggggtggggagacccagtttgcctcataggcagaggattctccaggaagcatggaaaatggaatgtttccatgctttacagtgctgggagagaggggagatgtgggcaggaccttttggaaggatgtttattctctgtggttaaagaaatgctgagaatttctagcatgtgaagcacttgggggcagcaggccttggcacggtgctgcatccttctactgctccctccaggtctgggggcttttatccaccttgaatccctatcctcctctttgtagttgtcggtctcactgataacagctccagaaaaaaagacaaggctccccctctgacccttcctgttggtatttatgaaatctcaaagagatgagccaccttggcttccaatatggcaagagggtgctgggagaaggtgaagatcagtctaagctgccacggtgatgagaccttctcattatttaactcttgatggcatttcccttctgagtgaagatttgaaatatgattgattagaattgtgctcttgatggctgggaatttagaaattttattttaagagttatttcattttcatcctaagagtgatgggagagaaatgtccaaaagagatctgctgatctgctgagaatttcaaacaaacaaaaaaataatctctatgtatgtgttggataaagtctacagactgactaacatgcattagcaaatggagcatcagtaggtagcaacatgataatttatgtaactgatagcttctgtccttattagtacacttaacatttgagactagtatttattgatccaggcaaagtaattaattaatcatgcttgggcttactttttcagtttgtaaggttaagcatatgtgcatgcatgcgtgtgtatataaatgccttttccatatcttaaatgtccctgatgaggagagcagtcatcaattaaatatataagctcttaaaatgagaatggaagtgtcagtatagacccagtgtacttaagtgctgatgactgttagccagtttacaactttttaccatcgatgtacacatttgatatttgtgcagtaaatagactgtacctataaaaaattttattgatgtttatggtcatgttagctatcagagagctattggagtgagagctgaggtgtccttaaccactttttctctcctagattcattttcattatttatgctaggattttcttatggttgacatttgatgacaggaagcaatcatgactcttcaagtgagctcacagaaacctttcatgttgtctgtttccaaaatggattcaataaacaacattttgtccatgttacc

SEQ ID NO: 308046 - DNA, 2141 bp, Homo sapiens
aaagaggggggaggaaaaaaaaaatttgggggttttgggggtttttttgggggggggcccccccccctttttttggaagtttcccctttaggttcctagtgatgtggaggtttatgggtgaaaaattagtggagagggaactcctctcccccattttgtgtagagtgaaaatagcctgaagcccctactcagcagggctctgggaatgtgccttccttattttagtttcagaattgctgggaaagttaccccactggtgggtgaggatctatcctcaacctacatccagatcctatgtgctgcttgcacagaggcctttggcttttgacccaggagggccgcgaggctggagctgccctgtctttcattgagccttagcatttccctctcaggcttcctctcaagctcaaggaactcacccccagataagaagctggtgcctcttgtctctctcatttcagaaacggactttctcatcatgctttcctatggtgggtatgaggggccagctgataccaaccaactggcctgtatctatctatctggatttgacttgaatttttaaaatgtgtatcgtttaaaaaaaaaaatgtttgcaaattttgcacataggatcttgcactgttcattttcagtggggtgagtcttcacactaaaaacacaagcagagctcctgggaaaagagactggaagtggttcaggataaagagatccatggtgggcagggctgttaggtcacagagctctagaagcagctggacttgaacccacaatggcttgtgtaaattcgtaaatttcatggtttctaggaaaagctgcattggggtggggagacccagtttgcctcataggcagaggattctccaggaagcatggaaaatggaatgtttccatgctttacagtgctgggagagaggggagatgtgggcaggaccttttggaaggatgtttattctctgtggttaaagaaatgctgagaatttctagcatgtgaagcacttgggggcagcaggccttggcacggtgctgcatccttctactgctccctccaggtctgggggcttttatccaccttgaatccctatcctcctctttgtagttgtcggtctcactgataacagctccagaaaaaaagacaaggctccccctctgacccttcctgttggtatttatgaaatctcaaagagatgagccaccttggcttccaatatggcaagagggtgctgggagaaggtgaagatcagtctaagctgccacggtgatgagaccttctcattatttaactcttgatggcatttcccttctgagtgaagatttgaaatatgattgattagaattgtgctcttgatggctgggaatttagaaattttattttaagagttatttcattttcatcctaagagtgatgggagagaaatgtccaaaagagatctgctgatctgctgagaatttcaaacaaacaaaaaaataatctctatgtatgtgttggataaagtctacagactgactaacatgcattagcaaatggagcatcagtaggtagcaacatgataatttatgtaactgatagcttctgtccttattagtacacttaacatttgagactagtatttattgatccaggcaaagtaattaattaatcatgcttgggcttactttttcagtttgtaaggttaagcatatgtgcatgcatgcgtgtgtatataaatgccttttccatatcttaaatgtccctgatgaggagagcagtcatcaattaaatatataagctcttaaaatgagaatggaagtgtcagtatagacccagtgtacttaagtgctgatgactgttagccagtttacaactttttaccatcgatgtacacatttgatatttgtgcagtaaatagactgtacctataaaaaattttattgatgtttatggtcatgttagctatcagagagctattggagtgagagctgaggtgtccttaaccactttttctctcctagattcattttcattatttatgctaggattttcttatggttgacatttgatgacaggaagcaatcatgactcttcaagtgagctcacagaaacctttcatgttgtctgtttccaaaatggattcaataaacaacattttgtccatgttacc

SEQ ID NO: 308047 - DNA, 641 bp, Homo sapiens
  misc_feature (605)..(605): n is a, c, g, or t
  misc_feature (627)..(627): n is a, c, g, or t
catgcacagttctaattgcagtgacccatgacaagtgactaaggcttcaggcctcagtttccttcatcctaactgcaaggatgctgcctgccagcaacacagccttgtacattggaggaggacaatcaggatttgttgagtgagaacctgctggtcatggcaatgaacactgacctttgtgtatcttggctgttcattttccagagtgttcacgagcccacaggcccaagtgagagttatttgcaactggaggagctggtgaagcaagtggtttctcctttcctcggcatcagcggggaccgtagcttctcaggccccacgtacacgctgggtaaggagtgcagctctcaagttgtcaagaggcccagtgatcatgataccagcactgtttaactgagcactgtttaactgagcactgataccagcactgtttaactgagcacagccttttgcttcctgtgcgggtcagtgcaaatccgtgcatcttaagcactcacattcctggcctctggaggttgcagtaaccttctcccccttgatgattcctccccaaggaccgatactgtgcctttgcggtggtgcttgtctgatccacataatgcacncagggaactcgaacccagtgtnaaggatcctgtaga

SEQ ID NO: 308048 - DNA, 901 bp, Homo sapiens
agagcgcgacggggagaaccatccaggtcgctcatttctctccggtgagaaaacttcctcgggaagaccggaaactttttcctaggcgcgcggagtctggggcggaggcgagcggcgggtgtgcgcgactcggggtgattcacgccggggaccccaaggagaagaggcaattcggacataaagagaaacatcaagggcatgagtgcacagaggaaagaccatgtgacggcatggctacaaggcagccatctgtaaaccaaggagagagaccccaaaggaaatcaaccctgctgacaccttgatcgtggacttctagcctccagaactatgtagaaactgcagctcagagatgtccaaggtcacactgtgagtttattggtttcttgtggctgctataacaaatgaccacagccttcatggcttcaaacaacagaaatttattctttcatggttctggaggccataagtgcagaattaaggtggggcagggctgtattccctctaggggggaatctgcttcttttctctttcagctcctggtggctgcattatccagttcctgcgtctgtctccatatcaccttcttctctatgcgtgtctgtgtcttctcctcttctgtctctagtaacttctgcatcccctttataaggacacatgtgattgcgtttatggcccacctggataatctgggaccagcttctcttctcaaaattcttatctgaattgcatcttttgccatataagataatattcacaggttttggtgacaagtgtatgcatctttgtggggggtggggagatgtttttctgcctaccacagtgagtgaatggcaaagtgaccactgattttagggtttatctgcccccagagctctgagtgatacacatttgtggctgtaca

SEQ ID NO: 308049 - DNA, 587 bp, Homo sapiens
ggaattcggccattatggtcggggaaccttctggtcctagaggtgaagctgaactgtcaccaggacttatgacccgcggcttcgctcccattctgcccgtcgagttccacaagatgggctccttccgcaggcctagaccgcgcttcatgagctcccccgtgctcagcgaccttccccgattccaagcaactcggcaggctctgcagctgagctccagctcagcctggaacaggcggctgttgaagagtgaacttggatcattcattacagactattttcagaagaggcaattcggacataaagagaaacatcaagggcatgagtgcacagaggaaagaccatgtgacggcatggctacaaggcagccatctgtaaaccaaggagagagaccccaaaggaaatcaaccctgctgacaccttgatcgtggacttctagcctccagaactgaagtggtgacaccagcctgactcgggtgccttttctctcagcctccactgcacctgtgtctagcacctatacagttccaggaaccatgcaaagtacttcatagacaatctttctggtcatcacagctctccaaggtaac

SEQ ID NO: 308050 - DNA, 3839 bp, Homo sapiens
ggtcagtgagtggcaagccaggcccagagatctctgcgcccgttggaacatccccttctcgggaaggctggaaggccatggtcattcacctctccccagcaaggtgggacctgccctggaagaagaaaccagaccaggtgttggctacgtttgtggttttaagaaagcctgagggcctgaaggcagcccctggagaagccctttccgagggcattcggaaccttctggtcctagaggtgaagctgaactgtcaccaggacttatgacccgcggcttcgctcccattctgcccgtcgagttccacaagatgggctccttccgcaggcctagaccgcgcttcatgagctcccccgtgctcagcgaccttccccgattccaagcaactcggcaggctctgcagctgagctccagctcagcctggaacagcgttcagactgctgtgatcaacgttttcaaagggggtggcttgcaaagcaacgagctctatgccctgaacgaaaacatcaggcggctgttgaagagtgaacttggatcattcattacagactattttcagaaccagcttcttgcaaaaggactgttctttgtggaggagaagatcaagctgtgtgaaggtgaaaatcgcattgaggttctggctgaagtctgggaccacttcttcactgagactctccctaccctgcaggcaatattttatccagttcagggccaggagctgactatccgccagatctccctgctgggcttccgagacctagtcttgctgaaggtgaagctgggtgacctgctgctgctggcccagtccaagctgccctcgtccattgtccagatgttgctcatcctgcagagtgttcacgagcccacaggcccaagtgagagttatttgcaactggaggagctggtgaagcaagtggtttctcctttcctcggcatcagcggggaccgtagcttctcaggccccacgtacacgctggccaggcggcactccagggtccggcccaaggtgactgtcctgaactatgcctccccgataaccgcagtcagccggccactgaatgagatggtcttgaccccactgacagagcaggagggggaagcctacctggagaagtgtggcagcgtgcggcggcacacggtggccaatgcccactcggacatccagctgctggccatggccaccatgatgcactcgggcctgggggaggaggccagcagtgagaacaagtgcctgctcctgccacccagcttccccccgccccaccggcagtgctccagtgagcccaacatcaccgacaaccctgacggactggaggagggggccaggggcagccaggagggctcggagctgaactgtgcttccctcagctgagtcgccacccctgggcctttccatctcctgttttgcaaccaggatgaggacccctccatctccgtggattactgaggggggctcttgctttatgcgatgctgccttatttcctttagggtactgtcctggtcaaaatgacctaaggggaaaccgttgttgtaaacctctttattttggtgactgtgaccacttctttgtagccaccaattgtagtgaccagttgcctaatggtcactttctgactccagccttgccagcctgactcagatcctcatctctgggcctttctccctccgatgttggactgcctgatgctcccaatgacatatccaatgctcctggcatttctggagcaggaggttgtcaggacaacacatataaccaccaaggatgtgttggcctttggagttcccctttaggttcctagtgatgtggaggtttatgggtgaaaaattagtggagagggaactcctctcccccattttgtgtagagtgaaaatagcctgaagcccctactcagcagggctctgggaatgtgccttccttattttagtttcagaattgctgggaaagttaccccactggtgggtgaggatctatcctcaacctacatccagatcctatgtgctgcttgcacagaggcctttggcttttgacccaggagggccgcgaggctggagctgccctgtctttcattgagccttagcatttccctctcaggcttcctctcaagctcaaggaactcacccccagataagaagctggtgcctcttgtctctctcatttcagaaacggactttctcatcatgctttcctatggtgggtatgaggggccagctgataccaaccaactggcctgtatctatctatctggatttgacttgaatttttaaaatgtgtatcgtttaaaaaaaaaaatgtttgcaaattttgcacataggatcttgcactgttcattttcagtggggtgagtcttcacactaaaaacacaagcagagctcctgggaaaagagactggaagtggttcaggataaagagatccatggtgggcagggctgttaggtcacagagctctagaagcagctggacttgaacccacaatggcttgtgtaaattcgtaaatttcatggtttctaggaaaagctgcattggggtggggagacccagtttgcctcataggcagaggattctccaggaagcatggaaaatggaatgtttccatgctttacagtgctgggagagaggggagatgtgggcaggaccttttggaaggatgtttattctctgtggttaaagaaatgctgagaatttctagcatgtgaagcacttgggggcagcaggccttggcacggtgctgcatccttctactgctccctccaggtctgggggcttttatccaccttgaatccctatcctcctctttgtagttgtcggtctcactgataacagctccagaaaaaaagacaaggctccccctctgacccttcctgttggtatttatgaaatctcaaagagatgagccaccttggcttccaatatggcaagagggtgctgggagaaggtgaagatcagtctaagctgccacggtgatgagaccttctcattatttaactcttgatggcatttcccttctgagtgaagatttgaaatatgattgattagaattgtgctcttgatggctgggaatttagaaattttattttaagagttatttcattttcatcctaagagtgatgggagagaaatgtccaaaagagatctgctgatctgctgagaatttcaaacaaacaaaaaaataatctctatgtatgtgttggataaagtctacagactgactaacatgcattagcaaatggagcatcagtaggtagcaacatgataatttatgtaactgatagcttctgtccttattagtacacttaacatttgagactagtatttattgatccaggcaaagtaattaattaatcatgcttgggcttactttttcagtttgtaaggttaagcatatgtgcatgcatgcgtgtgtatataaatgccttttccatatcttaaatgtccctgatgaggagagcagtcatcaattaaatatataagctcttaaaatgagaatggaagtgtcagtatagacccagtgtacttaagtgctgatgactgttagccagtttacaactttttaccatcgatgtacacatttgatatttgtgcagtaaatagactgtacctataaaaaattttattgatgtttatggtcatgttagctatcagagagctattggagtgagagctgaggtgtccttaaccactttttctctcctagattcattttcattatttatgctaggattttcttatggttgacatttgatgacaggaagcaatcatgactcttcaagtgagctcacagaaacctttcatgttgtctgtttccaaaatggattcaataaacaacattttgtccatgttacc

SEQ ID NO: 308051 - DNA, 3863 bp, Homo sapiens
agagcgcgacggggagaaccatccaggtcgctcatttctctccggtgagaaaacttcctcgggaagaccggaaactttttcctaggcgcgcggagtctggggcggaggcgagcggcgggtgtgcgcgactcggggtgattcacgccggggaccccaaggaggtgttggctacgtttgtggttttaagaaagcctgagggcctgaaggcagcccctggagaagccctttccgagggcattcggaaccttctggtcctagaggtgaagctgaactgtcaccaggacttatgacccgcggcttcgctcccattctgcccgtcgagttccacaagatgggctccttccgcaggcctagaccgcgcttcatgagctcccccgtgctcagcgaccttccccgattccaagcaactcggcaggctctgcagctgagctccagctcagcctggaacagcgttcagactgctgtgatcaacgttttcaaagggggtggcttgcaaagcaacgagctctatgccctgaacgaaaacatcaggcggctgttgaagagtgaacttggatcattcattacagactattttcagaaccagcttcttgcaaaaggactgttctttgtggaggagaagatcaagctgtgtgaaggtgaaaatcgcattgaggttctggctgaagtctgggaccacttcttcactgagactctccctaccctgcaggcaatattttatccagttcagggccaggagctgactatccgccagatctccctgctgggcttccgagacctagtcttgctgaaggtgaagctgggtgacctgctgctgctggcccagtccaagctgccctcgtccattgtccagatgttgctcatcctgcagagtgttcacgagcccacaggcccaagtgagagttatttgcaactggaggagctggtgaagcaagtggtttctcctttcctcggcatcagcggggaccgtagcttctcaggccccacgtacacgctggccaggcggcactccagggtccggcccaaggtgactgtcctgaactatgcctccccgataaccgcagtcagccggccactgaatgagatggtcttgaccccactgacagagcaggagggggaagcctacctggagaagtgtggcagcgtgcggcggcacacggtggccaatgcccactcggacatccagctgctggccatggccaccatgatgcactcgggcctgggggaggaggccagcagtgagaacaagtgcctgctcctgccacccagcttccccccgccccaccggcagtgctccagtgagcccaacatcaccgacaaccctgacggactggaggagggggccaggggcagccaggagggctcggagctgaactgtgcttccctcagctgagtcgccacccctgggcctttccatctcctgttttgcaaccaggatgaggacccctccatctccgtggattactgaggggggctcttgctttatgcgatgctgccttatttcctttagggtactgtcctggtcaaaatgacctaaggggaaaccgttgttgtaaacctctttattttggtgactgtgaccacttctttgtagccaccaattgtagtgaccagttgcctaatggtcactttctgactccagccttgccagcctgactcagatcctcatctctgggcctttctccctccgatgttggactgcctgatgctcccaatgacatatccaatgctcctggcatttctggagcaggaggttgtcaggacaacacatataaccaccaaggatgtgttggcctttggagttcccctttaggttcctagtgatgtggaggtttatgggtgaaaaattagtggagagggaactcctctcccccattttgtgtagagtgaaaatagcctgaagcccctactcagcagggctctgggaatgtgccttccttattttagtttcagaattgctgggaaagttaccccactggtgggtgaggatctatcctcaacctacatccagatcctatgtgctgcttgcacagaggcctttggcttttgacccaggagggccgcgaggctggagctgccctgtctttcattgagccttagcatttccctctcaggcttcctctcaagctcaaggaactcacccccagataagaagctggtgcctcttgtctctctcatttcagaaacggactttctcatcatgctttcctatggtgggtatgaggggccagctgataccaaccaactggcctgtatctatctatctggatttgacttgaatttttaaaatgtgtatcgtttaaaaaaaaaaatgtttgcaaattttgcacataggatcttgcactgttcattttcagtggggtgagtcttcacactaaaaacacaagcagagctcctgggaaaagagactggaagtggttcaggataaagagatccatggtgggcagggctgttaggtcacagagctctagaagcagctggacttgaacccacaatggcttgtgtaaattcgtaaatttcatggtttctaggaaaagctgcattggggtggggagacccagtttgcctcataggcagaggattctccaggaagcatggaaaatggaatgtttccatgctttacagtgctgggagagaggggagatgtgggcaggaccttttggaaggatgtttattctctgtggttaaagaaatgctgagaatttctagcatgtgaagcacttgggggcagcaggccttggcacggtgctgcatccttctactgctccctccaggtctgggggcttttatccaccttgaatccctatcctcctctttgtagttgtcggtctcactgataacagctccagaaaaaaagacaaggctccccctctgacccttcctgttggtatttatgaaatctcaaagagatgagccaccttggcttccaatatggcaagagggtgctgggagaaggtgaagatcagtctaagctgccacggtgatgagaccttctcattatttaactcttgatggcatttcccttctgagtgaagatttgaaatatgattgattagaattgtgctcttgatggctgggaatttagaaattttattttaagagttatttcattttcatcctaagagtgatgggagagaaatgtccaaaagagatctgctgatctgctgagaatttcaaacaaacaaaaaaataatctctatgtatgtgttggataaagtctacagactgactaacatgcattagcaaatggagcatcagtaggtagcaacatgataatttatgtaactgatagcttctgtccttattagtacacttaacatttgagactagtatttattgatccaggcaaagtaattaattaatcatgcttgggcttactttttcagtttgtaaggttaagcatatgtgcatgcatgcgtgtgtatataaatgccttttccatatcttaaatgtccctgatgaggagagcagtcatcaattaaatatataagctcttaaaatgagaatggaagtgtcagtatagacccagtgtacttaagtgctgatgactgttagccagtttacaactttttaccatcgatgtacacatttgatatttgtgcagtaaatagactgtacctataaaaaattttattgatgtttatggtcatgttagctatcagagagctattggagtgagagctgaggtgtccttaaccactttttctctcctagattcattttcattatttatgctaggattttcttatggttgacatttgatgacaggaagcaatcatgactcttcaagtgagctcacagaaacctttcatgttgtctgtttccaaaatggattcaataaacaacattttgtccatgttacc

SEQ ID NO: 308052 - DNA, 3610 bp, Homo sapiens
cggctgtgggagctccgcggccgaagcgtttgttgactcgcgctggagaggaaccgaggctggacgggaccccatctgagggcagagctgggggaggagggagggacggagggagggagagctgggctcagcgaccttccccgattccaagcaactcggcaggctctgcagctgagctccagctcagcctggaacagcgttcagactgctgtgatcaacgttttcaaagggggtggcttgcaaagcaacgagctctatgccctgaacgaaaacatcaggcggctgttgaagagtgaacttggatcattcattacagactattttcagaaccagcttcttgcaaaaggactgttctttgtggaggagaagatcaagctgtgtgaaggtgaaaatcgcattgaggttctggctgaagtctgggaccacttcttcactgagactctccctaccctgcaggcaatattttatccagttcagggccaggagctgactatccgccagatctccctgctgggcttccgagacctagtcttgctgaaggtgaagctgggtgacctgctgctgctggcccagtccaagctgccctcgtccattgtccagatgttgctcatcctgcagagtgttcacgagcccacaggcccaagtgagagttatttgcaactggaggagctggtgaagcaagtggtttctcctttcctcggcatcagcggggaccgtagcttctcaggccccacgtacacgctggccaggcggcactccagggtccggcccaaggtgactgtcctgaactatgcctccccgataaccgcagtcagccggccactgaatgagatggtcttgaccccactgacagagcaggagggggaagcctacctggagaagtgtggcagcgtgcggcggcacacggtggccaatgcccactcggacatccagctgctggccatggccaccatgatgcactcgggcctgggggaggaggccagcagtgagaacaagtgcctgctcctgccacccagcttccccccgccccaccggcagtgctccagtgagcccaacatcaccgacaaccctgacggactggaggagggggccaggggcagccaggagggctcggagctgaactgtgcttccctcagctgagtcgccacccctgggcctttccatctcctgttttgcaaccaggatgaggacccctccatctccgtggattactgaggggggctcttgctttatgcgatgctgccttatttcctttagggtactgtcctggtcaaaatgacctaaggggaaaccgttgttgtaaacctctttattttggtgactgtgaccacttctttgtagccaccaattgtagtgaccagttgcctaatggtcactttctgactccagccttgccagcctgactcagatcctcatctctgggcctttctccctccgatgttggactgcctgatgctcccaatgacatatccaatgctcctggcatttctggagcaggaggttgtcaggacaacacatataaccaccaaggatgtgttggcctttggagttcccctttaggttcctagtgatgtggaggtttatgggtgaaaaattagtggagagggaactcctctcccccattttgtgtagagtgaaaatagcctgaagcccctactcagcagggctctgggaatgtgccttccttattttagtttcagaattgctgggaaagttaccccactggtgggtgaggatctatcctcaacctacatccagatcctatgtgctgcttgcacagaggcctttggcttttgacccaggagggccgcgaggctggagctgccctgtctttcattgagccttagcatttccctctcaggcttcctctcaagctcaaggaactcacccccagataagaagctggtgcctcttgtctctctcatttcagaaacggactttctcatcatgctttcctatggtgggtatgaggggccagctgataccaaccaactggcctgtatctatctatctggatttgacttgaatttttaaaatgtgtatcgtttaaaaaaaaaaatgtttgcaaattttgcacataggatcttgcactgttcattttcagtggggtgagtcttcacactaaaaacacaagcagagctcctgggaaaagagactggaagtggttcaggataaagagatccatggtgggcagggctgttaggtcacagagctctagaagcagctggacttgaacccacaatggcttgtgtaaattcgtaaatttcatggtttctaggaaaagctgcattggggtggggagacccagtttgcctcataggcagaggattctccaggaagcatggaaaatggaatgtttccatgctttacagtgctgggagagaggggagatgtgggcaggaccttttggaaggatgtttattctctgtggttaaagaaatgctgagaatttctagcatgtgaagcacttgggggcagcaggccttggcacggtgctgcatccttctactgctccctccaggtctgggggcttttatccaccttgaatccctatcctcctctttgtagttgtcggtctcactgataacagctccagaaaaaaagacaaggctccccctctgacccttcctgttggtatttatgaaatctcaaagagatgagccaccttggcttccaatatggcaagagggtgctgggagaaggtgaagatcagtctaagctgccacggtgatgagaccttctcattatttaactcttgatggcatttcccttctgagtgaagatttgaaatatgattgattagaattgtgctcttgatggctgggaatttagaaattttattttaagagttatttcattttcatcctaagagtgatgggagagaaatgtccaaaagagatctgctgatctgctgagaatttcaaacaaacaaaaaaataatctctatgtatgtgttggataaagtctacagactgactaacatgcattagcaaatggagcatcagtaggtagcaacatgataatttatgtaactgatagcttctgtccttattagtacacttaacatttgagactagtatttattgatccaggcaaagtaattaattaatcatgcttgggcttactttttcagtttgtaaggttaagcatatgtgcatgcatgcgtgtgtatataaatgccttttccatatcttaaatgtccctgatgaggagagcagtcatcaattaaatatataagctcttaaaatgagaatggaagtgtcagtatagacccagtgtacttaagtgctgatgactgttagccagtttacaactttttaccatcgatgtacacatttgatatttgtgcagtaaatagactgtacctataaaaaattttattgatgtttatggtcatgttagctatcagagagctattggagtgagagctgaggtgtccttaaccactttttctctcctagattcattttcattatttatgctaggattttcttatggttgacatttgatgacaggaagcaatcatgactcttcaagtgagctcacagaaacctttcatgttgtctgtttccaaaatggattcaataaacaacattttgtccatgttacc

SEQ ID NO: 308053 - DNA, 3051 bp, Homo sapiens
gatccaggtccccaatgtaaggatgccgaggatggacgttatgcaggtgttgcattctctcttggcgggtttcgatagaggagctgtcttcttgcttggactccggtgcagttggtgatgaattgccagtagtaagtgacatgcctgtttcagctatggcgctcctgcccaagggtctggcccacttgccaatgtggatccaggtcccgacaggttgacttgtcctgaactatgcctccccgataaccgcagtcagccggccactgaatgagatggtcttgaccccactgacagagcaggagggggaagcctacctggagaagtgtggcagcgtgcggcggcacacggtggccaatgcccactcggacatccagctgctggccatggccaccatgatgcactcgggcctgggggaggaggccagcagtgagaacaagtgcctgctcctgccacccagcttccccccgccccaccggcagtgctccagtgagcccaacatcaccgacaaccctgacggactggaggagggggccaggggcagccaggagggctcggagctgaactgtgcttccctcagctgagtcgccacccctgggcctttccatctcctgttttgcaaccaggatgaggacccctccatctccgtggattactgaggggggctcttgctttatgcgatgctgccttatttcctttagggtactgtcctggtcaaaatgacctaaggggaaaccgttgttgtaaacctctttattttggtgactgtgaccacttctttgtagccaccaattgtagtgaccagttgcctaatggtcactttctgactccagccttgccagcctgactcagatcctcatctctgggcctttctccctccgatgttggactgcctgatgctcccaatgacatatccaatgctcctggcatttctggagcaggaggttgtcaggacaacacatataaccaccaaggatgtgttggcctttggagttcccctttaggttcctagtgatgtggaggtttatgggtgaaaaattagtggagagggaactcctctcccccattttgtgtagagtgaaaatagcctgaagcccctactcagcagggctctgggaatgtgccttccttattttagtttcagaattgctgggaaagttaccccactggtgggtgaggatctatcctcaacctacatccagatcctatgtgctgcttgcacagaggcctttggcttttgacccaggagggccgcgaggctggagctgccctgtctttcattgagccttagcatttccctctcaggcttcctctcaagctcaaggaactcacccccagataagaagctggtgcctcttgtctctctcatttcagaaacggactttctcatcatgctttcctatggtgggtatgaggggccagctgataccaaccaactggcctgtatctatctatctggatttgacttgaatttttaaaatgtgtatcgtttaaaaaaaaaaatgtttgcaaattttgcacataggatcttgcactgttcattttcagtggggtgagtcttcacactaaaaacacaagcagagctcctgggaaaagagactggaagtggttcaggataaagagatccatggtgggcagggctgttaggtcacagagctctagaagcagctggacttgaacccacaatggcttgtgtaaattcgtaaatttcatggtttctaggaaaagctgcattggggtggggagacccagtttgcctcataggcagaggattctccaggaagcatggaaaatggaatgtttccatgctttacagtgctgggagagaggggagatgtgggcaggaccttttggaaggatgtttattctctgtggttaaagaaatgctgagaatttctagcatgtgaagcacttgggggcagcaggccttggcacggtgctgcatccttctactgctccctccaggtctgggggcttttatccaccttgaatccctatcctcctctttgtagttgtcggtctcactgataacagctccagaaaaaaagacaaggctccccctctgacccttcctgttggtatttatgaaatctcaaagagatgagccaccttggcttccaatatggcaagagggtgctgggagaaggtgaagatcagtctaagctgccacggtgatgagaccttctcattatttaactcttgatggcatttcccttctgagtgaagatttgaaatatgattgattagaattgtgctcttgatggctgggaatttagaaattttattttaagagttatttcattttcatcctaagagtgatgggagagaaatgtccaaaagagatctgctgatctgctgagaatttcaaacaaacaaaaaaataatctctatgtatgtgttggataaagtctacagactgactaacatgcattagcaaatggagcatcagtaggtagcaacatgataatttatgtaactgatagcttctgtccttattagtacacttaacatttgagactagtatttattgatccaggcaaagtaattaattaatcatgcttgggcttactttttcagtttgtaaggttaagcatatgtgcatgcatgcgtgtgtatataaatgccttttccatatcttaaatgtccctgatgaggagagcagtcatcaattaaatatataagctcttaaaatgagaatggaagtgtcagtatagacccagtgtacttaagtgctgatgactgttagccagtttacaactttttaccatcgatgtacacatttgatatttgtgcagtaaatagactgtacctataaaaaattttattgatgtttatggtcatgttagctatcagagagctattggagtgagagctgaggtgtccttaaccactttttctctcctagattcattttcattatttatgctaggattttcttatggttgacatttgatgacaggaagcaatcatgactcttcaagtgagctcacagaaacctttcatgttgtctgtttccaaaatggattcaataaacaacattttgtccatgttacc

SEQ ID NO: 308054 - DNA, 1284 bp, Homo sapiens
  misc_feature (1248)..(1248): n is a, c, g, or t
  misc_feature (1270)..(1270): n is a, c, g, or t
ggtcagtgagtggcaagccaggcccagagatctctgcgcccgttggaacatccccttctcgggaaggctggaaggccatggtcattcacctctccccagcaaggtgggacctgccctggaagaagaaaccagaccaggtgttggctacgtttgtggttttaagaaagcctgagggcctgaaggcagcccctggagaagccctttccgagggcattcggaaccttctggtcctagaggtgaagctgaactgtcaccaggacttatgacccgcggcttcgctcccattctgcccgtcgagttccacaagatgggctccttccgcaggcctagaccgcgcttcatgagctcccccgtgctcagcgaccttccccgattccaagcaactcggcaggctctgcagctgagctccagctcagcctggaacagcgttcagactgctgtgatcaacgttttcaaagggggtggcttgcaaagcaacgagctctatgccctgaacgaaaacatcaggcggctgttgaagagtgaacttggatcattcattacagactattttcagaaccagcttcttgcaaaaggactgttctttgtggaggagaagatcaagctgtgtgaaggtgaaaatcgcattgaggttctggctgaagtctgggaccacttcttcactgagactctccctaccctgcaggcaatattttatccagttcagggccaggagctgactatccgccagatctccctgctgggcttccgagacctagtcttgctgaaggtgaagctgggtgacctgctgctgctggcccagtccaagctgccctcgtccattgtccagatgttgctcatcctgcagagtgttcacgagcccacaggcccaagtgagagttatttgcaactggaggagctggtgaagcaagtggtttctcctttcctcggcatcagcggggaccgtagcttctcaggccccacgtacacgctgggtaaggagtgcagctctcaagttgtcaagaggcccagtgatcatgataccagcactgtttaactgagcactgtttaactgagcactgataccagcactgtttaactgagcacagccttttgcttcctgtgcgggtcagtgcaaatccgtgcatcttaagcactcacattcctggcctctggaggttgcagtaaccttctcccccttgatgattcctccccaaggaccgatactgtgcctttgcggtggtgcttgtctgatccacataatgcacncagggaactcgaacccagtgtnaaggatcctgtaga

SEQ ID NO: 308055 - DNA, 1217 bp, Homo sapiens
ataggaatttacttgttttccactcaaggaaaagaagtaaattcctatgtcagagtaaccgaggtggttgaagaataggaatttacttcttttccttgagtggaaaacactttagaaaataataacaaacattattataaactaatatatgtgagagtacttagttgaaacaaaaaggaattttagtagacagtattatattatctttgaaaatcaaggagaagtttatgcaactgaaaatgtttacacactgtgctgcaatctactgtttgtgaatgtcaatgtattatcaggaaacatgtctatacgatcgcagagttgtatttcctcacaaacttctttacgaagagtgaaatatgtttttgtacctctcagtttcagtcagggacatattttgtgcaatatttctgtgattgtgcctatgcgtgatgaatgaatgcatttcaatcatacattgcctaaatcataacttgatgatgcttgggaaagaatcaacagttaaaacttcatgaagttctaatgtctgtgttccaaaacacatcacattattaggttgtagggagatatgtatgtgtgctccctggggtggggagttttctagttactagaccatctccatttttagcacttggcagcctcatgatccttttataaataggagattaacaggagagcagcaatacgattttgccaatggaataacagatttgccggcattcactgaaagagggcagatattgggtccttgtgacttcaactgactcttccgaattgtatgaatttatcaatgtattagataaacccagtttcagaataataaagaaaaaatattagaccaaataatgtggctaatagtggtatgatttctagcccgtgggtttaaaactgtatcctaaagagtcattttaaaataatataaatatttaaaagtgtaactgctatctttatgttctgaaataagttaaaacattttaaaatatgaatactgtagtttaaaagaaagaaatggtgggaaggaaaagtagagaaagaaatgccaattccagtccaaagctttgtttgccaagttttcttagaatgaattttaccaatgtatgggttcttgttaacagaatgtgtaacagaaatactgaaagacttttgcctaaagtggcattattgactgctggtgtgatgctactgtaatgtgataaattattaaattgttgcaaagtgct

SEQ ID NO: 308056 - DNA, 5258 bp, Homo sapiens
gggtggattaattttttttttttgacgttcttagaacagtgcctgacttaattctacttcatagggttgatgtaattttgagacttaaataagttgatactaaaataccacttagtgtcccgaacactgtttgacattttagtatcaaccaagtctcaaggttacttcaatcctgtgaactagagccaaggcacctccagtggcctttcagaagttccatttccactcccgcctcatctcctaattctatctccccgttctctttactcgagccctcctggccttgcccttccttaggcctgatacgcacctatctgaagacctttgcactgcactccagcctggaaggcagagagagactccgtttcaaaaaagaaaagaattctgggtttgaatcctgcctctccgtctgctagggatatgatttagggcaagttgcttgagctctttgggcctctgttttcacgtctgtatgatagaggtggtattgtttgacttgtatttgtgaagtttcaatgagattgataattgtcgattttatgttaatccctagtacatggcctgctgtcaacacccaggacacccaggatatggtctttgctgtttgattttcctcatccccagtctcaaggggaagccaggacaatgagaacagccacttcccatcaggagtcactgcaaggcccccagggtgggatggtggggagataagaaccgtgagagaagttggcacaaaggagttatgggacaaagggtccaagataggcagaaaagaaaatgttgccagttgatggggaagaaaggaagtcggagggctcagacactgagggggacagaacatctccatgtgcagtctcatctcttatagtcagcaacaggtatccacggggagggccctacatcatctgctaccctgaaggatctggaggtaggaggctctgggcggaggtgcagtgaccccgcaggccagccctccaacctcctcccgcagcggggactgggtgcccctctgccagctgagacagcccacacacaacccagccctaatgatcgttctctctacctctcccccaagtcctcctccgcctcctcctctctgcatgcgcgtcagagcccgtgccaagaacaagcagcagtcctgaactcgaggtccataaaaatcagtcgactgaatgacaccatcaaatctttgaaacaacagaagaaacaagtggaacatcagctggaagaagaaaagaaagcaaacaatgagaaacagaaagctgaaagggagctagagggtcaaatccagagattgaacacagagaaaaagaaactaaatacggacctgtatcacatgaaacattctctcagatactttgaagaagagtccaaggatctggccggccgcctgcaacgttcatcgcagcgtataggagagttagagtggtctctctgtgctgtcgccgccacacagaagaagaagccggatgggttctcgagccgcagtaaagcacttctcaagcggcagttagagcagtccatacgggagcagatactgctgaaaggacacgtgacacagttgaaggagtcgcttaaagaagtccagctggagagagatcaatatgctgaacaaataaaaggagagagggcccagtggcagcagaggatgaggaaaatgtcgcaggaggtttgcacattgaaggaggagaagaagcatgatacgcatcgggtagaggagctggagaggagcttgtccagactcaaaaaccagatggctgagccactgcccccggatgccccagcagtgtcctctgaggtggagctgcaagacctgaggaaggagctggagagagtggcaggagagctccaggctcaggtggaaaacaatcagtgcatcagtctcctgaaccgtgggcaaaaggagaggcttcgcgagcaggaggagaggcttcaggagcagcaggagaggcttcgggaacaggagaagaggcttcagcagctggccgagccacagagcgacttggaggagctgaagcacgagaacaagagcgcactgcagttggagcagcaagtaaaggagctgcaggagaagctgggccaggtgacggagacgctcacctcggctgagaaggagccagaggcagcagtcccagcctcagggactgggggcgagtctagcggccttatggacctcctggaggagaaggtggacctgagggagcatgtggagaaactggaacttggattcatccagtaccggagagagagatgccatcagaaagtacatcgccttctaacagagccaggggacagtgccaaagatgcgtcaccgggaggaggccatcatcaggctggcccaggacgaggaggagaggaaggtgaagctgttggagctgcaggagatggtgttgcggcttgtggcagctacagcgaggggcacggcaaattcctggccgctgcccggaaccctgctgctgaacccagtccaggagccccagccccccaggagctcggggctgccgacaagcatggtgatctttgtgaggcgagcctcaccaacagcgtggagcctgcacaaggagaagccagggagggttcttcccaggacaaccctactgcacagccagtcgtgcagctccttggtgagatgcaggaccaccaggagcacccaggcttgggcagcaactgctgtgtgccatgcttttgctgggcttggctgccgagaagaaggagataaacaccaccatcatcaaagagctgctcaagaaatttttaaaaacgaaacaaagttatggggttaatctcctacacaattcatttacttcatttgaatgttagagctactcatgattatttgtgtttctaatttatagtttaagtttatttgtaaaaagttaaaagagagtgggtctctgtgcctctcactgatgttcactctggcatcctttagcatttttcttttttcatttcataattgtaggtcattagcatgcatatcgagtttgcccttacgtggtgggagttcaaacacacaaagacccactctttgcacaaaactgttctcgctggtttggaataggctcccgtgcttttttaatgttattgcagcatggatgttcattacagaattcagataaaatttgctaatgttctgctatgatgtttgatctcatcttaatcacagtgagctcttccatagctcaatatgcggtttgccctcaagtgtgcactgtttattactttgtaatatgccactatgagtactgacacttagagctgtttaaaggccgagaactggaaacagcctttcctccattttctgtgtattggtgatgggagtgataaccttttgggggagctttctaaatctcgcagaagaggaaagtggcctgctctggcaggtatgtgcaggatacagtgtgtttcatctgttccggtgccaagaatgagcactgtactgtggcagttccctttggatttgtatgtgctctgggctcatgaagatattgcatcgtgagctgcagcagttgcactctttttcagtgacctaaaaatggcttatttccgaggaatgaaaggctgccatcgttggctgtggatgtggaaaacctttcctagcttagagcatttgtatctacaatacattttaaagtcagagttcgtgttccctgttttaatcacatgactacctgtcccagtacacgaaagggcgctggttggcattcttcttaatgtatttagtaaagatcataagacatcctttaagagtttaaatgtctctgaaacaggcatacaggctctagtcaagaatgaattagagtgaaggaaagctgtgtgacacctggcattcctctctgttcatggagcttctttgaggcttgaagtttgattttactatctagacctctctggctaatacctattcttcaaccacctcggttactctgacataggaatttacttcttttccttgagtggaaaacactttagaaaataataacaaacattattataaactaatatatgtgagagtacttagttgaaacaaaaaggaattttagtagacagtattatattatctttgaaaatcaaggagaagtttatgcaactgaaaatgtttacacactgtgctgcaatctactgtttgtgaatgtcaatgtattatcaggaaacatgtctatacgatcgcagagttgtatttcctcacaaacttctttacgaagagtgaaatatgtttttgtacctctcagtttcagtcagggacatattttgtgcaatatttctgtgattgtgcctatgcgtgatgaatgaatgcatttcaatcatacattgcctaaatcataacttgatgatgcttgggaaagaatcaacagttaaaacttcatgaagttctaatgtctgtgttccaaaacacatcacattattaggttgtagggagatatgtatgtgtgctccctggggtggggagttttctagttactagaccatctccatttttagcacttggcagcctcatgatccttttataaataggagattaacaggagagcagcaatacgattttgccaatggaataacagatttgccggcattcactgaaagagggcagatattgggtccttgtgacttcaactgactcttccgaattgtatgaatttatcaatgtattagataaacccagtttcagaataataaagaaaaaatattagaccaaataatgtggctaatagtggtatgatttctagcccgtgggtttaaaactgtatcctaaagagtcattttaaaataatataaatatttaaaagtgtaactgctatctttatgttctgaaataagttaaaacattttaaaatatgaatactgtagtttaaaagaaagaaatggtgggaaggaaaagtagagaaagaaatgccaattccagtccaaagctttgtttgccaagttttcttagaatgaattttaccaatgtatgggttcttgttaacagaatgtgtaacagaaatactgaaagacttttgcctaaagtggcattattgactgctggtgtgatgctactgtaatgtgataaattattaaattgttgcaaagtgctgtttttgccttaaaattttattttgcgcatcttgaaaattatagtattaaaggtattgatactgtgcaaatactgggcatgcttggcatgagataatctgtttcattttcacaaaattgtagtataactatgcaagtgtttattaaaagaacacaaaataaaaaaggtatgggattaaaaaaaa

SEQ ID NO: 308057 - DNA, 5332 bp, Homo sapiens
ttggaactactgacctcaggtgatccgcccactttggcctcccgaaagtgctgggattacagtcatgagccaccatgcccagcctatttatttctgattctttaagggtgactggacgtgttgatcagcgctcgctgggatttggctgacgtgccccagccccgcctccctccccaccccacaatggcagaagaaactggacagagtaaattagctgcagccaagaaaaagttcaaagaatattggcagagaaaccgccctggtgttccagcagcagcgaagaggaacacgaaagcaaatggcagtagccctgagacggccgcttctggtggttgccactcatctgaggctgtgagtcttgcctggacaggcttttggggacagggggcccaaggagcagtagagggcaatcgttaagattgtggatggactgttgggtactggtgaaggattctggatttggccgggcacagtggctcacgcctgtaatccccacacttcgggagaccgaggcaggtggatcacaaggtcaggagatcgagaccatccaggcaaacacggtgaaatactaaaaaatacaaaaaaaaaagccgggcgtggtggcgggcgcctgcagtcccagctgctccggagtctgagggaggagaatggcgtgaacctaggaggcggagcttgcagtgagccaagatcacgccactgcactccagcctggaaggcagagagagactccgtttcaaaaaagaaaagaattctgggtttgaatcctgcctctccgtctgctagggatatgatttagggcaagttgcttgagctctttgggcctctgttttcacgtctgtatgatagaggtggtattgtttgacttgtatttgtgaagtttcaatgagattgataattgtcgattttatgttaatccctagtacatggcctgctgtcaacacccaggacacccaggatatggtctttgctgtttgattttcctcatccccagtctcaaggggaagccaggacaatgagaacagccacttcccatcaggagtcactgcaaggcccccagggtgggatggtggggagataagaaccgtgagagaagttggcacaaaggagttatgggacaaagggtccaagataggcagaaaagaaaatgttgccagttgatggggaagaaaggaagtcggagggctcagacactgagggggacagaacatctccatgtgcagtctcatctcttatagtcagcaacaggtatccacggggagggccctacatcatctgctaccctgaaggatctggaggtaggaggctctgggcggaggtgcagtgaccccgcaggccagccctccaacctcctcccgcagcggggactgggtgcccctctgccagctgagacagcccacacacaacccagccctaatgatcgttctctctacctctcccccaagtcctcctccgcctcctcctctctgcatgcgcgtcagagcccgtgccaagaacaagcagcagtcctgaactcgaggtccataaaaatcagtcgactgaatgacaccatcaaatctttgaaacaacagaagaaacaagtggaacatcagctggaagaagaaaagaaagcaaacaatgagaaacagaaagctgaaagggagctagagggtcaaatccagagattgaacacagagaaaaagaaactaaatacggacctgtatcacatgaaacattctctcagatactttgaagaagagtccaaggatctggccggccgcctgcaacgttcatcgcagcgtataggagagttagagtggtctctctgtgctgtcgccgccacacagaagaagaagccggatgggttctcgagccgcagtaaagcacttctcaagcggcagttagagcagtccatacgggagcagatactgctgaaaggacacgtgacacagttgaaggagtcgcttaaagaagtccagctggagagagatcaatatgctgaacaaataaaaggagagagggcccagtggcagcagaggatgaggaaaatgtcgcaggaggtttgcacattgaaggaggagaagaagcatgatacgcatcgggtagaggagctggagaggagcttgtccagactcaaaaaccagatggctgagccactgcccccggatgccccagcagtgtcctctgaggtggagctgcaagacctgaggaaggagctggagagagtggcaggagagctccaggctcaggtggaaaacaatcagtgcatcagtctcctgaaccgtgggcaaaaggagaggcttcgcgagcaggaggagaggcttcaggagcagcaggagaggcttcgggaacaggagaagaggcttcagcagctggccgagccacagagcgacttggaggagctgaagcacgagaacaagagcgcactgcagttggagcagcaagtaaaggagctgcaggagaagctgggccaggtgacggagacgctcacctcggctgagaaggagccagaggcagcagtcccagcctcagggactgggggcgagtctagcggccttatggacctcctggaggagaaggtggacctgagggagcatgtggagaaactggaacttggattcatccagtaccggagagagagatgccatcagaaagtacatcgccttctaacagagccaggggacagtgccaaagatgcgtcaccgggaggaggccatcatcaggctggcccaggacgaggaggagaggaaggtgaagctgttggagctgcaggagatggtgttgcggcttgtggcagctacagcgaggggcacggcaaattcctggccgctgcccggaaccctgctgctgaacccagtccaggagccccagccccccaggagctcggggctgccgacaagcatggtgatctttgtgaggcgagcctcaccaacagcgtggagcctgcacaaggagaagccagggagggttcttcccaggacaaccctactgcacagccagtcgtgcagctccttggtgagatgcaggaccaccaggagcacccaggcttgggcagcaactgctgtgtgccatgcttttgctgggcttggctgccgagaagaaggagataaacaccaccatcatcaaagagctgctcaagaaatttttaaaaacgaaacaaagttatggggttaatctcctacacaattcatttacttcatttgaatgttagagctactcatgattatttgtgtttctaatttatagtttaagtttatttgtaaaaagttaaaagagagtgggtctctgtgcctctcactgatgttcactctggcatcctttagcatttttcttttttcatttcataattgtaggtcattagcatgcatatcgagtttgcccttacgtggtgggagttcaaacacacaaagacccactctttgcacaaaactgttctcgctggtttggaataggctcccgtgcttttttaatgttattgcagcatggatgttcattacagaattcagatcttccatagctcaatatgcggtttgccctcaagtgtgcactgtttattactttgtaatatgccactatgagtactgacacttagagctgtttaaaggccgagaactggaaacagcctttcctccattttctgtgtattggtgatgggagtgataaccttttgggggagctttctaaatctcgcagaagaggaaagtggcctgctctggcaggtatgtgcaggatacagtgtgtttcatctgttccggtgccaagaatgagcactgtactgtggcagttccctttggatttgtatgtgctctgggctcatgaagatattgcatcgtgagctgcagcagttgcactctttttcagtgacctaaaaatggcttatttccgaggaatgaaaggctgccatcgttggctgtggatgtggaaaacctttcctagcttagagcatttgtatctacaatacattttaaagtcagagttcgtgttccctgttttaatcacatgactacctgtcccagtacacgaaagggcgctggttggcattcttcttaatgtatttagtaaagatcataagacatcctttaagagtttaaatgtctctgaaacaggcatacaggctctagtcaagaatgaattagagtgaaggaaagctgtgtgacacctggcattcctctctgttcatggagcttctttgaggcttgaagtttgattttactatctagacctctctggctaatacctattcttcaaccacctcggttactctgacataggaatttacttcttttccttgagtggaaaacactttagaaaataataacaaacattattataaactaatatatgtgagagtacttagttgaaacaaaaaggaattttagtagacagtattatattatctttgaaaatcaaggagaagtttatgcaactgcaggaaacatgtctatacgatcgcagagttgtatttcctcacaaacttctttacgaagagtgaaatatgtttttgtacctctcagtttcagtcagggacatattttgtgcaatatttctgtgattgtgcctatgcgtgatgaatgaatgcatttcaatcatacattgcctaaatcataacttgatgatgcttgggaaagaatcaacagttaaaacttcatgaagttctaatgtctgtgttccaaaacacatcacattattaggttgtagggagatatgtatgtgtgctccctggggtggggagttttctagttactagaccatctccatttttagcacttggcagcctcatgatccttttataaataggagattaacaggagagcagcaatacgattttgccaatggaataacagatttgccggcattcactgaaagagggcagatattgggtccttgtgacttcaactgactcttccgaattgtatgaatttatcaatgtattagataaacccagtttcagaataataaagaaaaaatattagaccaaataatgtggctaatagtggtatgatttctagcccgtgggtttaaaactgtatcctaaagagtcattttaaaataatataaatatttaaaagtgtaactgctatctttatgttctgaaataagttaaaacattttaaaatatgaatactgtagtttaaaagaaagaaatggtgggaaggaaaagtagagaaagaaatgccaattccagtccaaagctttgtttgccaagttttcttagaatgaattttaccaatgtatgggttcttgttaacagaatgtgtaacagaaatactgaaagacttttgcctaaagtggcattattgactgctggtgtgatgctactgtaatgtgataaattattaaattgttgcaaagtgct

SEQ ID NO: 308058 - DNA, 5189 bp, Homo sapiens
ttggaactactgacctcaggtgatccgcccactttggcctcccgaaagtgctgggattacagtcatgagccaccatgcccagcctatttatttctgattctttaagggtgactggacgtgttgatcagcgctcgctgggatttggctgacgtgccccagccccgcctccctccccaccccacaatggcagaagaaactggacagagtaaattagctgcagccaagaaaaagttcaaagaatattggcagagaaaccgccctggtgttccagcagcagcgaagaggaacacgaaagcaaatggcagtagccctgagacggccgcttctggtggttgccactcatctgaggctgtgagtcttgcctggacaggcttttggggacagggggcccaaggagcagtagagggcaatcgttaagattgtggatggactgttgggtactggtgaaggattctggatttggccgggcacagtggctcacgcctgtaatccccacacttcgggagaccgaggcaggtggatcacaaggtcaggagatcgagaccatccaggcaaacacggtgaaatactaaaaaatacaaaaaaaaaagccgggcgtggtggcgggcgcctgcagtcccagctgctccggagtctgagggaggagaatggcgtgaacctaggaggcggagcttgcagtgagccaagatcacgccactgcactccagcctggaaggcagagagagactccgtttcaaaaaagaaaagaattctgggtttgaatcctgcctctccgtctgctagggatatgatttagggcaagttgcttgagctctttgggcctctgttttcacgtctgtatgatagaggtggtattgtttgacttgtatttgtgaagtttcaatgagattgataattgtcgattttatgttaatccctagtacatggcctgctgtcaacacccaggacacccaggatatggtctttgctgtttgattttcctcatccccagtctcaaggggaagccaggacaatgagaacagccacttcccatcaggagtcactgcaaggcccccagggtgggatggtggggagataagaaccgtgagagaagttggcacaaaggagttatgggacaaagggtccaagataggcagaaaagaaaatgttgccagttgatggggaagaaaggaagtcggagggctcagacactgagggggacagaacatctccatgtgcagtctcatctcttatagtcagcaacagtcctcctccgcctcctcctctctgcatgcgcgtcagagcccgtgccaagaacaagcagcagtcctgaactcgaggtccataaaaatcagtcgactgaatgacaccatcaaatctttgaaacaacagaagaaacaagtggaacatcagctggaagaagaaaagaaagcaaacaatgagaaacagaaagctgaaagggagctagagggtcaaatccagagattgaacacagagaaaaagaaactaaatacggacctgtatcacatgaaacattctctcagatactttgaagaagagtccaaggatctggccggccgcctgcaacgttcatcgcagcgtataggagagttagagtggtctctctgtgctgtcgccgccacacagaagaagaagccggatgggttctcgagccgcagtaaagcacttctcaagcggcagttagagcagtccatacgggagcagatactgctgaaaggacacgtgacacagttgaaggagtcgcttaaagaagtccagctggagagagatcaatatgctgaacaaataaaaggagagagggcccagtggcagcagaggatgaggaaaatgtcgcaggaggtttgcacattgaaggaggagaagaagcatgatacgcatcgggtagaggagctggagaggagcttgtccagactcaaaaaccagatggctgagccactgcccccggatgccccagcagtgtcctctgaggtggagctgcaagacctgaggaaggagctggagagagtggcaggagagctccaggctcaggtggaaaacaatcagtgcatcagtctcctgaaccgtgggcaaaaggagaggcttcgcgagcaggaggagaggcttcaggagcagcaggagaggcttcgggaacaggagaagaggcttcagcagctggccgagccacagagcgacttggaggagctgaagcacgagaacaagagcgcactgcagttggagcagcaagtaaaggagctgcaggagaagctgggccaggtgacggagacgctcacctcggctgagaaggagccagaggcagcagtcccagcctcagggactgggggcgagtctagcggccttatggacctcctggaggagaaggtggacctgagggagcatgtggagaaactggaacttggattcatccagtaccggagagagagatgccatcagaaagtacatcgccttctaacagagccaggggacagtgccaaagatgcgtcaccgggaggaggccatcatcaggctggcccaggacgaggaggagaggaaggtgaagctgttggagctgcaggagatggtgttgcggcttgtggcagctacagcgaggggcacggcaaattcctggccgctgcccggaaccctgctgctgaacccagtccaggagccccagccccccaggagctcggggctgccgacaagcatggtgatctttgtgaggcgagcctcaccaacagcgtggagcctgcacaaggagaagccagggagggttcttcccaggacaaccctactgcacagccagtcgtgcagctccttggtgagatgcaggaccaccaggagcacccaggcttgggcagcaactgctgtgtgccatgcttttgctgggcttggctgccgagaagaaggagataaacaccaccatcatcaaagagctgctcaagaaatttttaaaaacgaaacaaagttatggggttaatctcctacacaattcatttacttcatttgaatgttagagctactcatgattatttgtgtttctaatttatagtttaagtttatttgtaaaaagttaaaagagagtgggtctctgtgcctctcactgatgttcactctggcatcctttagcatttttcttttttcatttcataattgtaggtcattagcatgcatatcgagtttgcccttacgtggtgggagttcaaacacacaaagacccactctttgcacaaaactgttctcgctggtttggaataggctcccgtgcttttttaatgttattgcagcatggatgttcattacagaattcagatcttccatagctcaatatgcggtttgccctcaagtgtgcactgtttattactttgtaatatgccactatgagtactgacacttagagctgtttaaaggccgagaactggaaacagcctttcctccattttctgtgtattggtgatgggagtgataaccttttgggggagctttctaaatctcgcagaagaggaaagtggcctgctctggcaggtatgtgcaggatacagtgtgtttcatctgttccggtgccaagaatgagcactgtactgtggcagttccctttggatttgtatgtgctctgggctcatgaagatattgcatcgtgagctgcagcagttgcactctttttcagtgacctaaaaatggcttatttccgaggaatgaaaggctgccatcgttggctgtggatgtggaaaacctttcctagcttagagcatttgtatctacaatacattttaaagtcagagttcgtgttccctgttttaatcacatgactacctgtcccagtacacgaaagggcgctggttggcattcttcttaatgtatttagtaaagatcataagacatcctttaagagtttaaatgtctctgaaacaggcatacaggctctagtcaagaatgaattagagtgaaggaaagctgtgtgacacctggcattcctctctgttcatggagcttctttgaggcttgaagtttgattttactatctagacctctctggctaatacctattcttcaaccacctcggttactctgacataggaatttacttcttttccttgagtggaaaacactttagaaaataataacaaacattattataaactaatatatgtgagagtacttagttgaaacaaaaaggaattttagtagacagtattatattatctttgaaaatcaaggagaagtttatgcaactgaaaatgtttacacactgtgctgcaatctactgtttgtgaatgtcaatgtattatcaggaaacatgtctatacgatcgcagagttgtatttcctcacaaacttctttacgaagagtgaaatatgtttttgtacctctcagtttcagtcagggacatattttgtgcaatatttctgtgattgtgcctatgcgtgatgaatgaatgcatttcaatcatacattgcctaaatcataacttgatgatgcttgggaaagaatcaacagttaaaacttcatgaagttctaatgtctgtgttccaaaacacatcacattattaggttgtagggagatatgtatgtgtgctccctggggtggggagttttctagttactagaccatctccatttttagcacttggcagcctcatgatccttttataaataggagattaacaggagagcagcaatacgattttgccaatggaataacagatttgccggcattcactgaaagagggcagatattgggtccttgtgacttcaactgactcttccgaattgtatgaatttatcaatgtattagataaacccagtttcagaataataaagaaaaaatattagaccaaataatgtggctaatagtggtatgatttctagcccgtgggtttaaaactgtatcctaaagagtcattttaaaataatataaatatttaaaagtgtaactgctatctttatgttctgaaataagttaaaacattttaaaatatgaatactgtagtttaaaagaaagaaatggtgggaaggaaaagtagagaaagaaatgccaattccagtccaaagctttgtttgccaagttttcttagaatgaattttaccaatgtatgggttcttgttaacagaatgtgtaacagaaatactgaaagacttttgcctaaagtggcattattgactgctggtgtgatgctactgtaatgtgataaattattaaattgttgcaaagtgct

SEQ ID NO: 308059 - DNA, 4105 bp, Homo sapiens
gcagaagggggagcctttctcaaactccatctctagaggtttatgttactgtcctctcaagagattcctgattcagactttgagttgtgaggctgtggctgaaaaccaacaaagacccaaatcctctgtccttgggagcttgggaacagttcctgttcccattgggtctgagaactttgcctttaaaatccattcctggcccctgcctgccgcttcctgtctggggaatagagttgagggggccaccctccatcactttaatttgactctccccacagaaacaacagaagaaacaagtggaacatcagctggaagaagaaaagaaagcaaacaatgagaaacagaaagctgaaagggagctagagggtcaaatccagagattgaacacagagaaaaagaaactaaatacggacctgtatcacatgaaacattctctcagatactttgaagaagagtccaaggatctggccggccgcctgcaacgttcatcgcagcgtataggagagttagagtggtctctctgtgctgtcgccgccacacagaagaagaagccggatgggttctcgagccgcagtaaagcacttctcaagcggcagttagagcagtccatacgggagcagatactgctgaaaggacacgtgacacagttgaaggagtcgcttaaagaagtccagctggagagagatcaatatgctgaacaaataaaaggagagagggcccagtggcagcagaggatgaggaaaatgtcgcaggaggtttgcacattgaaggaggagaagaagcatgatacgcatcgggtagaggagctggagaggagcttgtccagactcaaaaaccagatggctgagccactgcccccggatgccccagcagtgtcctctgaggtggagctgcaagacctgaggaaggagctggagagagtggcaggagagctccaggctcaggtggaaaacaatcagtgcatcagtctcctgaaccgtgggcaaaaggagaggcttcgcgagcaggaggagaggcttcaggagcagcaggagaggcttcgggaacaggagaagaggcttcagcagctggccgagccacagagcgacttggaggagctgaagcacgagaacaagagcgcactgcagttggagcagcaagtaaaggagctgcaggagaagctgggccaggtgacggagacgctcacctcggctgagaaggagccagaggcagcagtcccagcctcagggactgggggcgagtctagcggccttatggacctcctggaggagaaggtggacctgagggagcatgtggagaaactggaacttggattcatccagtaccggagagagagatgccatcagaaagtacatcgccttctaacagagccaggggacagtgccaaagatgcgtcaccgggaggaggccatcatcaggctggcccaggacgaggaggagaggaaggtgaagctgttggagctgcaggagatggtgttgcggcttgtggcagctacagcgaggggcacggcaaattcctggccgctgcccggaaccctgctgctgaacccagtccaggagccccagccccccaggagctcggggctgccgacaagcatggtgatctttgtgaggcgagcctcaccaacagcgtggagcctgcacaaggagaagccagggagggttcttcccaggacaaccctactgcacagccagtcgtgcagctccttggtgagatgcaggaccaccaggagcacccaggcttgggcagcaactgctgtgtgccatgcttttgctgggcttggctgccgagaagaaggagataaacaccaccatcatcaaagagctgctcaagaaatttttaaaaacgaaacaaagttatggggttaatctcctacacaattcatttacttcatttgaatgttagagctactcatgattatttgtgtttctaatttatagtttaagtttatttgtaaaaagttaaaagagagtgggtctctgtgcctctcactgatgttcactctggcatcctttagcatttttcttttttcatttcataattgtaggtcattagcatgcatatcgagtttgcccttacgtggtgggagttcaaacacacaaagacccactctttgcacaaaactgttctcgctggtttggaataggctcccgtgcttttttaatgttattgcagcatggatgttcattacagaattcagatcttccatagctcaatatgcggtttgccctcaagtgtgcactgtttattactttgtaatatgccactatgagtactgacacttagagctgtttaaaggccgagaactggaaacagcctttcctccattttctgtgtattggtgatgggagtgataaccttttgggggagctttctaaatctcgcagaagaggaaagtggcctgctctggcaggtatgtgcaggatacagtgtgtttcatctgttccggtgccaagaatgagcactgtactgtggcagttccctttggatttgtatgtgctctgggctcatgaagatattgcatcgtgagctgcagcagttgcactctttttcagtgacctaaaaatggcttatttccgaggaatgaaaggctgccatcgttggctgtggatgtggaaaacctttcctagcttagagcatttgtatctacaatacattttaaagtcagagttcgtgttccctgttttaatcacatgactacctgtcccagtacacgaaagggcgctggttggcattcttcttaatgtatttagtaaagatcataagacatcctttaagagtttaaatgtctctgaaacaggcatacaggctctagtcaagaatgaattagagtgaaggaaagctgtgtgacacctggcattcctctctgttcatggagcttctttgaggcttgaagtttgattttactatctagacctctctggctaatacctattcttcaaccacctcggttactctgacataggaatttacttcttttccttgagtggaaaacactttagaaaataataacaaacattattataaactaatatatgtgagagtacttagttgaaacaaaaaggaattttagtagacagtattatattatctttgaaaatcaaggagaagtttatgcaactgaaaatgtttacacactgtgctgcaatctactgtttgtgaatgtcaatgtattatcaggaaacatgtctatacgatcgcagagttgtatttcctcacaaacttctttacgaagagtgaaatatgtttttgtacctctcagtttcagtcagggacatattttgtgcaatatttctgtgattgtgcctatgcgtgatgaatgaatgcatttcaatcatacattgcctaaatcataacttgatgatgcttgggaaagaatcaacagttaaaacttcatgaagttctaatgtctgtgttccaaaacacatcacattattaggttgtagggagatatgtatgtgtgctccctggggtggggagttttctagttactagaccatctccatttttagcacttggcagcctcatgatccttttataaataggagattaacaggagagcagcaatacgattttgccaatggaataacagatttgccggcattcactgaaagagggcagatattgggtccttgtgacttcaactgactcttccgaattgtatgaatttatcaatgtattagataaacccagtttcagaataataaagaaaaaatattagaccaaataatgtggctaatagtggtatgatttctagcccgtgggtttaaaactgtatcctaaagagtcattttaaaataatataaatatttaaaagtgtaactgctatctttatgttctgaaataagttaaaacattttaaaatatgaatactgtagtttaaaagaaagaaatggtgggaaggaaaagtagagaaagaaatgccaattccagtccaaagctttgtttgccaagttttcttagaatgaattttaccaatgtatgggttcttgttaacagaatgtgtaacagaaatactgaaagacttttgcctaaagtggcattattgactgctggtgtgatgctactgtaatgtgataaattattaaattgttgcaaagtgct

SEQ ID NO: 308060 - DNA, 2321 bp, Homo sapiens
ttggaactactgacctcaggtgatccgcccactttggcctcccgaaagtgctgggattacagtcatgagccaccatgcccagcctatttatttctgattctttaagggtgactggacgtgttgatcagcgctcgctgggatttggctgacgtgccccagccccgcctccctccccaccccacaatggcagaagaaactggacagagtaaattagctgcagccaagaaaaagttcaaagaatattggcagagaaaccgccctggtgttccagcagcagcgaagaggaacacgaaagcaaatggcagtagccctgagacggccgcttctggtggttgccactcatctgaggctgtgagtcttgcctggacaggcttttggggacagggggcccaaggagcagtagagggcaatcgttaagattgtggatggactgttgggtactggtgaaggattctggatttggccgggcacagtggctcacgcctgtaatccccacacttcgggagaccgaggcaggtggatcacaaggtcaggagatcgagaccatccaggcaaacacggtgaaatactaaaaaatacaaaaaaaaaagccgggcgtggtggcgggcgcctgcagtcccagctgctccggagtctgagggaggagaatggcgtgaacctaggaggcggagcttgcagtgagccaagatcacgccactgcactccagcctggaaggcagagagagactccgtttcaaaaaagaaaagaattctgggtttgaatcctgcctctccgtctgctagggatatgatttagggcaagttgcttgagctctttgggcctctgttttcacgtctgtatgatagaggtggtattgtttgacttgtatttgtgaagtttcaatgagattgataattgtcgattttatgttaatccctagtacatggcctgctgtcaacacccaggacacccaggatatggtctttgctgtttgattttcctcatccccagtctcaaggggaagccaggacaatgagaacagccacttcccatcaggagtcactgcaaggcccccagggtgggatggtggggagataagaaccgtgagagaagttggcacaaaggagttatgggacaaagggtccaagataggcagaaaagaaaatgttgccagttgatggggaagaaaggaagtcggagggctcagacactgagggggacagaacatctccatgtgcagtctcatctcttatagtcagcaacaggtatccacggggagggccctacatcatctgctaccctgaaggatctggaggtaggaggctctgggcggaggtgcagtgaccccgcaggccagccctccaacctcctcccgcagcggggactgggtgcccctctgccagctgagacagcccacacacaacccagccctaatgatcgttctctctacctctcccccaagtcctcctccgcctcctcctctctgcatgcgcgtcagagcccgtgccaagaacaagcagcagtcctgaactcgaggtccataaaaatcagtcgactgaatgacaccatcaaatctttgaaacaacagaagaaacaagtggaacatcagctggaagaagaaaagaaagcaaacaatgagaaacagaaagctgaaagggagctagagggtcaaatccagagattgaacacagagaaaaagaaactaaatacggacctgtatcacatgaaacattctctcagatactttgaagaagagtccaaggatctggccggccgcctgcaacgttcatcgcagcgtataggagagttagagtggtctctctgtgctgtcgccgccacacagaagaagaagccggatgggttctcgagccgcagtaaagcacttctcaagcggcagttagagcagtccatacgggagcagatactgctgaaaggacacgtgacacagttgaaggagtcgcttaaagaagtccagctggagagagatcaatatgctgaacaaataaaaggagagagggcccagtggcagcagaggatgaggaaaatgtcgcaggaggtttgcacattgaaggaggagaagaagcatgatacgcatcgggtagaggagctggagaggagcttgtccagactcaaaaaccagatggctgagccactgcccccggatgccccagcagtgtcctctgaggtggagctgcaagacctgaggaaggagctggagagagtggcaggagagctccaggctcaggtggaaaacaatcagtgcatcagtctcctgaaccgtgggccttcgggatggtttggtgaactgctggtgaggggggaggggggctgaccgaggcac

SEQ ID NO: 308061 - DNA, 1712 bp, Homo sapiens
ttggaactactgacctcaggtgatccgcccactttggcctcccgaaagtgctgggattacagtcatgagccaccatgcccagcctatttatttctgattctttaagggtgactggacgtgttgatcagcgctcgctgggatttggctgacgtgccccagccccgcctccctccccaccccacaatggcagaagaaactggacagagtaaattagctgcagccaagaaaaagttcaaagaatattggcagagaaaccgccctggtgttccagcagcagcgaagaggaacacgaaagcaaatggcagtagccctgagacggccgcttctggtggttgccactcatctgaggctgtgagtcttgcctggacaggcttttggggacagggggcccaaggagcagtagagggcaatcgttaagattgtggatggactgttgggtactggtgaaggattctggatttggccgggcacagtggctcacgcctgtaatccccacacttcgggagaccgaggcaggtggatcacaaggtcaggagatcgagaccatccaggcaaacacggtgaaatactaaaaaatacaaaaaaaaaagccgggcgtggtggcgggcgcctgcagtcccagctgctccggagtctgagggaggagaatggcgtgaacctaggaggcggagcttgcagtgagccaagatcacgccactgcactccagcctggaaggcagagagagactccgtttcaaaaaagaaaagaattctgggtttgaatcctgcctctccgtctgctagggatatgatttagggcaagttgcttgagctctttgggcctctgttttcacgtctgtatgatagaggtggtattgtttgacttgtatttgtgaagtttcaatgagattgataattgtcgattttatgttaatccctagtacatggcctgctgtcaacacccaggacacccaggatatggtctttgctgtttgattttcctcatccccagtctcaaggggaagccaggacaatgagaacagccacttcccatcaggagtcactgcaaggcccccagggtgggatggtggggagataagaaccgtgagagaagttggcacaaaggagttatgggacaaagggtccaagataggcagaaaagaaaatgttgccagttgatggggaagaaaggaagtcggagggctcagacactgagggggacagaacatctccatgtgcagtctcatctcttatagtcagcaacaggtatccacggggagggccctacatcatctgctaccctgaaggatctggaggtaggaggctctgggcggaggtgcagtgaccccgcaggccagccctccaacctcctcccgcagcggggactgggtgcccctctgccagctgagacagcccacacacaacccagccctaatgatcgttctctctacctctcccccaagtcctcctccgcctcctcctctctgcatgcgcgtcagagcccgtgccaagaacaagcagcagtcctgaactcgaggtccataaaaatcagtcgactgaatgacaccatcaaatctttgaaacaacagaagaaacaagtggaacatcagctggaagaagaaaagaaagcaaacaatgagaaacagaaagctgaaagggagctagagggtcaatccagagactgacatagagaacaagaaccggggtcctcagagtcaccgcggccgatcacc

SEQ ID NO: 308062 - DNA, 256 bp, Homo sapiens
tgcagttggagcagcaagtaaaggagctgcaggagaagctgggccaggtgacggagacgctcacctcggctgagaaggagccagaggcagcagtcccagcctcagggactgggggcgagtctgtgagtggggagaccctccgggccctgcaggaagtcatggagaagctggaggggagtgagtcctagcatgggccaagaagggcagggctggggcaggtcgctgctgagatgtgaccccattattttggctccag

SEQ ID NO: 308063 - DNA, 302 bp, Homo sapiens
tgctgtgccttctctgcctccccctggtaagagctctgtcttcctcttcctataggaaaagaaagcaaacaatgagaaacagaaagctgaaagggagctagaggtgagtggagggtgtgaagtttcctcctgtcctccggagaatgtttctttccttctatttcagcacttgcttggcttttctcccaaagggtcaaatccagagattgaacacagagaaaaagaaactaaatacggacctgtatcacatgaaacattctctcagatactttgaaggtgggaatctgggcaccctgtcatcc

SEQ ID NO: 308064 - DNA, 5074 bp, Homo sapiens
gggtggattaattttttttttttgacgttcttagaacagtgcctgacttaattctacttcatagggttgatgtaattttgagacttaaataagttgatactaaaataccacttagtgtcccgaacactgtttgacattttagtatcaaccaagtctcaaggttacttcaatcctgtgaactagagccaaggcacctccagtggcctttcagaagttccatttccactcccgcctcatctcctaattctatctccccgttctctttactcgagccctcctggccttgcccttccttaggcctgatacgcacctatctgaagacctttgcactgcactccagcctggaaggcagagagagactccgtttcaaaaaagaaaagaattctgggtttgaatcctgcctctccgtctgctagggatatgatttagggcaagttgcttgagctctttgggcctctgttttcacgtctgtatgatagaggtggtattgtttgacttgtatttgtgaagtttcaatgagattgataattgtcgattttatgttaatccctagtacatggcctgctgtcaacacccaggacacccaggatatggtctttgctgtttgattttcctcatccccagtctcaaggggaagccaggacaatgagaacagccacttcccatcaggagtcactgcaaggcccccagggtgggatggtggggagataagaaccgtgagagaagttggcacaaaggagttatgggacaaagggtccaagataggcagaaaagaaaatgttgccagttgatggggaagaaaggaagtcggagggctcagacactgagggggacagaacatctccatgtgcagtctcatctcttatagtcagcaacaggtatccacggggagggccctacatcatctgctaccctgaaggatctggaggtaggaggctctgggcggaggtgcagtgaccccgcaggccagccctccaacctcctcccgcagcggggactgggtgcccctctgccagctgagacagcccacacacaacccagccctaatgatcgttctctctacctctcccccaagtcctcctccgcctcctcctctctgcatgcgcgtcagagcccgtgccaagaacaagcagcagtcctgaactcgaggtccataaaaatcagtcgactgaatgacaccatcaaatctttgaaacaacagaagaaacaagtggaacatcagctggaagaagaaaagaaagcaaacaatgagaaacagaaagctgaaagggagctagagggtcaaatccagagattgaacacagagaaaaagaaactaaatacggacctgtatcacatgaaacattctctcagatactttgaagaagagtccaaggatctggccggccgcctgcaacgttcatcgcagcgtataggagagttagagtggtctctctgtgctgtcgccgccacacagaagaagaagccggatgggttctcgagccgcagtaaagcacttctcaagcggcagttagagcagtccatacgggagcagatactgctgaaaggacacgtgacacagttgaaggagtcgcttaaagaagtccagctggagagagatcaatatgctgaacaaataaaaggagagagggcccagtggcagcagaggatgaggaaaatgtcgcaggaggtttgcacattgaaggaggagaagaagcatgatacgcatcgggtagaggagctggagaggagcttgtccagactcaaaaaccagatggctgagccactgcccccggatgccccagcagtgtcctctgaggtggagctgcaagacctgaggaaggagctggagagagtggcaggagagctccaggctcaggtggaaaacaatcagtgcatcagtctcctgaaccgtgggcaaaaggagaggcttcgcgagcaggaggagaggcttcaggagcagcaggagaggcttcgggaacaggagaagaggcttcagcagctggccgagccacagagcgacttggaggagctgaagcacgagaacaagagcgcactgcagttggagcagcaagtaaaggagctgcaggagaagctgggccaggtgacggagacgctcacctcggctgagaaggagccagaggcagcagtcccagcctcagggactgggggcgagtctagcggccttatggacctcctggaggagaaggtggacctgagggagcatgtggagaaactggaacttggattcatccagtaccggagagagagatgccatcagaaagtacatcgccttctaacagagccaggggacagtgccaaagatgcgtcaccgggaggaggccatcatcaggctggcccaggacgaggaggagaggaaggtgaagctgttggagctgcaggagatggtgttgcggcttgtggcagctacagcgaggggcacggcaaattcctggccgctgcccggaaccctgctgctgaacccagtccaggagccccagccccccaggagctcggggctgccgacaagcatggtgatctttgtgaggcgagcctcaccaacagcgtggagcctgcacaaggagaagccagggagggttcttcccaggacaaccctactgcacagccagtcgtgcagctccttggtgagatgcaggaccaccaggagcacccaggcttgggcagcaactgctgtgtgccatgcttttgctgggcttggctgccgagaagaaggagataaacaccaccatcatcaaagagctgctcaagaaatttttaaaaacgaaacaaagttatggggttaatctcctacacaattcatttacttcatttgaatgttagagctactcatgattatttgtgtttctaatttatagtttaagtttatttgtaaaaagttaaaagagagtgggtctctgtgcctctcactgatgttcactctggcatcctttagcatttttcttttttcatttcataattgtaggtcattagcatgcatatcgagtttgcccttacgtggtgggagttcaaacacacaaagacccactctttgcacaaaactgttctcgctggtttggaataggctcccgtgcttttttaatgttattgcagcatggatgttcattacagaattcagataaaatttgctaatgttctgctatgatgtttgatctcatcttaatcacagtgagctcttccatagctcaatatgcggtttgccctcaagtgtgcactgtttattactttgtaatatgccactatgagtactgacacttagagctgtttaaaggccgagaactggaaacagcctttcctccattttctgtgtattggtgatgggagtgataaccttttgggggagctttctaaatctcgcagaagaggaaagtggcctgctctggcaggtatgtgcaggatacagtgtgtttcatctgttccggtgccaagaatgagcactgtactgtggcagttccctttggatttgtatgtgctctgggctcatgaagatattgcatcgtgagctgcagcagttgcactctttttcagtgacctaaaaatggcttatttccgaggaatgaaaggctgccatcgttggctgtggatgtggaaaacctttcctagcttagagcatttgtatctacaatacattttaaagtcagagttcgtgttccctgttttaatcacatgactacctgtcccagtacacgaaagggcgctggttggcattcttcttaatgtatttagtaaagatcataagacatcctttaagagtttaaatgtctctgaaacaggcatacaggctctagtcaagaatgaattagagtgaaggaaagctgtgtgacacctggcattcctctctgttcatggagcttctttgaggcttgaagtttgattttactatctagacctctctggctaatacctattcttcaaccacctcggttactctgacataggaatttacttcttttccttgagtggaaaacactttagaaaataataacaaacattattataaactaatatatgtgagagtacttagttgaaacaaaaaggaattttagtagacagtattatattatctttgaaaatcaaggagaagtttatgcaactgaaaatgtttacacactgtgctgcaatctactgtttgtgaatgtcaatgtattatcaggaaacatgtctatacgatcgcagagttgtatttcctcacaaacttctttacgaagagtgaaatatgtttttgtacctctcagtttcagtcagggacatattttgtgcaatatttctgtgattgtgcctatgcgtgatgaatgaatgcatttcaatcatacattgcctaaatcataacttgatgatgcttgggaaagaatcaacagttaaaacttcatgaagttctaatgtctgtgttccaaaacacatcacattattaggttgtagggagatatgtatgtgtgctccctggggtggggagttttctagttactagaccatctccatttttagcacttggcagcctcatgatccttttataaataggagattaacaggagagcagcaatacgattttgccaatggaataacagatttgccggcattcactgaaagagggcagatattgggtccttgtgacttcaactgactcttccgaattgtatgaatttatcaatgtattagataaacccagtttcagaataataaagaaaaaatattagaccaaataatgtggctaatagtggtatgatttctagcccgtgggtttaaaactgtatcctaaagagtcattttaaaataatataaatatttaaaagtgtaactgctatctttatgttctgaaataagttaaaacattttaaaatatgaatactgtagtttaaaagaaagaaatggtgggaaggaaaagtagagaaagaaatgccaattccagtccaaagctttgtttgccaagttttcttagaatgaattttaccaatgtatgggttcttgttaacagaatgtgtaacagaaatactgaaagacttttgcctaaagtggcattattgactgctggtgtgatgctactgtaatgtgataaattattaaattgttgcaaagtgct

SEQ ID NO: 308065 - DNA, 5386 bp, Homo sapiens
ttggaactactgacctcaggtgatccgcccactttggcctcccgaaagtgctgggattacagtcatgagccaccatgcccagcctatttatttctgattctttaagggtgactggacgtgttgatcagcgctcgctgggatttggctgacgtgccccagccccgcctccctccccaccccacaatggcagaagaaactggacagagtaaattagctgcagccaagaaaaagttcaaagaatattggcagagaaaccgccctggtgttccagcagcagcgaagaggaacacgaaagcaaatggcagtagccctgagacggccgcttctggtggttgccactcatctgaggctgtgagtcttgcctggacaggcttttggggacagggggcccaaggagcagtagagggcaatcgttaagattgtggatggactgttgggtactggtgaaggattctggatttggccgggcacagtggctcacgcctgtaatccccacacttcgggagaccgaggcaggtggatcacaaggtcaggagatcgagaccatccaggcaaacacggtgaaatactaaaaaatacaaaaaaaaaagccgggcgtggtggcgggcgcctgcagtcccagctgctccggagtctgagggaggagaatggcgtgaacctaggaggcggagcttgcagtgagccaagatcacgccactgcactccagcctggaaggcagagagagactccgtttcaaaaaagaaaagaattctgggtttgaatcctgcctctccgtctgctagggatatgatttagggcaagttgcttgagctctttgggcctctgttttcacgtctgtatgatagaggtggtattgtttgacttgtatttgtgaagtttcaatgagattgataattgtcgattttatgttaatccctagtacatggcctgctgtcaacacccaggacacccaggatatggtctttgctgtttgattttcctcatccccagtctcaaggggaagccaggacaatgagaacagccacttcccatcaggagtcactgcaaggcccccagggtgggatggtggggagataagaaccgtgagagaagttggcacaaaggagttatgggacaaagggtccaagataggcagaaaagaaaatgttgccagttgatggggaagaaaggaagtcggagggctcagacactgagggggacagaacatctccatgtgcagtctcatctcttatagtcagcaacaggtatccacggggagggccctacatcatctgctaccctgaaggatctggaggtaggaggctctgggcggaggtgcagtgaccccgcaggccagccctccaacctcctcccgcagcggggactgggtgcccctctgccagctgagacagcccacacacaacccagccctaatgatcgttctctctacctctcccccaagtcctcctccgcctcctcctctctgcatgcgcgtcagagcccgtgccaagaacaagcagcagtcctgaactcgaggtccataaaaatcagtcgactgaatgacaccatcaaatctttgaaacaacagaagaaacaagtggaacatcagctggaagaagaaaagaaagcaaacaatgagaaacagaaagctgaaagggagctagagggtcaaatccagagattgaacacagagaaaaagaaactaaatacggacctgtatcacatgaaacattctctcagatactttgaagaagagtccaaggatctggccggccgcctgcaacgttcatcgcagcgtataggagagttagagtggtctctctgtgctgtcgccgccacacagaagaagaagccggatgggttctcgagccgcagtaaagcacttctcaagcggcagttagagcagtccatacgggagcagatactgctgaaaggacacgtgacacagttgaaggagtcgcttaaagaagtccagctggagagagatcaatatgctgaacaaataaaaggagagagggcccagtggcagcagaggatgaggaaaatgtcgcaggaggtttgcacattgaaggaggagaagaagcatgatacgcatcgggtagaggagctggagaggagcttgtccagactcaaaaaccagatggctgagccactgcccccggatgccccagcagtgtcctctgaggtggagctgcaagacctgaggaaggagctggagagagtggcaggagagctccaggctcaggtggaaaacaatcagtgcatcagtctcctgaaccgtgggcaaaaggagaggcttcgcgagcaggaggagaggcttcaggagcagcaggagaggcttcgggaacaggagaagaggcttcagcagctggccgagccacagagcgacttggaggagctgaagcacgagaacaagagcgcactgcagttggagcagcaagtaaaggagctgcaggagaagctgggccaggtgacggagacgctcacctcggctgagaaggagccagaggcagcagtcccagcctcagggactgggggcgagtctagcggccttatggacctcctggaggagaaggtggacctgagggagcatgtggagaaactggaacttggattcatccagtaccggagagagagatgccatcagaaagtacatcgccttctaacagagccaggggacagtgccaaagatgcgtcaccgggaggaggccatcatcaggctggcccaggacgaggaggagaggaaggtgaagctgttggagctgcaggagatggtgttgcggcttgtggcagctacagcgaggggcacggcaaattcctggccgctgcccggaaccctgctgctgaacccagtccaggagccccagccccccaggagctcggggctgccgacaagcatggtgatctttgtgaggcgagcctcaccaacagcgtggagcctgcacaaggagaagccagggagggttcttcccaggacaaccctactgcacagccagtcgtgcagctccttggtgagatgcaggaccaccaggagcacccaggcttgggcagcaactgctgtgtgccatgcttttgctgggcttggctgccgagaagaaggagataaacaccaccatcatcaaagagctgctcaagaaatttttaaaaacgaaacaaagttatggggttaatctcctacacaattcatttacttcatttgaatgttagagctactcatgattatttgtgtttctaatttatagtttaagtttatttgtaaaaagttaaaagagagtgggtctctgtgcctctcactgatgttcactctggcatcctttagcatttttcttttttcatttcataattgtaggtcattagcatgcatatcgagtttgcccttacgtggtgggagttcaaacacacaaagacccactctttgcacaaaactgttctcgctggtttggaataggctcccgtgcttttttaatgttattgcagcatggatgttcattacagaattcagatcttccatagctcaatatgcggtttgccctcaagtgtgcactgtttattactttgtaatatgccactatgagtactgacacttagagctgtttaaaggccgagaactggaaacagcctttcctccattttctgtgtattggtgatgggagtgataaccttttgggggagctttctaaatctcgcagaagaggaaagtggcctgctctggcaggtatgtgcaggatacagtgtgtttcatctgttccggtgccaagaatgagcactgtactgtggcagttccctttggatttgtatgtgctctgggctcatgaagatattgcatcgtgagctgcagcagttgcactctttttcagtgacctaaaaatggcttatttccgaggaatgaaaggctgccatcgttggctgtggatgtggaaaacctttcctagcttagagcatttgtatctacaatacattttaaagtcagagttcgtgttccctgttttaatcacatgactacctgtcccagtacacgaaagggcgctggttggcattcttcttaatgtatttagtaaagatcataagacatcctttaagagtttaaatgtctctgaaacaggcatacaggctctagtcaagaatgaattagagtgaaggaaagctgtgtgacacctggcattcctctctgttcatggagcttctttgaggcttgaagtttgattttactatctagacctctctggctaatacctattcttcaaccacctcggttactctgacataggaatttacttcttttccttgagtggaaaacactttagaaaataataacaaacattattataaactaatatatgtgagagtacttagttgaaacaaaaaggaattttagtagacagtattatattatctttgaaaatcaaggagaagtttatgcaactgaaaatgtttacacactgtgctgcaatctactgtttgtgaatgtcaatgtattatcaggaaacatgtctatacgatcgcagagttgtatttcctcacaaacttctttacgaagagtgaaatatgtttttgtacctctcagtttcagtcagggacatattttgtgcaatatttctgtgattgtgcctatgcgtgatgaatgaatgcatttcaatcatacattgcctaaatcataacttgatgatgcttgggaaagaatcaacagttaaaacttcatgaagttctaatgtctgtgttccaaaacacatcacattattaggttgtagggagatatgtatgtgtgctccctggggtggggagttttctagttactagaccatctccatttttagcacttggcagcctcatgatccttttataaataggagattaacaggagagcagcaatacgattttgccaatggaataacagatttgccggcattcactgaaagagggcagatattgggtccttgtgacttcaactgactcttccgaattgtatgaatttatcaatgtattagataaacccagtttcagaataataaagaaaaaatattagaccaaataatgtggctaatagtggtatgatttctagcccgtgggtttaaaactgtatcctaaagagtcattttaaaataatataaatatttaaaagtgtaactgctatctttatgttctgaaataagttaaaacattttaaaatatgaatactgtagtttaaaagaaagaaatggtgggaaggaaaagtagagaaagaaatgccaattccagtccaaagctttgtttgccaagttttcttagaatgaattttaccaatgtatgggttcttgttaacagaatgtgtaacagaaatactgaaagacttttgcctaaagtggcattattgactgctggtgtgatgctactgtaatgtgataaattattaaattgttgcaaagtgct

SEQ ID NO: 308066 - DNA, 5148 bp, Homo sapiens
ttggaactactgacctcaggtgatccgcccactttggcctcccgaaagtgctgggattacagtcatgagccaccatgcccagcctatttatttctgattctttaagggtgactggacgtgttgatcagcgctcgctgggatttggctgacgtgccccagccccgcctccctccccaccccacaatggcagaagaaactggacagagtaaattagctgcagccaagaaaaagttcaaagaatattggcagagaaaccgccctggtgttccagcagcagcgaagaggaacacgaaagcaaatggcagtagccctgagacggccgcttctggtggttgccactcatctgaggctgtgagtcttgcctggacaggcttttggggacagggggcccaaggagcagtagagggcaatcgttaagattgtggatggactgttgggtactggtgaaggattctggatttggccgggcacagtggctcacgcctgtaatccccacacttcgggagaccgaggcaggtggatcacaaggtcaggagatcgagaccatccaggcaaacacggtgaaatactaaaaaatacaaaaaaaaaagccgggcgtggtggcgggcgcctgcagtcccagctgctccggagtctgagggaggagaatggcgtgaacctaggaggcggagcttgcagtgagccaagatcacgccactgcactccagcctggaaggcagagagagactccgtttcaaaaaagaaaagaattctgggtttgaatcctgcctctccgtctgctagggatatgatttagggcaagttgcttgagctctttgggcctctgttttcacgtctgtatgatagaggtggtattgtttgacttgtatttgtgaagtttcaatgagattgataattgtcgattttatgttaatccctagtacatggcctgctgtcaacacccaggacacccaggatatggtctttgctgtttgattttcctcatccccagtctcaaggggaagccaggacaatgagaacagccacttcccatcaggagtcactgcaaggcccccagggtgggatggtggggagataagaaccgtgagagaagttggcacaaaggagttatgggacaaagggtccaagataggcagaaaagaaaatgttgccagttgatggggaagaaaggaagtcggagggctcagacactgagggggacagaacatctccatgtgcagtctcatctcttatagtcagcaacaggtatccacggggagggccctacatcatctgctaccctgaaggatctggaggtaggaggctctgggcggaggtgcagtgaccccgcaggccagccctccaacctcctcccgcagcggggactgggtgcccctctgccagctgagacagcccacacacaacccagccctaatgatcgttctctctacctctcccccaagtcctcctccgcctcctcctctctgcatgcgcgtcagagcccgtgccaagaacaagcagcagtcctgaactcgaggtccataaaaatcagtcgactgaatgacaccatcaaatctttgaaacaacagaagaaacaagtggaacatcagctggaagaagaaaagaaagcaaacaatgagaaacagaaagctgaaagggagctagagggtcaaatccagagattgaacacagagaaaaagaaactaaatacggacctgtatcacatgaaacattctctcagatactttgaagaagagtccaaggatctggccggccgcctgcaacgttcatcgcagcgtataggagagttagagtggtctctctgtgctgtcgccgccacacagaagaagaagccggatgggttctcgagccgcagtaaagcacttctcaagcggcagttagagcagtccatacgggagcagatactgctgaaaggacacgtgacacagttgaaggagtcgcttaaagaagtccactggagagagtggcaggagagctccaggctcaggtggaaaacaatcagtgcatcagtctcctgaaccgtgggcaaaaggagaggcttcgcgagcaggaggagaggcttcaggagcagcaggagaggcttcgggaacaggagaagaggcttcagcagctggccgagccacagagcgacttggaggagctgaagcacgagaacaagagcgcactgcagttggagcagcaagtaaaggagctgcaggagaagctgggccaggtgacggagacgctcacctcggctgagaaggagccagaggcagcagtcccagcctcagggactgggggcgagtctagcggccttatggacctcctggaggagaaggtggacctgagggagcatgtggagaaactggaacttggattcatccagtaccggagagagagatgccatcagaaagtacatcgccttctaacagagccaggggacagtgccaaagatgcgtcaccgggaggaggccatcatcaggctggcccaggacgaggaggagaggaaggtgaagctgttggagctgcaggagatggtgttgcggcttgtggcagctacagcgaggggcacggcaaattcctggccgctgcccggaaccctgctgctgaacccagtccaggagccccagccccccaggagctcggggctgccgacaagcatggtgatctttgtgaggcgagcctcaccaacagcgtggagcctgcacaaggagaagccagggagggttcttcccaggacaaccctactgcacagccagtcgtgcagctccttggtgagatgcaggaccaccaggagcacccaggcttgggcagcaactgctgtgtgccatgcttttgctgggcttggctgccgagaagaaggagataaacaccaccatcatcaaagagctgctcaagaaatttttaaaaacgaaacaaagttatggggttaatctcctacacaattcatttacttcatttgaatgttagagctactcatgattatttgtgtttctaatttatagtttaagtttatttgtaaaaagttaaaagagagtgggtctctgtgcctctcactgatgttcactctggcatcctttagcatttttcttttttcatttcataattgtaggtcattagcatgcatatcgagtttgcccttacgtggtgggagttcaaacacacaaagacccactctttgcacaaaactgttctcgctggtttggaataggctcccgtgcttttttaatgttattgcagcatggatgttcattacagaattcagatcttccatagctcaatatgcggtttgccctcaagtgtgcactgtttattactttgtaatatgccactatgagtactgacacttagagctgtttaaaggccgagaactggaaacagcctttcctccattttctgtgtattggtgatgggagtgataaccttttgggggagctttctaaatctcgcagaagaggaaagtggcctgctctggcaggtatgtgcaggatacagtgtgtttcatctgttccggtgccaagaatgagcactgtactgtggcagttccctttggatttgtatgtgctctgggctcatgaagatattgcatcgtgagctgcagcagttgcactctttttcagtgacctaaaaatggcttatttccgaggaatgaaaggctgccatcgttggctgtggatgtggaaaacctttcctagcttagagcatttgtatctacaatacattttaaagtcagagttcgtgttccctgttttaatcacatgactacctgtcccagtacacgaaagggcgctggttggcattcttcttaatgtatttagtaaagatcataagacatcctttaagagtttaaatgtctctgaaacaggcatacaggctctagtcaagaatgaattagagtgaaggaaagctgtgtgacacctggcattcctctctgttcatggagcttctttgaggcttgaagtttgattttactatctagacctctctggctaatacctattcttcaaccacctcggttactctgacataggaatttacttcttttccttgagtggaaaacactttagaaaataataacaaacattattataaactaatatatgtgagagtacttagttgaaacaaaaaggaattttagtagacagtattatattatctttgaaaatcaaggagaagtttatgcaactgaaaatgtttacacactgtgctgcaatctactgtttgtgaatgtcaatgtattatcaggaaacatgtctatacgatcgcagagttgtatttcctcacaaacttctttacgaagagtgaaatatgtttttgtacctctcagtttcagtcagggacatattttgtgcaatatttctgtgattgtgcctatgcgtgatgaatgaatgcatttcaatcatacattgcctaaatcataacttgatgatgcttgggaaagaatcaacagttaaaacttcatgaagttctaatgtctgtgttccaaaacacatcacattattaggttgtagggagatatgtatgtgtgctccctggggtggggagttttctagttactagaccatctccatttttagcacttggcagcctcatgatccttttataaataggagattaacaggagagcagcaatacgattttgccaatggaataacagatttgccggcattcactgaaagagggcagatattgggtccttgtgacttcaactgactcttccgaattgtatgaatttatcaatgtattagataaacccagtttcagaataataaagaaaaaatattagaccaaataatgtggctaatagtggtatgatttctagcccgtgggtttaaaactgtatcctaaagagtcattttaaaataatataaatatttaaaagtgtaactgctatctttatgttctgaaataagttaaaacattttaaaatatgaatactgtagtttaaaagaaagaaatggtgggaaggaaaagtagagaaagaaatgccaattccagtccaaagctttgtttgccaagttttcttagaatgaattttaccaatgtatgggttcttgttaacagaatgtgtaacagaaatactgaaagacttttgcctaaagtggcattattgactgctggtgtgatgctactgtaatgtgataaattattaaattgttgcaaagtgct

SEQ ID NO: 308067 - DNA, 2747 bp, Homo sapiens
ttggaactactgacctcaggtgatccgcccactttggcctcccgaaagtgctgggattacagtcatgagccaccatgcccagcctatttatttctgattctttaagggtgactggacgtgttgatcagcgctcgctgggatttggctgacgtgccccagccccgcctccctccccaccccacaatggcagaagaaactggacagagtaaattagctgcagccaagaaaaagttcaaagaatattggcagagaaaccgccctggtgttccagcagcagcgaagaggaacacgaaagcaaatggcagtagccctgagacggccgcttctggtggttgccactcatctgaggctgtgagtcttgcctggacaggcttttggggacagggggcccaaggagcagtagagggcaatcgttaagattgtggatggactgttgggtactggtgaaggattctggatttggccgggcacagtggctcacgcctgtaatccccacacttcgggagaccgaggcaggtggatcacaaggtcaggagatcgagaccatccaggcaaacacggtgaaatactaaaaaatacaaaaaaaaaagccgggcgtggtggcgggcgcctgcagtcccagctgctccggagtctgagggaggagaatggcgtgaacctaggaggcggagcttgcagtgagccaagatcacgccactgcactccagcctggaaggcagagagagactccgtttcaaaaaagaaaagaattctgggtttgaatcctgcctctccgtctgctagggatatgatttagggcaagttgcttgagctctttgggcctctgttttcacgtctgtatgatagaggtggtattgtttgacttgtatttgtgaagtttcaatgagattgataattgtcgattttatgttaatccctagtacatggcctgctgtcaacacccaggacacccaggatatggtctttgctgtttgattttcctcatccccagtctcaaggggaagccaggacaatgagaacagccacttcccatcaggagtcactgcaaggcccccagggtgggatggtggggagataagaaccgtgagagaagttggcacaaaggagttatgggacaaagggtccaagataggcagaaaagaaaatgttgccagttgatggggaagaaaggaagtcggagggctcagacactgagggggacagaacatctccatgtgcagtctcatctcttatagtcagcaacaggtatccacggggagggccctacatcatctgctaccctgaaggatctggaggtaggaggctctgggcggaggtgcagtgaccccgcaggccagccctccaacctcctcccgcagcggggactgggtgcccctctgccagctgagacagcccacacacaacccagccctaatgatcgttctctctacctctcccccaagtcctcctccgcctcctcctctctgcatgcgcgtcagagcccgtgccaagaacaagcagcagtcctgaactcgaggtccataaaaatcagtcgactgaatgacaccatcaaatctttgaaacaacagaagaaacaagtggaacatcagctggaagaagaaaagaaagcaaacaatgagaaacagaaagctgaaagggagctagagggtcaaatccagagattgaacacagagaaaaagaaactaaatacggacctgtatcacatgaaacattctctcagatactttgaagaagagtccaaggatctggccggccgcctgcaacgttcatcgcagcgtataggagagttagagtggtctctctgtgctgtcgccgccacacagaagaagaagccggatgggttctcgagccgcagtaaagcacttctcaagcggcagttagagcagtccatacgggagcagatactgctgaaaggacacgtgacacagttgaaggagtcgcttaaagaagtccagctggagagagatcaatatgctgaacaaataaaaggagagagggcccagtggcagcagaggatgaggaaaatgtcgcaggaggtttgcacattgaaggaggagaagaagcatgatacgcatcgggtagaggagctggagaggagcttgtccagactcaaaaaccagatggctgagccactgcccccggatgccccagcagtgtcctctgaggtggagctgcaagacctgaggaaggagctggagagagtggcaggagagctccaggctcaggtggaaaacaatcagtgcatcagtctcctgaaccgtgggcaaaaggagaggcttcgcgagcaggaggagaggcttcaggagcagcaggagaggcttcgggaacaggagaagaggcttcagcagctggccgagccacagagcgacttggaggagctgaagcacgagaacaagagcgcactgcagttggagcagcaagtaaaggagctgcaggagaagctgggccaggtgacggagacgctcacctcggctgagaaggagccagaggcagcagtcccagcctcagggactgggggcgagtctagcggccttatggacctcctggaggagaaggtggacctgagggagcatgtggagaaactggaacttggattcatccagtaccggagagagagatgccatcagaaagtacatcgccttctaacagagccaggggacagtgccaaagatgcgtcaccgggaggaggccatcatcaggctggcccaggacgaggaggagaggaaggtagggtgtgcaacatccct

SEQ ID NO: 308068 - DNA, 2250 bp, Homo sapiens
ttggaactactgacctcaggtgatccgcccactttggcctcccgaaagtgctgggattacagtcatgagccaccatgcccagcctatttatttctgattctttaagggtgactggacgtgttgatcagcgctcgctgggatttggctgacgtgccccagccccgcctccctccccaccccacaatggcagaagaaactggacagagtaaattagctgcagccaagaaaaagttcaaagaatattggcagagaaaccgccctggtgttccagcagcagcgaagaggaacacgaaagcaaatggcagtagccctgagacggccgcttctggtggttgccactcatctgaggctgtgagtcttgcctggacaggcttttggggacagggggcccaaggagcagtagagggcaatcgttaagattgtggatggactgttgggtactggtgaaggattctggatttggccgggcacagtggctcacgcctgtaatccccacacttcgggagaccgaggcaggtggatcacaaggtcaggagatcgagaccatccaggcaaacacggtgaaatactaaaaaatacaaaaaaaaaagccgggcgtggtggcgggcgcctgcagtcccagctgctccggagtctgagggaggagaatggcgtgaacctaggaggcggagcttgcagtgagccaagatcacgccactgcactccagcctggaaggcagagagagactccgtttcaaaaaagaaaagaattctgggtttgaatcctgcctctccgtctgctagggatatgatttagggcaagttgcttgagctctttgggcctctgttttcacgtctgtatgatagaggtggtattgtttgacttgtatttgtgaagtttcaatgagattgataattgtcgattttatgttaatccctagtacatggcctgctgtcaacacccaggacacccaggatatggtctttgctgtttgattttcctcatccccagtctcaaggggaagccaggacaatgagaacagccacttcccatcaggagtcactgcaaggcccccagggtgggatggtggggagataagaaccgtgagagaagttggcacaaaggagttatgggacaaagggtccaagataggcagaaaagaaaatgttgccagttgatggggaagaaaggaagtcggagggctcagacactgagggggacagaacatctccatgtgcagtctcatctcttatagtcagcaacaggtatccacggggagggccctacatcatctgctaccctgaaggatctggaggtaggaggctctgggcggaggtgcagtgaccccgcaggccagccctccaacctcctcccgcagcggggactgggtgcccctctgccagctgagacagcccacacacaacccagccctaatgatcgttctctctacctctcccccaagtcctcctccgcctcctcctctctgcatgcgcgtcagagcccgtgccaagaacaagcagcagtcctgaactcgaggtccataaaaatcagtcgactgaatgacaccatcaaatctttgaaacaacagaagaaacaagtggaacatcagctggaagaagaaaagaaagcaaacaatgagaaacagaaagctgaaagggagctagagggtcaaatccagagattgaacacagagaaaaagaaactaaatacggacctgtatcacatgaaacattctctcagatactttgaagaagagtccaaggatctggccggccgcctgcaacgttcatcgcagcgtataggagagttagagtggtctctctgtgctgtcgccgccacacagaagaagaagccggatgggttctcgagccgcagtaaagcacttctcaagcggcagttagagcagtccatacgggagcagatactgctgaaaggacacgtgacacagttgaaggagtcgcttaaagaagtccagctggagagagatcaatatgctgaacaaataaaaggagagagggcccagtggcagcagaggatgaggaaaatgtcgcaggaggtttgcacattgaagaggtgctgaagaagaactgcccgcatatcgtcgtggggactccaggccgtatcctagccgtggctcgaaataagagcctcaacctcaaacacattaaacactttattttggatgaatgtgataagatgcttgaacagctcgacatgcgtcgggatgtccagaatttttcgcatgaccccccacgagaagctggccgaga

SEQ ID NO: 308069 - DNA, 867 bp, Homo sapiens
cattctgcttctttgcctctggttacgcaggctgttttcaaaagaaaacaagagaagttgtaagactgactttcccaagaactatacactcatttataccaggaaacagacaagagaacaagaggctgccgaagacaaaacttctctgcaagcacctgtgcacagcaatgtgcgtgggcatctgtgagaagaagagaatctgtgaagtttgagcaagcggccttcccaagatgtaccgaatatctcaactgatgtcaacaccagtagcaagttcttccaggttggaaagagaatatgctggagagctgtctcccacgtgcattttcccaagtttcacctgtgattccctggatggttaccattcttttgaatgcggctccatagatcccctgacaggctcccactatacctgtcgccgaagtcccagactcctcaccaatggctactatatttggactgaagacagcttcctgtgcgacaaagatggcaacataactctgaacccatcccagaccagcgttatgtataaggagaacttagttaggatatttagaaagaaaaagagaatctgccattccttttcttctctcttcaacctcagtacctccaaatcttggctgcatggaagtatctttggtgacatcaactcttctccaagtgaagacaactggttgaaggggaccaggaggttggacacagaccattgcaatggaaatgaaaccaggttgttgcaagaggtcttctttcaggcaatcctgcttgctgtgtgcttaatcatttctgcatgtgcaagatggttaatggggagacattttaggccagtggtcttaaaatgctcattggatgataactggtagctaatgtgaa

SEQ ID NO: 308070 - DNA, 532 bp, Homo sapiens
cattctgcttctttgcctctggttacgcaggctgttttcaaaagaaaacaagagaagttgtaagactgactttcccaagaactatacactcatttataccaggaaacagacaagagaacaagaggctgccgaagacaaaacttctctgcaagcacctgtgcacagcaatgtgcgtgggcatctgtgagaagaagagaatctgtgaagtttgagcaagcggccttcccaagatgtaccgaatatctcaactgatgtcaacaccagtagcaagtaaatgtagaagaactgtgatacgcaattatcttttgaacgattagactccttttagcaatttccttgctttgattttgctgatactcagaccattaaccatctgtcagtagcttgtgcttcttaaatgccagtgttcactttggcaatgattttaacttcatttttttccttgaaagaaatgtggtatttttccttctagtagaaaaaaaaaatcaccgtttttttttagatgcctgtgcataaatgtgaaaggagattg

SEQ ID NO: 308071 - DNA, 2142 bp, Homo sapiens
cattctgcttctttgcctctggttacgcaggctgttttcaaaagaaaacaagagaagttgtaagactgactttcccaagaactatacactcatttataccaggaaacagacaagagaacaagaggctgccgaagacaaaacttctctgcaagcacctgtgcacagcaatgtgcgtgggcatctgtgagaagaagagaatctgtgaagtttgagcaagcggccttcccaagatgtaccgaatatctcaactgatgtcaacaccagtagcaagttcttccaggttggaaagagaatatgctggagagctgtctcccacgtgcattttcccaagtttcacctgtgattccctggatggttaccattcttttgaatgcggctccatagatcccctgacaggctcccactatacctgtcgccgaagtcccagactcctcaccaatggctactatatttggactgaagacagcttcctgtgcgacaaagatggcaacataactctgaacccatcccagaccagcgttatgtataaggagaacttagttaggatatttagaaagaaaaagagaatctgccattccttttcttctctcttcaacctcagtacctccaaatcttggctgcatggaagtatctttggtgacatcaactcttctccaagtgaagacaactggttgaaggggaccaggaggttggacacagaccattgcaatggaaatgcagatgatttagactgttcttctctgactgatgactgggagtcagggaagatgaatgcagagtctgtgatcacctcctcttccagccacatcatatctcagcctcctggaggaaactcccatagcttgtctcttcagtcccagttgacagcttctgaacgtttccaagagaatagttcggatcattcagaaaccaggttgttgcaagaggtcttctttcaggcaatcctgcttgctgtgtgcttaatcatttctgcatgtgcaagatggtttatgggagaaatattagccagtgtcttcacatgctcattgatgataactgtagcttatgtgaaatcattgtttctcagccttgccagctatttcaaaaccactgcctgtgctcggttgtcaaaatttgacaaccatttaggaatgccttcgatgaatgtcctccatctgaatatctggaaattgtccaacttgcagtctacttggaatcaagtgttttattggaagggagtaagcgagtaatggagaaaaagccattttagtttgactatgtgattttaaaatgatctcagtttttccatcaaaattataatatgctcatgaaaataatattaatttgccttccctttgcaaacaccggcagttgaaaggaaaaggacggggaatgtgatggaaaagagaccgcctggaataaatgtccccctatgattctttaaggcagtggttctcgagcttgaattttcattaggaaattctgtgaggagcttgtaaccagatttctgggtctgccacatgcacctatctcttgctgaattgctttaatagaataatgagagcaagtttgtctaactaataccaacctgacaacttgaataacaataaatgcaatttgtacataaaatataatgctgcaaaagtttgtcattcacctcagtggagtgacttgatattaggtggtaaccgtagatgatggttaatatgaaaatggacaggaaagaagcattttctgaaagttatattcttttgaaccacgttctaaaccaagtttttaatcttcttggggctcgtaattacctttcactttaatgtcacttaaagatataacacagaaaaatgccttgagggcaaaatataggcaaaacaccaatgcgctttcaaatgcatgaaaatggtgcagttgtacccttgagccttgactcaagggctgtagatgttccctttccaccccccacacttggtgcgtgttcacaaagcaaatatggcctgtaattcaaatttgttctatgtgatactctctgagtaaaaactcatacatgcagaaaattgtctttgctcgaaatggtaatgccaaaatataactttatatataatttgcatttagtacatttttggttaaaaaataaactaataaataagtgaagtcatcagcaaaata

SEQ ID NO: 308072 - DNA, 2085 bp, Homo sapiens
cattctgcttctttgcctctggttacgcaggctgttttcaaaagaaaacaagagaagttgtaagactgactttcccaagaactatacactcatttataccaggaaacagacaagagaacaagaggctgccgaagacaaaacttctctgcaagcacctgtgcacagcaatgtgcgtgggcatctgtgagaagaagagaatctgtgaagtttgagcaagcggccttcccaagatgtaccgaatatctcaactgatgtcaacaccagtagcaagttcttccaggttggaaagagaatatgctggagagctgtctcccacgtgcattttcccaagtttcacctgtgattccctggatggttaccattcttttgaatgcggctccatagatcccctgacaggctcccactatacctgtcgccgaagtcccagactcctcaccaatggctactatatttggactgaagacagcttcctgtgcgacaaagatggcaacataactctgaacccatcccagaccagcgttatgtataaggagaacttagttagtacctccaaatcttggctgcatggaagtatctttggtgacatcaactcttctccaagtgaagacaactggttgaaggggaccaggaggttggacacagaccattgcaatggaaatgcagatgatttagactgttcttctctgactgatgactgggagtcagggaagatgaatgcagagtctgtgatcacctcctcttccagccacatcatatctcagcctcctggaggaaactcccatagcttgtctcttcagtcccagttgacagcttctgaacgtttccaagagaatagttcggatcattcagaaaccaggttgttgcaagaggtcttctttcaggcaatcctgcttgctgtgtgcttaatcatttctgcatgtgcaagatggtttatgggagaaatattagccagtgtcttcacatgctcattgatgataactgtagcttatgtgaaatcattgtttctcagccttgccagctatttcaaaaccactgcctgtgctcggttgtcaaaatttgacaaccatttaggaatgccttcgatgaatgtcctccatctgaatatctggaaattgtccaacttgcagtctacttggaatcaagtgttttattggaagggagtaagcgagtaatggagaaaaagccattttagtttgactatgtgattttaaaatgatctcagtttttccatcaaaattataatatgctcatgaaaataatattaatttgccttccctttgcaaacaccggcagttgaaaggaaaaggacggggaatgtgatggaaaagagaccgcctggaataaatgtccccctatgattctttaaggcagtggttctcgagcttgaattttcattaggaaattctgtgaggagcttgtaaccagatttctgggtctgccacatgcacctatctcttgctgaattgctttaatagaataatgagagcaagtttgtctaactaataccaacctgacaacttgaataacaataaatgcaatttgtacataaaatataatgctgcaaaagtttgtcattcacctcagtggagtgacttgatattaggtggtaaccgtagatgatggttaatatgaaaatggacaggaaagaagcattttctgaaagttatattcttttgaaccacgttctaaaccaagtttttaatcttcttggggctcgtaattacctttcactttaatgtcacttaaagatataacacagaaaaatgccttgagggcaaaatataggcaaaacaccaatgcgctttcaaatgcatgaaaatggtgcagttgtacccttgagccttgactcaagggctgtagatgttccctttccaccccccacacttggtgcgtgttcacaaagcaaatatggcctgtaattcaaatttgttctatgtgatactctctgagtaaaaactcatacatgcagaaaattgtctttgctcgaaatggtaatgccaaaatataactttatatataatttgcatttagtacatttttggttaaaaaataaactaataaataagtgaagtcatcagcaaaata

SEQ ID NO: 308073 - DNA, 2029 bp, Homo sapiens
ttgctctgcatcctcccagcattttgtattgccagttgtttgggttttagccattctactaggtatgcagtgatatctcgctgttttaatttgcattactgtaatgaggaatgatgttgaacatctgtttttatacttattgacatttgtatatattctttggtgaagtgtctgttcagatcttttgctcattttttcaagtgggttgcttattttcttattattgaattttgagagttctttatatattatggatagaagtccttgattagatacataatttgcaaatattttctcacagactgcgccttgtcttttcattctcttagcagtgtctttcacagtgcagaagttttacattttgataaagtccaattattcctttctcttctttcatggattgtgcatttggtattgcattttaaaactcattgccaaatgcaaggtcatattgatattcccccatgttttcttctagaagttttacagttttacgatctacatttttggtctatgacccattttgagttaaattttgtgtaaggtatgttatacatgtggaggttcatttttttgcatgtaaatatccaattgtttcaacaccattggttgaaaagacggtatgttctcctttgaatgcttctgcgcctcaattaaaatcagtttactctatctgcataagtctacttctgggctgtctactctctttcattgatctgtatgtctgtccattttccaataccactgtctttattactgtagtttcatagtaaaccttgaaatcataattctatagtaagtctaaaaaaatcacacaggttggaaatgcacaattagtatgctaaatcagagcaatcttgttgtttcagatggtttatgggagaaatattagccagtgtcttcacatgctcattgatgataactgtagcttatgtgaaatcattgtttctcagccttgccagctatttcaaaaccactgcctgtgctcggttgtcaaaatttgacaaccatttaggaatgccttcgatgaatgtcctccatctgaatatctggaaattgtccaacttgcagtctacttggaatcaagtgttttattggaagggagtaagcgagtaatggagaaaaagccattttagtttgactatgtgattttaaaatgatctcagtttttccatcaaaattataatatgctcatgaaaataatattaatttgccttccctttgcaaacaccggcagttgaaaggaaaaggacggggaatgtgatggaaaagagaccgcctggaataaatgtccccctatgattctttaaggcagtggttctcgagcttgaattttcattaggaaattctgtgaggagcttgtaaccagatttctgggtctgccacatgcacctatctcttgctgaattgctttaatagaataatgagagcaagtttgtctaactaataccaacctgacaacttgaataacaataaatgcaatttgtacataaaatataatgctgcaaaagtttgtcattcacctcagtggagtgacttgatattaggtggtaaccgtagatgatggttaatatgaaaatggacaggaaagaagcattttctgaaagttatattcttttgaaccacgttctaaaccaagtttttaatcttcttggggctcgtaattacctttcactttaatgtcacttaaagatataacacagaaaaatgccttgagggcaaaatataggcaaaacaccaatgcgctttcaaatgcatgaaaatggtgcagttgtacccttgagccttgactcaagggctgtagatgttccctttccaccccccacacttggtgcgtgttcacaaagcaaatatggcctgtaattcaaatttgttctatgtgatactctctgagtaaaaactcatacatgcagaaaattgtctttgctcgaaatggtaatgccaaaatataactttatatataatttgcatttagtacatttttggttaaaaaataaactaataaataagtgaagtcatcagcaaaata

SEQ ID NO: 308074 - DNA, 2799 bp, Homo sapiens
  misc_feature (1)..(3): n is a, c, g, or t
  misc_feature (6)..(6): n is a, c, g, or t
  misc_feature (8)..(8): n is a, c, g, or t
nnnacnangggcacattggcggccagggccagtccgcccggcggctcgcgcacggctccgcggtcccttttgcctgtccagccggccgcctgtccctgctccctccctccgtgaggtgtccgggttcccttcgcccagctctcccacccctacccgaccccggcgcccgggctcccagagggaactgcacttcggcagagttgaatgaatgaagagagacgcggagaactcctaaggaggagattggacaggctggactccccattgcttttctaaaaatcttggaaactttgtccttcattgaattacgacactgtccacctttaatttcctcgaaaacgcctgtaactcggctgaagccatgccttgtgttcaggcgcagtatgggtcctcgcctcaaggagccagccccgcttctcagagctacagttaccactcttcgggagaatacagctccgatttcttaactccagagtttgtcaagtttagcatggacctcaccaacactgaaatcactgccaccacttctctccccagcttcagtacctttatggacaactacagcacaggctacgacgtcaagccaccttgcttgtaccaaatgcccctgtccggacagcagtcctccattaaggtagaagacattcagatgcacaactaccagcaacacagccacctgcccccccagtctgaggagatgatgccgcactccgggtcggtttactacaagccctcctcgcccccgacgcccaccaccccgggcttccaggtgcagcacagccccatgtgggacgacccgggatctctccacaacttccaccagaactacgtggccactacgcacatgatcgagcagaggaaaacgccagtctcccgcctctccctcttctcctttaagcaatcgccccctggcaccccggtgtctagttgccagatgcgcttcgacgggcccctgcacgtccccatgaacccggagcccgccggcagccaccacgtggtggacgggcagaccttcgctgtgcccaaccccattcgcaagcccgcgtccatgggcttcccgggcctgcagatcggccacgcgtctcagctgctcgacacgcaggtgccctcaccgccgtcgcggggctccccctccaacgaggggctgtgcgctgtgtgtggggacaacgcggcctgccaacactacggcgtgcgcacctgtgagggctgcaaaggcttctttaagcgcacagtgcaaaaaaatgcaaaatacgtgtgtttagcaaataaaaactgcccagtggacaagcgtcgccggaatcgctgtcagtactgccgatttcagaagtgcctggctgttgggatggtcaaagaagtggttcgcacagacagtttaaaaggccggagaggtcgtttgccctcgaaaccgaagagcccacaggagccctctcccccttcgcccccggtgagtctgatcagtgccctcgtcagggcccatgtcgactccaacccggctatgaccagcctggactattccaggttccaggcgaaccctgactatcaaatgagtggagatgacacccagcatatccagcaattctatgatctcctgactggctccatggagatcatccggggctgggcagagaagatccctggcttcgcagacctgcccaaagccgaccaagacctgctttttgaatcagctttcttagaactgtttgtccttcgattagcatacaggtccaacccagtggagggtaaactcatcttttgcaatggggtggtcttgcacaggttgcaatgcgttcgtggctttggggaatggattgattccattgttgaattctcctccaacttgcagaatatgaacatcgacatttctgccttctcctgcattgctgccctggctatggtcacagagagacacgggctcaaggaacccaagagagtggaagaactgcaaaacaagattgtaaattgtctcaaagaccacgtgactttcaacaatggggggttgaaccgccccaattatttgtccaaactgttggggaagctcccagaacttcgtaccctttgcacacaggggctacagcgcattttctacctgaaattggaagacttggtgccaccgccagcaataattgacaaacttttcctggacactttacctttctaagacctcctcccaagcacttcaaaggaactggaatgataatggaaactgtcaagagggggcaagtcacatgggcagagatagccgtgtgagcagtctcagctcaagctgccccccatttctgtaaccctcctagcccccttgatccctaaagaaaacaaacaaacaaacaaaaactgttgctatttcctaacctgcaggcagaacctgaaagggcattttggctccggggcatcctggatttagaacatggactacacacaatacagtggtataaactttttattctcagtttaaaaatcagtttgttgttcagaagaaagattgctataaggtataatgggaaatgtttggccatgcttggttgttgcagttcagacaaatgtaacacacacacacatacacacacacacacacacacagagacacatcttaaggggacccacaagtattgccctttaacaagacttcaaagttttctgctgtaaagaaagctgtaatatatagtaaaactaaatgttgcgtgggtggcatgagttgaagaaggcaaaggcttgtaaatttacccaatgcagtttggctttttaaattattttgtgcctatttatgaataaatattacaaattctaaaagataagtgtgtt

SEQ ID NO: 308075 - DNA, 2621 bp, Homo sapiens
  misc_feature (1)..(3): n is a, c, g, or t
  misc_feature (6)..(6): n is a, c, g, or t
  misc_feature (8)..(8): n is a, c, g, or t
nnnacnangggcacattggcggccagggccagtccgcccggcggctcgcgcacggctccgcggtcccttttgcctgtccagccggccgcctgtccctgctccctccctccgtgaggtgtccgggttcccttcgcccagctctcccacccctacccgaccccggcgcccgggctcccagagggaactgcacttcggcagagttgaatgaatgaagagagacgcggagaactcctaaggaggagattggacaggctggactccccattgcttttctaaaaatcttggaaactttgtccttcattgaattacgacactgtccacctttaatttcctcgaaaacgcctgtaactcggctgaagcttcagtacctttatggacaactacagcacaggctacgacgtcaagccaccttgcttgtaccaaatgcccctgtccggacagcagtcctccattaaggtagaagacattcagatgcacaactaccagcaacacagccacctgcccccccagtctgaggagatgatgccgcactccgggtcggtttactacaagccctcctcgcccccgacgcccaccaccccgggcttccaggtgcagcacagccccatgtgggacgacccgggatctctccacaacttccaccagaactacgtggccactacgcacatgatcgagcagaggaaaacgccagtctcccgcctctccctcttctcctttaagcaatcgccccctggcaccccggtgtctagttgccagatgcgcttcgacgggcccctgcacgtccccatgaacccggagcccgccggcagccaccacgtggtggacgggcagaccttcgctgtgcccaaccccattcgcaagcccgcgtccatgggcttcccgggcctgcagatcggccacgcgtctcagctgctcgacacgcaggtgccctcaccgccgtcgcggggctccccctccaacgaggggctgtgcgctgtgtgtggggacaacgcggcctgccaacactacggcgtgcgcacctgtgagggctgcaaaggcttctttaagcgcacagtgcaaaaaaatgcaaaatacgtgtgtttagcaaataaaaactgcccagtggacaagcgtcgccggaatcgctgtcagtactgccgatttcagaagtgcctggctgttgggatggtcaaagaagtggttcgcacagacagtttaaaaggccggagaggtcgtttgccctcgaaaccgaagagcccacaggagccctctcccccttcgcccccggtgagtctgatcagtgccctcgtcagggcccatgtcgactccaacccggctatgaccagcctggactattccaggttccaggcgaaccctgactatcaaatgagtggagatgacacccagcatatccagcaattctatgatctcctgactggctccatggagatcatccggggctgggcagagaagatccctggcttcgcagacctgcccaaagccgaccaagacctgctttttgaatcagctttcttagaactgtttgtccttcgattagcatacaggtccaacccagtggagggtaaactcatcttttgcaatggggtggtcttgcacaggttgcaatgcgttcgtggctttggggaatggattgattccattgttgaattctcctccaacttgcagaatatgaacatcgacatttctgccttctcctgcattgctgccctggctatggtcacagagagacacgggctcaaggaacccaagagagtggaagaactgcaaaacaagattgtaaattgtctcaaagaccacgtgactttcaacaatggggggttgaaccgccccaattatttgtccaaactgttggggaagctcccagaacttcgtaccctttgcacacaggggctacagcgcattttctacctgaaattggaagacttggtgccaccgccagcaataattgacaaacttttcctggacactttacctttctaagacctcctcccaagcacttcaaaggaactggaatgataatggaaactgtcaagagggggcaagtcacatgggcagagatagccgtgtgagcagtctcagctcaagctgccccccatttctgtaaccctcctagcccccttgatccctaaagaaaacaaacaaacaaacaaaaactgttgctatttcctaacctgcaggcagaacctgaaagggcattttggctccggggcatcctggatttagaacatggactacacacaatacagtggtataaactttttattctcagtttaaaaatcagtttgttgttcagaagaaagattgctataaggtataatgggaaatgtttggccatgcttggttgttgcagttcagacaaatgtaacacacacacacatacacacacacacacacacacagagacacatcttaaggggacccacaagtattgccctttaacaagacttcaaagttttctgctgtaaagaaagctgtaatatatagtaaaactaaatgttgcgtgggtggcatgagttgaagaaggcaaaggcttgtaaatttacccaatgcagtttggctttttaaattattttgtgcctatttatgaataaatattacaaattctaaaagataagtgtgtt

SEQ ID NO: 308076 - DNA, 578 bp, Homo sapiens
cctctctctctttggtattaattgcaggtccaacccagtggagggtaaactcatcttttgcaatggggtggtcttgcacaggttgcaatgcgttcgtggctttggggaatggattgattccattgttgaattctcctccaacttgcagaatatgaacatcgacatttctgccttctcctgcattgctgccctggctatggtcacagagagacacgggctcaaggaacccaagagagtggaagaactgcaaaacaagattgtaaattgtctcaaagaccacgtgactttcaacaatggggggttgaaccgccccaattatttgtccaaactgttggggaagctcccagaacttcgtaccctttgcacacaggggctacagcgcattttctacctgaaattggaagacttggtgccaccgccagcaataattgacaaacttttcctggacactttacctttctaagacctcctcccaagcacttcaaaggaactggaatgataatggaaactgtcaagagggggcaatgtatatcgcatacaagtggatacatcaagaacagctatgcagtagtacagtc

SEQ ID NO: 308077 - DNA, 844 bp, Homo sapiens
tgaatactaacatgtcaattgttttgtggagataagagtgaacgtttcccagggctggatggcactgtatttagtctgtatggaaatggcaatttacatatttaaagcagcgacctcgtagcaccatccctaattgaattaattgccccggaacatctaatttccttactggtcagagagaggtttaattgttataaaaacctggctcccctattagaaacggggttagcaatttcacgggttatatattttagagaacctcattaagtgctttttaaaatgaaattccagttccaggcgaaccctgactatcaaatgagtggagatgacacccagcatatccagcaattctatgatctcctgactggctccatggagatcatccggggctgggcagagaagatccctggcttcgcagacctgcccaaagccgaccaagacctgctttttgaatcagctttcttagaactgtttgtccttcgattagcatacaggtaataagggagggaggagacaatccagggaggctgtgagagaaatcaagaaaggaaaagaaagggaggaagggaaaccagagggtggggtagagaaaaagacagaataggaaatggaagtcggagaaaggaagaaaaagaaagaaaacaaaaaaagacgagaagaagcgagcccagaagccttggatgaatggaatggaggtgggatagggggcgttcttgattgttatgaaattaaaccctttcaaggtccactggtctacattttattaactcttcagtaattaggtgactcttaaatccctcatttattgctcttcaagtaattagttgtttagcttttctctctc

SEQ ID NO: 308078 - DNA, 3522 bp, Homo sapiens
  misc_feature (1)..(3): n is a, c, g, or t
  misc_feature (6)..(6): n is a, c, g, or t
  misc_feature (8)..(8): n is a, c, g, or t
nnnacnangggcacattggcggccagggccagtccgcccggcggctcgcgcacggctccgcggtcccttttgcctgtccagccggccgcctgtccctgctccctccctccgtgaggtgtccgggttcccttcgcccagctctcccacccctacccgaccccggcgcccgggctcccagagggaactgcacttcggcagagttgaatgaatgaagagagacgcggagaactcctaaggaggagattggacaggctggactccccattgcttttctaaaaatcttggaaactttgtccttcattgaattacgacactgtccacctttaatttcctcgaaaacgcctgtaactcggctgaagccatgccttgtgttcaggcgcagtatgggtcctcgcctcaaggagccagccccgcttctcagagctacagttaccactcttcgggagaatacagctccgatttcttaactccagagtttgtcaagtttagcatggacctcaccaacactgaaatcactgccaccacttctctccccagcttcagtacctttatggacaactacagcacaggctacgacgtcaagccaccttgcttgtaccaaatgcccctgtccggacagcagtcctccattaaggtagaagacattcagatgcacaactaccagcaacacagccacctgcccccccagtctgaggagatgatgccgcactccgggtcggtttactacaagccctcctcgcccccgacgcccaccaccccgggcttccaggtgcagcacagccccatgtgggacgacccgggatctctccacaacttccaccagaactacgtggccactacgcacatgatcgagcagaggaaaacgccagtctcccgcctctccctcttctcctttaagcaatcgccccctggcaccccggtgtctagttgccagatgcgcttcgacgggcccctgcacgtccccatgaacccggagcccgccggcagccaccacgtggtggacgggcagaccttcgctgtgcccaaccccattcgcaagcccgcgtccatgggcttcccgggcctgcagatcggccacgcgtctcagctgctcgacacgcaggtgccctcaccgccgtcgcggggctccccctccaacgaggggctgtgcgctgtgtgtggggacaacgcggcctgccaacactacggcgtgcgcacctgtgagggctgcaaaggcttctttaagcgcacagtgcaaaaaaatgcaaaatacgtgtgtttagcaaataaaaactgcccagtggacaagcgtcgccggaatcgctgtcagtactgccgatttcagaagtgcctggctgttgggatggtcaaagaagtggttcgcacagacagtttaaaaggccggagaggtcgtttgccctcgaaaccgaagagcccacaggagccctctcccccttcgcccccggtgagtctgatcagtgccctcgtcagggcccatgtcgactccaacccggctatgaccagcctggactattccaggttccaggcgaaccctgactatcaaatgagtggagatgacacccagcatatccagcaattctatgatctcctgactggctccatggagatcatccggggctgggcagagaagatccctggcttcgcagacctgcccaaagccgaccaagacctgctttttgaatcagctttcttagaactgtttgtccttcgattagcatacaggtccaacccagtggagggtaaactcatcttttgcaatggggtggtcttgcacaggttgcaatgcgttcgtggctttggggaatggattgattccattgttgaattctcctccaacttgcagaatatgaacatcgacatttctgccttctcctgcattgctgccctggctatggtcacagagagacacgggctcaaggaacccaagagagtggaagaactgcaaaacaagattgtaaattgtctcaaagaccacgtgactttcaacaatggggggttgaaccgccccaattatttgtccaaactgttggggaagctcccagaacttcgtaccctttgcacacaggggctacagcgcattttctacctgaaattggaagacttggtgccaccgccagcaataattgacaaacttttcctggacactttacctttctaagacctcctcccaagcacttcaaaggaactggaatgataatggaaactgtcaagagggggcaagtcacatgggcagagatagccgtgtgagcagtctcagctcaagctgccccccatttctgtaaccctcctagcccccttgatccctaaagaaaacaaacaaacaaacaaaaactgttgctatttcctaacctgcaggcagaacctgaaagggcattttggctccggggcatcctggatttagaacatggactacacacaatacagtggtataaactttttattctcagtttaaaaatcagtttgttgttcagaagaaagattgctataaggtataatgggaaatgtttggccatgcttggttgttgcagttcagacaaatgtaacacacacacacatacacacacacacacacacacagagacacatcttaaggggacccacaagtattgccctttaacaagacttcaaagttttctgctgtaaagaaagctgtaatatatagtaaaactaaatgttgcgtgggtggcatgagttgaagaaggcaaaggcttgtaaatttacccaatgcagtttggctttttaaattattttgtgcctatttatgaataaatattacaaattctaaaagataagtgtgtttgcaaaaaaaaagaaaataaatacataaaaaagggacaagcatgttgattctaggttgaaaatgttataggcacttgctacttcagtaatgtctatattatataaatagtatttcagacactatgtagtctgttagattttataaagattggtagttatctgagcttaaacattttctcaattgtaaaataggtgggcacaagtattacacatcagaaaatcctgacaaaagggacacatagtgtttgtaacaccgtccaacattccttgtttgtaagtgttgtatgtaccgttgatgttgataaaaagaaagtttatatcttgattattttgttgtctaaagctaaacaaaacttgcatgcagcagcttttgactgtttccagagtgcttataatatacataactccctggaaataactgagcactttgaattttttttatgtctaaaattgtcagttaatttattattttgtttgagtaagaattttaatattgccatattctgtagtatttttctttgtatatttctagtatggcacatgatatgagtcactgcctttttttctatggtgtatgacagttagagatgctgattttttttctgataaattctttctttgagaaagacaattttaatgtttacaacaataaacctgtgtacgcgacaaacttatttgtgctttgtcattatctaacaatattcgtgaaacaccgtctgatat

SEQ ID NO: 308079 - DNA, 4001 bp, Homo sapiens
  misc_feature (1)..(3): n is a, c, g, or t
  misc_feature (6)..(6): n is a, c, g, or t
  misc_feature (8)..(8): n is a, c, g, or t
nnnacnangggcacattggcggccagggccagtccgcccggcggctcgcgcacggctccgcggtcccttttgcctgtccagccggccgcctgtccctgctccctccctccgtgaggtgtccgggttcccttcgcccagctctcccacccctacccgaccccggcgcccgggctcccagagggaactgcacttcggcagagttgaatgaatgaagagagacgcggagaactcctaaggaggagattggacaggctggactccccattgcttttctaaaaatcttggaaactttgtccttcattgaattacgacactgtccacctttaatttcctcgaaaacgcctgtaactcggctgaaggttagtgcaacttcatttctttcctttactctccagagctccccaaacatcaagaaacaggacaaggcaaaccctgtaacttaaggtttgcccgacccatcgccttcgggaacaactttctcattgtgaaattcaacttcatttctagatggtcatttctagaaagagactgctgaatctgagcttcagagaagaggctcatctgagtgggatgagtgggggggtatgagggagatgtttggaaatacccaggagtgtagaccctcagtagctttttagctctgggtctttatttggttagtctttccacgccctaaactgttgttctgcagcattctctctctcctgcctttcctctcgcgcccctacatgctctctgactgccgcgggctgccggtgtagctccaggtgtacccgagcccgggagaaagtgttcagttgaccaggctgagtgtgttatcaccctgtttcatttccagccatgccttgtgttcaggcgcagtatgggtcctcgcctcaaggagccagccccgcttctcagagctacagttaccactcttcgggagaatacagctccgatttcttaactccagagtttgtcaagtttagcatggacctcaccaacactgaaatcactgccaccacttctctccccagcttcagtacctttatggacaactacagcacaggctacgacgtcaagccaccttgcttgtaccaaatgcccctgtccggacagcagtcctccattaaggtagaagacattcagatgcacaactaccagcaacacagccacctgcccccccagtctgaggagatgatgccgcactccgggtcggtttactacaagccctcctcgcccccgacgcccaccaccccgggcttccaggtgcagcacagccccatgtgggacgacccgggatctctccacaacttccaccagaactacgtggccactacgcacatgatcgagcagaggaaaacgccagtctcccgcctctccctcttctcctttaagcaatcgccccctggcaccccggtgtctagttgccagatgcgcttcgacgggcccctgcacgtccccatgaacccggagcccgccggcagccaccacgtggtggacgggcagaccttcgctgtgcccaaccccattcgcaagcccgcgtccatgggcttcccgggcctgcagatcggccacgcgtctcagctgctcgacacgcaggtgccctcaccgccgtcgcggggctccccctccaacgaggggctgtgcgctgtgtgtggggacaacgcggcctgccaacactacggcgtgcgcacctgtgagggctgcaaaggcttctttaagcgcacagtgcaaaaaaatgcaaaatacgtgtgtttagcaaataaaaactgcccagtggacaagcgtcgccggaatcgctgtcagtactgccgatttcagaagtgcctggctgttgggatggtcaaagaagtggttcgcacagacagtttaaaaggccggagaggtcgtttgccctcgaaaccgaagagcccacaggagccctctcccccttcgcccccggtgagtctgatcagtgccctcgtcagggcccatgtcgactccaacccggctatgaccagcctggactattccaggttccaggcgaaccctgactatcaaatgagtggagatgacacccagcatatccagcaattctatgatctcctgactggctccatggagatcatccggggctgggcagagaagatccctggcttcgcagacctgcccaaagccgaccaagacctgctttttgaatcagctttcttagaactgtttgtccttcgattagcatacaggtccaacccagtggagggtaaactcatcttttgcaatggggtggtcttgcacaggttgcaatgcgttcgtggctttggggaatggattgattccattgttgaattctcctccaacttgcagaatatgaacatcgacatttctgccttctcctgcattgctgccctggctatggtcacagagagacacgggctcaaggaacccaagagagtggaagaactgcaaaacaagattgtaaattgtctcaaagaccacgtgactttcaacaatggggggttgaaccgccccaattatttgtccaaactgttggggaagctcccagaacttcgtaccctttgcacacaggggctacagcgcattttctacctgaaattggaagacttggtgccaccgccagcaataattgacaaacttttcctggacactttacctttctaagacctcctcccaagcacttcaaaggaactggaatgataatggaaactgtcaagagggggcaagtcacatgggcagagatagccgtgtgagcagtctcagctcaagctgccccccatttctgtaaccctcctagcccccttgatccctaaagaaaacaaacaaacaaacaaaaactgttgctatttcctaacctgcaggcagaacctgaaagggcattttggctccggggcatcctggatttagaacatggactacacacaatacagtggtataaactttttattctcagtttaaaaatcagtttgttgttcagaagaaagattgctataaggtataatgggaaatgtttggccatgcttggttgttgcagttcagacaaatgtaacacacacacacatacacacacacacacacacacagagacacatcttaaggggacccacaagtattgccctttaacaagacttcaaagttttctgctgtaaagaaagctgtaatatatagtaaaactaaatgttgcgtgggtggcatgagttgaagaaggcaaaggcttgtaaatttacccaatgcagtttggctttttaaattattttgtgcctatttatgaataaatattacaaattctaaaagataagtgtgtttgcaaaaaaaaagaaaataaatacataaaaaagggacaagcatgttgattctaggttgaaaatgttataggcacttgctacttcagtaatgtctatattatataaatagtatttcagacactatgtagtctgttagattttataaagattggtagttatctgagcttaaacattttctcaattgtaaaataggtgggcacaagtattacacatcagaaaatcctgacaaaagggacacatagtgtttgtaacaccgtccaacattccttgtttgtaagtgttgtatgtaccgttgatgttgataaaaagaaagtttatatcttgattattttgttgtctaaagctaaacaaaacttgcatgcagcagcttttgactgtttccagagtgcttataatatacataactccctggaaataactgagcactttgaattttttttatgtctaaaattgtcagttaatttattattttgtttgagtaagaattttaatattgccatattctgtagtatttttctttgtatatttctagtatggcacatgatatgagtcactgcctttttttctatggtgtatgacagttagagatgctgattttttttctgataaattctttctttgagaaagacaattttaatgtttacaacaataaacctgtgtacgcgacaaacttatttgtgctttgtcattatctaacaatattcgtgaaacaccgtctgatat

SEQ ID NO: 308080 - DNA, 3410 bp, Homo sapiens
  misc_feature (1)..(3): n is a, c, g, or t
  misc_feature (6)..(6): n is a, c, g, or t
  misc_feature (8)..(8): n is a, c, g, or t
nnnacnangggcacattggcggccagggccagtccgcccggcggctcgcgcacggctccgcggtcccttttgcctgtccagccggccgcctgtccctgctccctccctccgtgaggtgtccgggttcccttcgcccagctctcccacccctacccgaccccggcgcccgggctcccagagggaactgcacttcggcagagttgaatgaatgaagagagacgcggagaactcctaaggaggagattggacaggctggactccccattgcttttctaaaaatcttggaaactttgtccttcattgaattacgacactgtccacctttaatttcctcgaaaacgcctgtaactcggctgaaggttagtgcaacttcatttctttcctttactctccagagctccccaaacatcaagaaacaggacaaggcaaaccctgtaacttaaggtttgcccgacccatcgccttcgggaacaactttctcattgtgaaattcaacttcatttctagatggtcatttctagaaagagactgctgaatctgagcttcagagaagaggctcatctgagtgggatgagtgggggggtatgagggagatgtttggaaatacccaggagtgtagaccctcagtagctttttagctctgggtctttatttggttagtctttccacgccctaaactgttgttctgcagcattctctctctcctgcctttcctctcgcgcccctacatgctctctgactgccgcgggctgccggtgtagctccaggtgtacccgagcccgggagaaagtgttcagttgaccaggctgagtgtgttatcaccctgtttcatttccagccatgccttgtgttcaggcgcagtatgggtcctcgcctcaaggagccagccccgcttctcagagctacagttaccactcttcgggagaatacagctccgatttcttaactccagagtttgtcaagtttagcatggacctcaccaacactgaaatcactgccaccacttctctccccagcttcagtacctttatggacaactacagcacaggctacgacgtcaagccaccttgcttgtaccaaatgcccctgtccggacagcagtcctccattaagcgcacagtgcaaaaaaatgcaaaatacgtgtgtttagcaaataaaaactgcccagtggacaagcgtcgccggaatcgctgtcagtactgccgatttcagaagtgcctggctgttgggatggtcaaagaagtggttcgcacagacagtttaaaaggccggagaggtcgtttgccctcgaaaccgaagagcccacaggagccctctcccccttcgcccccggtgagtctgatcagtgccctcgtcagggcccatgtcgactccaacccggctatgaccagcctggactattccaggttccaggcgaaccctgactatcaaatgagtggagatgacacccagcatatccagcaattctatgatctcctgactggctccatggagatcatccggggctgggcagagaagatccctggcttcgcagacctgcccaaagccgaccaagacctgctttttgaatcagctttcttagaactgtttgtccttcgattagcatacaggtccaacccagtggagggtaaactcatcttttgcaatggggtggtcttgcacaggttgcaatgcgttcgtggctttggggaatggattgattccattgttgaattctcctccaacttgcagaatatgaacatcgacatttctgccttctcctgcattgctgccctggctatggtcacagagagacacgggctcaaggaacccaagagagtggaagaactgcaaaacaagattgtaaattgtctcaaagaccacgtgactttcaacaatggggggttgaaccgccccaattatttgtccaaactgttggggaagctcccagaacttcgtaccctttgcacacaggggctacagcgcattttctacctgaaattggaagacttggtgccaccgccagcaataattgacaaacttttcctggacactttacctttctaagacctcctcccaagcacttcaaaggaactggaatgataatggaaactgtcaagagggggcaagtcacatgggcagagatagccgtgtgagcagtctcagctcaagctgccccccatttctgtaaccctcctagcccccttgatccctaaagaaaacaaacaaacaaacaaaaactgttgctatttcctaacctgcaggcagaacctgaaagggcattttggctccggggcatcctggatttagaacatggactacacacaatacagtggtataaactttttattctcagtttaaaaatcagtttgttgttcagaagaaagattgctataaggtataatgggaaatgtttggccatgcttggttgttgcagttcagacaaatgtaacacacacacacatacacacacacacacacacacagagacacatcttaaggggacccacaagtattgccctttaacaagacttcaaagttttctgctgtaaagaaagctgtaatatatagtaaaactaaatgttgcgtgggtggcatgagttgaagaaggcaaaggcttgtaaatttacccaatgcagtttggctttttaaattattttgtgcctatttatgaataaatattacaaattctaaaagataagtgtgtttgcaaaaaaaaagaaaataaatacataaaaaagggacaagcatgttgattctaggttgaaaatgttataggcacttgctacttcagtaatgtctatattatataaatagtatttcagacactatgtagtctgttagattttataaagattggtagttatctgagcttaaacattttctcaattgtaaaataggtgggcacaagtattacacatcagaaaatcctgacaaaagggacacatagtgtttgtaacaccgtccaacattccttgtttgtaagtgttgtatgtaccgttgatgttgataaaaagaaagtttatatcttgattattttgttgtctaaagctaaacaaaacttgcatgcagcagcttttgactgtttccagagtgcttataatatacataactccctggaaataactgagcactttgaattttttttatgtctaaaattgtcagttaatttattattttgtttgagtaagaattttaatattgccatattctgtagtatttttctttgtatatttctagtatggcacatgatatgagtcactgcctttttttctatggtgtatgacagttagagatgctgattttttttctgataaattctttctttgagaaagacaattttaatgtttacaacaataaacctgtgtacgcgacaaacttatttgtgctttgtcattatctaacaatattcgtgaaacaccgtctgatat

SEQ ID NO: 308081 - DNA, 3344 bp, Homo sapiens
  misc_feature (1)..(3): n is a, c, g, or t
  misc_feature (6)..(6): n is a, c, g, or t
  misc_feature (8)..(8): n is a, c, g, or t
nnnacnangggcacattggcggccagggccagtccgcccggcggctcgcgcacggctccgcggtcccttttgcctgtccagccggccgcctgtccctgctccctccctccgtgaggtgtccgggttcccttcgcccagctctcccacccctacccgaccccggcgcccgggctcccagagggaactgcacttcggcagagttgaatgaatgaagagagacgcggagaactcctaaggaggagattggacaggctggactccccattgcttttctaaaaatcttggaaactttgtccttcattgaattacgacactgtccacctttaatttcctcgaaaacgcctgtaactcggctgaagcttcagtacctttatggacaactacagcacaggctacgacgtcaagccaccttgcttgtaccaaatgcccctgtccggacagcagtcctccattaaggtagaagacattcagatgcacaactaccagcaacacagccacctgcccccccagtctgaggagatgatgccgcactccgggtcggtttactacaagccctcctcgcccccgacgcccaccaccccgggcttccaggtgcagcacagccccatgtgggacgacccgggatctctccacaacttccaccagaactacgtggccactacgcacatgatcgagcagaggaaaacgccagtctcccgcctctccctcttctcctttaagcaatcgccccctggcaccccggtgtctagttgccagatgcgcttcgacgggcccctgcacgtccccatgaacccggagcccgccggcagccaccacgtggtggacgggcagaccttcgctgtgcccaaccccattcgcaagcccgcgtccatgggcttcccgggcctgcagatcggccacgcgtctcagctgctcgacacgcaggtgccctcaccgccgtcgcggggctccccctccaacgaggggctgtgcgctgtgtgtggggacaacgcggcctgccaacactacggcgtgcgcacctgtgagggctgcaaaggcttctttaagcgcacagtgcaaaaaaatgcaaaatacgtgtgtttagcaaataaaaactgcccagtggacaagcgtcgccggaatcgctgtcagtactgccgatttcagaagtgcctggctgttgggatggtcaaagaagtggttcgcacagacagtttaaaaggccggagaggtcgtttgccctcgaaaccgaagagcccacaggagccctctcccccttcgcccccggtgagtctgatcagtgccctcgtcagggcccatgtcgactccaacccggctatgaccagcctggactattccaggttccaggcgaaccctgactatcaaatgagtggagatgacacccagcatatccagcaattctatgatctcctgactggctccatggagatcatccggggctgggcagagaagatccctggcttcgcagacctgcccaaagccgaccaagacctgctttttgaatcagctttcttagaactgtttgtccttcgattagcatacaggtccaacccagtggagggtaaactcatcttttgcaatggggtggtcttgcacaggttgcaatgcgttcgtggctttggggaatggattgattccattgttgaattctcctccaacttgcagaatatgaacatcgacatttctgccttctcctgcattgctgccctggctatggtcacagagagacacgggctcaaggaacccaagagagtggaagaactgcaaaacaagattgtaaattgtctcaaagaccacgtgactttcaacaatggggggttgaaccgccccaattatttgtccaaactgttggggaagctcccagaacttcgtaccctttgcacacaggggctacagcgcattttctacctgaaattggaagacttggtgccaccgccagcaataattgacaaacttttcctggacactttacctttctaagacctcctcccaagcacttcaaaggaactggaatgataatggaaactgtcaagagggggcaagtcacatgggcagagatagccgtgtgagcagtctcagctcaagctgccccccatttctgtaaccctcctagcccccttgatccctaaagaaaacaaacaaacaaacaaaaactgttgctatttcctaacctgcaggcagaacctgaaagggcattttggctccggggcatcctggatttagaacatggactacacacaatacagtggtataaactttttattctcagtttaaaaatcagtttgttgttcagaagaaagattgctataaggtataatgggaaatgtttggccatgcttggttgttgcagttcagacaaatgtaacacacacacacatacacacacacacacacacacagagacacatcttaaggggacccacaagtattgccctttaacaagacttcaaagttttctgctgtaaagaaagctgtaatatatagtaaaactaaatgttgcgtgggtggcatgagttgaagaaggcaaaggcttgtaaatttacccaatgcagtttggctttttaaattattttgtgcctatttatgaataaatattacaaattctaaaagataagtgtgtttgcaaaaaaaaagaaaataaatacataaaaaagggacaagcatgttgattctaggttgaaaatgttataggcacttgctacttcagtaatgtctatattatataaatagtatttcagacactatgtagtctgttagattttataaagattggtagttatctgagcttaaacattttctcaattgtaaaataggtgggcacaagtattacacatcagaaaatcctgacaaaagggacacatagtgtttgtaacaccgtccaacattccttgtttgtaagtgttgtatgtaccgttgatgttgataaaaagaaagtttatatcttgattattttgttgtctaaagctaaacaaaacttgcatgcagcagcttttgactgtttccagagtgcttataatatacataactccctggaaataactgagcactttgaattttttttatgtctaaaattgtcagttaatttattattttgtttgagtaagaattttaatattgccatattctgtagtatttttctttgtatatttctagtatggcacatgatatgagtcactgcctttttttctatggtgtatgacagttagagatgctgattttttttctgataaattctttctttgagaaagacaattttaatgtttacaacaataaacctgtgtacgcgacaaacttatttgtgctttgtcattatctaacaatattcgtgaaacaccgtctgatat

SEQ ID NO: 308082 - DNA, 3490 bp, Homo sapiens
agtgcaatgggtggtattttctgttgtttcaagtcatttcttttatacattcattttaagtgctatgtttggtaaaggcttcccactcatttccaatgagacaaacagggaaggcatggaagggcctgcctggtgagtctacatatgcccagctgaatctctgtcgggaagaaaccctgaagcttcctgtgtctgtatttcagggaggagattggacaggctggactccccattgcttttctaaaaatcttggaaactttgtccttcattgaattacgacactgtccacctttaatttcctcgaaaacgcctgtaactcggctgaagccatgccttgtgttcaggcgcagtatgggtcctcgcctcaaggagccagccccgcttctcagagctacagttaccactcttcgggagaatacagctccgatttcttaactccagagtttgtcaagtttagcatggacctcaccaacactgaaatcactgccaccacttctctccccagcttcagtacctttatggacaactacagcacaggctacgacgtcaagccaccttgcttgtaccaaatgcccctgtccggacagcagtcctccattaaggtagaagacattcagatgcacaactaccagcaacacagccacctgcccccccagtctgaggagatgatgccgcactccgggtcggtttactacaagccctcctcgcccccgacgcccaccaccccgggcttccaggtgcagcacagccccatgtgggacgacccgggatctctccacaacttccaccagaactacgtggccactacgcacatgatcgagcagaggaaaacgccagtctcccgcctctccctcttctcctttaagcaatcgccccctggcaccccggtgtctagttgccagatgcgcttcgacgggcccctgcacgtccccatgaacccggagcccgccggcagccaccacgtggtggacgggcagaccttcgctgtgcccaaccccattcgcaagcccgcgtccatgggcttcccgggcctgcagatcggccacgcgtctcagctgctcgacacgcaggtgccctcaccgccgtcgcggggctccccctccaacgaggggctgtgcgctgtgtgtggggacaacgcggcctgccaacactacggcgtgcgcacctgtgagggctgcaaaggcttctttaagcgcacagtgcaaaaaaatgcaaaatacgtgtgtttagcaaataaaaactgcccagtggacaagcgtcgccggaatcgctgtcagtactgccgatttcagaagtgcctggctgttgggatggtcaaagaagtggttcgcacagacagtttaaaaggccggagaggtcgtttgccctcgaaaccgaagagcccacaggagccctctcccccttcgcccccggtgagtctgatcagtgccctcgtcagggcccatgtcgactccaacccggctatgaccagcctggactattccaggttccaggcgaaccctgactatcaaatgagtggagatgacacccagcatatccagcaattctatgatctcctgactggctccatggagatcatccggggctgggcagagaagatccctggcttcgcagacctgcccaaagccgaccaagacctgctttttgaatcagctttcttagaactgtttgtccttcgattagcatacaggtccaacccagtggagggtaaactcatcttttgcaatggggtggtcttgcacaggttgcaatgcgttcgtggctttggggaatggattgattccattgttgaattctcctccaacttgcagaatatgaacatcgacatttctgccttctcctgcattgctgccctggctatggtcacagagagacacgggctcaaggaacccaagagagtggaagaactgcaaaacaagattgtaaattgtctcaaagaccacgtgactttcaacaatggggggttgaaccgccccaattatttgtccaaactgttggggaagctcccagaacttcgtaccctttgcacacaggggctacagcgcattttctacctgaaattggaagacttggtgccaccgccagcaataattgacaaacttttcctggacactttacctttctaagacctcctcccaagcacttcaaaggaactggaatgataatggaaactgtcaagagggggcaagtcacatgggcagagatagccgtgtgagcagtctcagctcaagctgccccccatttctgtaaccctcctagcccccttgatccctaaagaaaacaaacaaacaaacaaaaactgttgctatttcctaacctgcaggcagaacctgaaagggcattttggctccggggcatcctggatttagaacatggactacacacaatacagtggtataaactttttattctcagtttaaaaatcagtttgttgttcagaagaaagattgctataaggtataatgggaaatgtttggccatgcttggttgttgcagttcagacaaatgtaacacacacacacatacacacacacacacacacacagagacacatcttaaggggacccacaagtattgccctttaacaagacttcaaagttttctgctgtaaagaaagctgtaatatatagtaaaactaaatgttgcgtgggtggcatgagttgaagaaggcaaaggcttgtaaatttacccaatgcagtttggctttttaaattattttgtgcctatttatgaataaatattacaaattctaaaagataagtgtgtttgcaaaaaaaaagaaaataaatacataaaaaagggacaagcatgttgattctaggttgaaaatgttataggcacttgctacttcagtaatgtctatattatataaatagtatttcagacactatgtagtctgttagattttataaagattggtagttatctgagcttaaacattttctcaattgtaaaataggtgggcacaagtattacacatcagaaaatcctgacaaaagggacacatagtgtttgtaacaccgtccaacattccttgtttgtaagtgttgtatgtaccgttgatgttgataaaaagaaagtttatatcttgattattttgttgtctaaagctaaacaaaacttgcatgcagcagcttttgactgtttccagagtgcttataatatacataactccctggaaataactgagcactttgaattttttttatgtctaaaattgtcagttaatttattattttgtttgagtaagaattttaatattgccatattctgtagtatttttctttgtatatttctagtatggcacatgatatgagtcactgcctttttttctatggtgtatgacagttagagatgctgattttttttctgataaattctttctttgagaaagacaattttaatgtttacaacaataaacctgtgtacgcgacaaacttatttgtgctttgtcattatctaacaatattcgtgaaacaccgtctgatat

SEQ ID NO: 308083 - DNA, 3468 bp, Homo sapiens
  misc_feature (1)..(3): n is a, c, g, or t
  misc_feature (6)..(6): n is a, c, g, or t
  misc_feature (8)..(8): n is a, c, g, or t
nnnacnangggcacattggcggccagggccagtccgcccggcggctcgcgcacggctccgcggtcccttttgcctgtccagccggccgcctgtccctgctccctccctccgtgaggtgtccgggttcccttcgcccagctctcccacccctacccgaccccggcgcccgggctcccagagggaactgcacttcggcagagttgaatgaatgaagagagacgcggagaactcctaaggaggagattggacaggctggactccccattgcttttctaaaaatcttggaaactttgtccttcattgaattacgacactgtccacctttaatttcctcgcctcgcctcaaggagccagccccgcttctcagagctacagttaccactcttcgggagaatacagctccgatttcttaactccagagtttgtcaagtttagcatggacctcaccaacactgaaatcactgccaccacttctctccccagcttcagtacctttatggacaactacagcacaggctacgacgtcaagccaccttgcttgtaccaaatgcccctgtccggacagcagtcctccattaaggtagaagacattcagatgcacaactaccagcaacacagccacctgcccccccagtctgaggagatgatgccgcactccgggtcggtttactacaagccctcctcgcccccgacgcccaccaccccgggcttccaggtgcagcacagccccatgtgggacgacccgggatctctccacaacttccaccagaactacgtggccactacgcacatgatcgagcagaggaaaacgccagtctcccgcctctccctcttctcctttaagcaatcgccccctggcaccccggtgtctagttgccagatgcgcttcgacgggcccctgcacgtccccatgaacccggagcccgccggcagccaccacgtggtggacgggcagaccttcgctgtgcccaaccccattcgcaagcccgcgtccatgggcttcccgggcctgcagatcggccacgcgtctcagctgctcgacacgcaggtgccctcaccgccgtcgcggggctccccctccaacgaggggctgtgcgctgtgtgtggggacaacgcggcctgccaacactacggcgtgcgcacctgtgagggctgcaaaggcttctttaagcgcacagtgcaaaaaaatgcaaaatacgtgtgtttagcaaataaaaactgcccagtggacaagcgtcgccggaatcgctgtcagtactgccgatttcagaagtgcctggctgttgggatggtcaaagaagtggttcgcacagacagtttaaaaggccggagaggtcgtttgccctcgaaaccgaagagcccacaggagccctctcccccttcgcccccggtgagtctgatcagtgccctcgtcagggcccatgtcgactccaacccggctatgaccagcctggactattccaggttccaggcgaaccctgactatcaaatgagtggagatgacacccagcatatccagcaattctatgatctcctgactggctccatggagatcatccggggctgggcagagaagatccctggcttcgcagacctgcccaaagccgaccaagacctgctttttgaatcagctttcttagaactgtttgtccttcgattagcatacaggtccaacccagtggagggtaaactcatcttttgcaatggggtggtcttgcacaggttgcaatgcgttcgtggctttggggaatggattgattccattgttgaattctcctccaacttgcagaatatgaacatcgacatttctgccttctcctgcattgctgccctggctatggtcacagagagacacgggctcaaggaacccaagagagtggaagaactgcaaaacaagattgtaaattgtctcaaagaccacgtgactttcaacaatggggggttgaaccgccccaattatttgtccaaactgttggggaagctcccagaacttcgtaccctttgcacacaggggctacagcgcattttctacctgaaattggaagacttggtgccaccgccagcaataattgacaaacttttcctggacactttacctttctaagacctcctcccaagcacttcaaaggaactggaatgataatggaaactgtcaagagggggcaagtcacatgggcagagatagccgtgtgagcagtctcagctcaagctgccccccatttctgtaaccctcctagcccccttgatccctaaagaaaacaaacaaacaaacaaaaactgttgctatttcctaacctgcaggcagaacctgaaagggcattttggctccggggcatcctggatttagaacatggactacacacaatacagtggtataaactttttattctcagtttaaaaatcagtttgttgttcagaagaaagattgctataaggtataatgggaaatgtttggccatgcttggttgttgcagttcagacaaatgtaacacacacacacatacacacacacacacacacacagagacacatcttaaggggacccacaagtattgccctttaacaagacttcaaagttttctgctgtaaagaaagctgtaatatatagtaaaactaaatgttgcgtgggtggcatgagttgaagaaggcaaaggcttgtaaatttacccaatgcagtttggctttttaaattattttgtgcctatttatgaataaatattacaaattctaaaagataagtgtgtttgcaaaaaaaaagaaaataaatacataaaaaagggacaagcatgttgattctaggttgaaaatgttataggcacttgctacttcagtaatgtctatattatataaatagtatttcagacactatgtagtctgttagattttataaagattggtagttatctgagcttaaacattttctcaattgtaaaataggtgggcacaagtattacacatcagaaaatcctgacaaaagggacacatagtgtttgtaacaccgtccaacattccttgtttgtaagtgttgtatgtaccgttgatgttgataaaaagaaagtttatatcttgattattttgttgtctaaagctaaacaaaacttgcatgcagcagcttttgactgtttccagagtgcttataatatacataactccctggaaataactgagcactttgaattttttttatgtctaaaattgtcagttaatttattattttgtttgagtaagaattttaatattgccatattctgtagtatttttctttgtatatttctagtatggcacatgatatgagtcactgcctttttttctatggtgtatgacagttagagatgctgattttttttctgataaattctttctttgagaaagacaattttaatgtttacaacaataaacctgtgtacgcgacaaacttatttgtgctttgtcattatctaacaatattcgtgaaacaccgtctgatat

SEQ ID NO: 308084 - DNA, 3539 bp, Homo sapiens
ggctgtacgcgcggaatttcgggatgggcagatcgtccggcggtcgtgcactgtcagcagtcctttgcctgtcacccggtcgcctgtcctctcctccctcgtgaggtgtcgggttccttcgccaactctcccagcccctatctctgatcccgaatacacggactcccaaattggatctgcatcttcgcatgagctcatatcacactgatagatggccgcggaccaacattcgtactgaggacattggatggagttgacatccccctcgctcttactaaatattcttgcagtgtttgtccttcatagaattgctgacactgtgctaacctttaatcttcggcatctaaaaacgcaacttgtaacttacgcgctgaagccatgccttgtgttcaggcgcagtatgggtcctcgcctcaaggagccagccccgcttctcagagctacagttaccactcttcgggagaatacagctccgatttcttaactccagagtttgtcaagtttagcatggacctcaccaacactgaaatcactgccaccacttctctccccagcttcagtacctttatggacaactacagcacaggctacgacgtcaagccaccttgcttgtaccaaatgcccctgtccggacagcagtcctccattaaggtagaagacattcagatgcacaactaccagcaacacagccacctgcccccccagtctgaggagatgatgccgcactccgggtcggtttactacaagccctcctcgcccccgacgcccaccaccccgggcttccaggtgcagcacagccccatgtgggacgacccgggatctctccacaacttccaccagaactacgtggccactacgcacatgatcgagcagaggaaaacgccagtctcccgcctctccctcttctcctttaagcaatcgccccctggcaccccggtgtctagttgccagatgcgcttcgacgggcccctgcacgtccccatgaacccggagcccgccggcagccaccacgtggtggacgggcagaccttcgctgtgcccaaccccattcgcaagcccgcgtccatgggcttcccgggcctgcagatcggccacgcgtctcagctgctcgacacgcaggtgccctcaccgccgtcgcggggctccccctccaacgaggggctgtgcgctgtgtgtggggacaacgcggcctgccaacactacggcgtgcgcacctgtgagggctgcaaaggcttctttaagcgcacagtgcaaaaaaatgcaaaatacgtgtgtttagcaaataaaaactgcccagtggacaagcgtcgccggaatcgctgtcagtactgccgatttcagaagtgcctggctgttgggatggtcaaagaagtggttcgcacagacagtttaaaaggccggagaggtcgtttgccctcgaaaccgaagagcccacaggagccctctcccccttcgcccccggtgagtctgatcagtgccctcgtcagggcccatgtcgactccaacccggctatgaccagcctggactattccaggttccaggcgaaccctgactatcaaatgagtggagatgacacccagcatatccagcaattctatgatctcctgactggctccatggagatcatccggggctgggcagagaagatccctggcttcgcagacctgcccaaagccgaccaagacctgctttttgaatcagctttcttagaactgtttgtccttcgattagcatacaggtccaacccagtggagggtaaactcatcttttgcaatggggtggtcttgcacaggttgcaatgcgttcgtggctttggggaatggattgattccattgttgaattctcctccaacttgcagaatatgaacatcgacatttctgccttctcctgcattgctgccctggctatggtcacagagagacacgggctcaaggaacccaagagagtggaagaactgcaaaacaagattgtaaattgtctcaaagaccacgtgactttcaacaatggggggttgaaccgccccaattatttgtccaaactgttggggaagctcccagaacttcgtaccctttgcacacaggggctacagcgcattttctacctgaaattggaagacttggtgccaccgccagcaataattgacaaacttttcctggacactttacctttctaagacctcctcccaagcacttcaaaggaactggaatgataatggaaactgtcaagagggggcaagtcacatgggcagagatagccgtgtgagcagtctcagctcaagctgccccccatttctgtaaccctcctagcccccttgatccctaaagaaaacaaacaaacaaacaaaaactgttgctatttcctaacctgcaggcagaacctgaaagggcattttggctccggggcatcctggatttagaacatggactacacacaatacagtggtataaactttttattctcagtttaaaaatcagtttgttgttcagaagaaagattgctataaggtataatgggaaatgtttggccatgcttggttgttgcagttcagacaaatgtaacacacacacacatacacacacacacacacacacagagacacatcttaaggggacccacaagtattgccctttaacaagacttcaaagttttctgctgtaaagaaagctgtaatatatagtaaaactaaatgttgcgtgggtggcatgagttgaagaaggcaaaggcttgtaaatttacccaatgcagtttggctttttaaattattttgtgcctatttatgaataaatattacaaattctaaaagataagtgtgtttgcaaaaaaaaagaaaataaatacataaaaaagggacaagcatgttgattctaggttgaaaatgttataggcacttgctacttcagtaatgtctatattatataaatagtatttcagacactatgtagtctgttagattttataaagattggtagttatctgagcttaaacattttctcaattgtaaaataggtgggcacaagtattacacatcagaaaatcctgacaaaagggacacatagtgtttgtaacaccgtccaacattccttgtttgtaagtgttgtatgtaccgttgatgttgataaaaagaaagtttatatcttgattattttgttgtctaaagctaaacaaaacttgcatgcagcagcttttgactgtttccagagtgcttataatatacataactccctggaaataactgagcactttgaattttttttatgtctaaaattgtcagttaatttattattttgtttgagtaagaattttaatattgccatattctgtagtatttttctttgtatatttctagtatggcacatgatatgagtcactgcctttttttctatggtgtatgacagttagagatgctgattttttttctgataaattctttctttgagaaagacaattttaatgtttacaacaataaacctgtgtacgcgacaaacttatttgtgctttgtcattatctaacaatattcgtgaaacaccgtctgatat

SEQ ID NO: 308085 - DNA, 3880 bp, Homo sapiens
  misc_feature (1)..(3): n is a, c, g, or t
  misc_feature (6)..(6): n is a, c, g, or t
  misc_feature (8)..(8): n is a, c, g, or t
nnnacnangggcacattggcggccagggccagtccgcccggcggctcgcgcacggctccgcggtcccttttgcctgtccagccggccgcctgtccctgctccctccctccgtgaggtgtccgggttcccttcgcccagctctcccacccctacccgaccccggcgcccgggctcccagagggaactgcacttcggcagagttgaatgaatgaagagagacgcggagaactcctaaggaggagattggacaggctggactccccattgcttttctaaaaatcttggaaactttgtccttcattgaattacgacactgtccacctttaatttcctcgaaaacgcctgtaactcggctgaaggttagtgcaacttcatttctttcctttactctccagagctccccaaacatcaagaaacaggacaaggcaaaccctgtaacttaaggtttgcccgacccatcgccttcgggaacaactttctcattgtgaaattcaacttcatttctagatggtcatttctagaaagagactgctgaatctgagcttcagagaagaggctcatctgagtgggatgagtgggggggtatgagggagatgtttggaaatacccaggagtgtagaccctcagtagctttttagctctgggtctttatttggttagtctttccacgccctaaactgttgttctgcagcattctctctctcctgcctttcctctcgcgcccctacatgctctctgactgccgcgggctgccggtgtagctccaggtgtacccgagcccgggagaaagtgttcagttgaccaggctgagtgtgttatcaccctgtttcatttccagccatgccttgtgttcaggcgcagtatgggtcctcgcctcaaggagccagccccgcttctcagagctacagttaccactcttcgggagaatacagctccgatttcttaactccagagtttgtcaagtttagcatggacctcaccaacactgaaatcactgccaccacttctctccccagcttcagtacctttatggacaactacagcacaggctacgacgtcaagccaccttgcttgtaccaaatgcccctgtccggacagcagtcctccattaaggtagaagacattcagatgcacaactaccagcaacacagccacctgcccccccagtctgaggagatgatgccgcactccgggtcggtttactacaagccctcctcgcccccgacgcccaccaccccgggcttccaggtgcagcacagccccatgtgggacgacccgggatctctccacaacttccaccagaactacgtggccactacgcacatgatcgagcagaggaaaacgccagtctcccgcctctccctcttctcctttaagcaatcgccccctggcaccccggtgtctagttgccagatgcgcttcgacgggcccctgcacgtccccatgaacccggagcccgccggcagccaccacgtggtggacgggcagaccttcgctgtgcccaaccccattcgcaagcccgcgtccatgggcttcccgggcctgcagatcggccacgcgtctcagctgctcgacacgcaggtgccctcaccgccgtcgcggggctccccctccaacgaggggctgtgcgctgtgtgtggggacaacgcggcctgccaacactacggcgtgcgcacctgtgagggctgcaaaggcttctttaagcgcacagtgcaaaaaaatgcaaaatacgtgtgtttagcaaataaaaactgcccagtggacaagcgtcgccggaatcgctgtcagtactgccgatttcagaagtgcctggctgttgggatggtcaaagaagtggttcgcacagacagtttaaaaggccggagaggtcgtttgccctcgaaaccgaagagcccacaggagccctctcccccttcgcccccggtgagtctgatcagtgccctcgtcagggcccatgtcgactccaacccggctatgaccagcctggactattccaggttccaggcgaaccctgactatcaaatgagtggagatgacacccagcatatccagcaattctatgatctcctgactggctccatggagatcatccggggctgggcagagaagatccctggcttcgcagacctgcccaaagccgaccaagacctgctttttgaatcagctttcttagaactgtttgtccttcgattagcatacagaatatgaacatcgacatttctgccttctcctgcattgctgccctggctatggtcacagagagacacgggctcaaggaacccaagagagtggaagaactgcaaaacaagattgtaaattgtctcaaagaccacgtgactttcaacaatggggggttgaaccgccccaattatttgtccaaactgttggggaagctcccagaacttcgtaccctttgcacacaggggctacagcgcattttctacctgaaattggaagacttggtgccaccgccagcaataattgacaaacttttcctggacactttacctttctaagacctcctcccaagcacttcaaaggaactggaatgataatggaaactgtcaagagggggcaagtcacatgggcagagatagccgtgtgagcagtctcagctcaagctgccccccatttctgtaaccctcctagcccccttgatccctaaagaaaacaaacaaacaaacaaaaactgttgctatttcctaacctgcaggcagaacctgaaagggcattttggctccggggcatcctggatttagaacatggactacacacaatacagtggtataaactttttattctcagtttaaaaatcagtttgttgttcagaagaaagattgctataaggtataatgggaaatgtttggccatgcttggttgttgcagttcagacaaatgtaacacacacacacatacacacacacacacacacacagagacacatcttaaggggacccacaagtattgccctttaacaagacttcaaagttttctgctgtaaagaaagctgtaatatatagtaaaactaaatgttgcgtgggtggcatgagttgaagaaggcaaaggcttgtaaatttacccaatgcagtttggctttttaaattattttgtgcctatttatgaataaatattacaaattctaaaagataagtgtgtttgcaaaaaaaaagaaaataaatacataaaaaagggacaagcatgttgattctaggttgaaaatgttataggcacttgctacttcagtaatgtctatattatataaatagtatttcagacactatgtagtctgttagattttataaagattggtagttatctgagcttaaacattttctcaattgtaaaataggtgggcacaagtattacacatcagaaaatcctgacaaaagggacacatagtgtttgtaacaccgtccaacattccttgtttgtaagtgttgtatgtaccgttgatgttgataaaaagaaagtttatatcttgattattttgttgtctaaagctaaacaaaacttgcatgcagcagcttttgactgtttccagagtgcttataatatacataactccctggaaataactgagcactttgaattttttttatgtctaaaattgtcagttaatttattattttgtttgagtaagaattttaatattgccatattctgtagtatttttctttgtatatttctagtatggcacatgatatgagtcactgcctttttttctatggtgtatgacagttagagatgctgattttttttctgataaattctttctttgagaaagacaattttaatgtttacaacaataaacctgtgtacgcgacaaacttatttgtgctttgtcattatctaacaatattcgtgaaacaccgtctgatat

SEQ ID NO: 308086 - DNA, 2294 bp, Homo sapiens
tgaatactaacatgtcaattgttttgtggagataagagtgaacgtttcccagggctggatggcactgtatttagtctgtatggaaatggcaatttacatatttaaagcagcgacctcgtagcaccatccctaattgaattaattgccccggaacatctaatttccttactggtcagagagaggtttaattgttataaaaacctggctcccctattagaaacggggttagcaatttcacgggttatatattttagagaacctcattaagtgctttttaaaatgaaattccagttccaggcgaaccctgactatcaaatgagtggagatgacacccagcatatccagcaattctatgatctcctgactggctccatggagatcatccggggctgggcagagaagatccctggcttcgcagacctgcccaaagccgaccaagacctgctttttgaatcagctttcttagaactgtttgtccttcgattagcatacaggtccaacccagtggagggtaaactcatcttttgcaatggggtggtcttgcacaggttgcaatgcgttcgtggctttggggaatggattgattccattgttgaattctcctccaacttgcagaatatgaacatcgacatttctgccttctcctgcattgctgccctggctatggtcacagagagacacgggctcaaggaacccaagagagtggaagaactgcaaaacaagattgtaaattgtctcaaagaccacgtgactttcaacaatggggggttgaaccgccccaattatttgtccaaactgttggggaagctcccagaacttcgtaccctttgcacacaggggctacagcgcattttctacctgaaattggaagacttggtgccaccgccagcaataattgacaaacttttcctggacactttacctttctaagacctcctcccaagcacttcaaaggaactggaatgataatggaaactgtcaagagggggcaagtcacatgggcagagatagccgtgtgagcagtctcagctcaagctgccccccatttctgtaaccctcctagcccccttgatccctaaagaaaacaaacaaacaaacaaaaactgttgctatttcctaacctgcaggcagaacctgaaagggcattttggctccggggcatcctggatttagaacatggactacacacaatacagtggtataaactttttattctcagtttaaaaatcagtttgttgttcagaagaaagattgctataaggtataatgggaaatgtttggccatgcttggttgttgcagttcagacaaatgtaacacacacacacatacacacacacacacacacacagagacacatcttaaggggacccacaagtattgccctttaacaagacttcaaagttttctgctgtaaagaaagctgtaatatatagtaaaactaaatgttgcgtgggtggcatgagttgaagaaggcaaaggcttgtaaatttacccaatgcagtttggctttttaaattattttgtgcctatttatgaataaatattacaaattctaaaagataagtgtgtttgcaaaaaaaaagaaaataaatacataaaaaagggacaagcatgttgattctaggttgaaaatgttataggcacttgctacttcagtaatgtctatattatataaatagtatttcagacactatgtagtctgttagattttataaagattggtagttatctgagcttaaacattttctcaattgtaaaataggtgggcacaagtattacacatcagaaaatcctgacaaaagggacacatagtgtttgtaacaccgtccaacattccttgtttgtaagtgttgtatgtaccgttgatgttgataaaaagaaagtttatatcttgattattttgttgtctaaagctaaacaaaacttgcatgcagcagcttttgactgtttccagagtgcttataatatacataactccctggaaataactgagcactttgaattttttttatgtctaaaattgtcagttaatttattattttgtttgagtaagaattttaatattgccatattctgtagtatttttctttgtatatttctagtatggcacatgatatgagtcactgcctttttttctatggtgtatgacagttagagatgctgattttttttctgataaattctttctttgagaaagacaattttaatgtttacaacaataaacctgtgtacgcgacaaacttatttgtgctttgtcattatctaacaatattcgtgaaacaccgtctgatat

SEQ ID NO: 308087 - DNA, 3853 bp, Homo sapiens
  misc_feature (1)..(3): n is a, c, g, or t
  misc_feature (6)..(6): n is a, c, g, or t
  misc_feature (8)..(8): n is a, c, g, or t
nnnacnangggcacattggcggccagggccagtccgcccggcggctcgcgcacggctccgcggtcccttttgcctgtccagccggccgcctgtccctgctccctccctccgtgaggtgtccgggttcccttcgcccagctctcccacccctacccgaccccggcgcccgggctcccagagggaactgcacttcggcagagttgaatgaatgaagagagacgcggagaactcctaaggaggagattggacaggctggactccccattgcttttctaaaaatcttggaaactttgtccttcattgaattacgacactgtccacctttaatttcctcgaaaacgcctgtaactcggctgaaggttagtgcaacttcatttctttcctttactctccagagctccccaaacatcaagaaacaggacaaggcaaaccctgtaacttaaggtttgcccgacccatcgccttcgggaacaactttctcattgtgaaattcaacttcatttctagatggtcatttctagaaagagactgctgaatctgagcttcagagaagaggctcatctgagtgggatgagtgggggggtatgagggagatgtttggaaatacccaggagtgtagaccctcagtagctttttagctctgggtctttatttggttagtctttccacgccctaaactgttgttctgcagcattctctctctcctgcctttcctctcgcgcccctacatgctctctgactgccgcgggctgccggtgtagctccaggtgtacccgagcccgggagaaagtgttcagttgaccaggctgagtgtgttatcaccctgtttcatttccagccatgccttgtgttcaggcgcagtatgggtcctcgcctcaaggagccagccccgcttctcagagctacagttaccactcttcgggagaatacagctccgatttcttaactccagagtttgtcaagtttagcatggacctcaccaacactgaaatcactgccaccacttctctccccagcttcagtacctttatggacaactacagcacaggctacgacgtcaagccaccttgcttgtaccaaatgcccctgtccggacagcagtcctccattaaggtagaagacattcagatgcacaactaccagcaacacagccacctgcccccccagtctgaggagatgatgccgcactccgggtcggtttactacaagccctcctcgcccccgacgcccaccaccccgggcttccaggtgcagcacagccccatgtgggacgacccgggatctctccacaacttccaccagaactacgtggccactacgcacatgatcgagcagaggaaaacgccagtctcccgcctctccctcttctcctttaagcaatcgccccctggcaccccggtgtctagttgccagatgcgcttcgacgggcccctgcacgtccccatgaacccggagcccgccggcagccaccacgtggtggacgggcagaccttcgctgtgcccaaccccattcgcaagcccgcgtccatgggcttcccgggcctgcagatcggccacgcgtctcagctgctcgacacgcaggtgccctcaccgccgtcgcggggctccccctccaacgaggggctgtgcgctgtgtgtggggacaacgcggcctgccaacactacggcgtgcgcacctgtgagggctgcaaaggcttctttaagcgcacagtgcaaaaaaatgcaaaatacgtgtgtttagcaaataaaaactgcccagtggacaagcgtcgccggaatcgctgtcagtactgccgatttcagaagtgcctggctgttgggatggtcaaagaagtggttcgcacagacagtttaaaaggccggagaggtcgtttgccctcgaaaccgaagagcccacaggagccctctcccccttcgcccccggtgagtctgatcagtgccctcgtcagggcccatgtcgactccaacccggctatgaccagcctggactattccaggttccaggcgaaccctgactatcaaatgagtggagatgacacccagcatatccagcaattctatgatctcctgactggctccatggagatcatccggggctgggcagagaagatccctggcttcgcagacctgcccaaagccgaccaagacctgctttttgaatcagctttcttagaactgtttgtccttcgattagcatacaggtccaacccagtggagggtaaactcatcttttgcaatggggtggtcttgcacaggttgcaatgcgttcgtggctttggggaatggattgattccattgttgaattctcctccaacttgcagaatatgaacatcgacatttctgccttctcctgcattgctgccctggctatggtcacagagagacacgggctcaaggaacccaagagagtggaagaactgcaaaacaagattgtaaattgtctcaaagaccacgtgactttcaacaatggggggttgaaccgccccaattatttgtccaaactgttggggaagctcccagaacttcgtaccctttgcacacaggggctacagcgcattttctacctgaaattggaagacttggtgccaccgccagcaataattgacaaacttttcctggacactttacctttctaagacctcctcccaagcacttcaaaggaactggaatgataatggaaactgtcaagagggggcaagtcacatgggcagagatagccgtgtgagcagtctcagctcaagctgccccccatttctgtaaccctcctagcccccttgatccctaaagaaaacaaacaaacaaacaaaaactgttgctatttcctaacctgcaggcagaacctgaaagggcattttggctccggggcatcctggatttagaacatggactacacacaatacagtggtataaactttttattctcagtttaaaaatcagtttgttgttcagaagaaagattgctataaggtataatgggaaatgtttggccatgcttggttgttgcagttcagacaaatgtaacacacacacacatacacacacacacacacacacagagacacatcttaaggggacccacaagtattgccctttaacaagacttcaaagttttctgctgtaaagaaagctgtaatatatagtaaaactaaatgttgcgtgggtggcatgagttgaagaaggcaaaggcttgtaaatttacccaatgcagtttggctttttaaattattttgtgcctatttatgaataaatattacaaattctaaaagataagtgtgtttgcaaaaaaaaagaaaataaatacataaaaaagggacaagcatgttgattctaggttgaaaatgttataggcacttgctacttcagtaatgtctatattatataaatagtatttcagacactatgtagtctgttagattttataaagattggtagttatctgagcttaaacattttctcaattgtaaaataggtgggcacaagtattacacatcagaaaatcctgacaaaagggacacatagtgtttgtaacaccgtccaacattccttgtttgtaagtgttgtatgtaccgttgatgttgataaaaagaaagtttatatcttgattattttgttgtctaaagctaaacaaaacttgcatgcagcagcttttgactgtttccagagtgcttataatatacataactccctggaaataactgagcactttgaattttttttatgtctaaaattgtcagttaatttattattttgtttgagtaagaattttaatattgccatattctgtagtatttttctttgtatatttctagtatggcacatgatatgagtctgtattaactgcttggggatcct

SEQ ID NO: 308088 - DNA, 3948 bp, Homo sapiens
  misc_feature (1)..(3): n is a, c, g, or t
  misc_feature (6)..(6): n is a, c, g, or t
  misc_feature (8)..(8): n is a, c, g, or t
nnnacnangggcacattggcggccagggccagtccgcccggcggctcgcgcacggctccgcggtcccttttgcctgtccagccggccgcctgtccctgctccctccctccgtgaggtgtccgggttcccttcgcccagctctcccacccctacccgaccccggcgcccgggctcccagagggaactgcacttcggcagagttgaatgaatgaagagagacgcggagaactcctaaggaggagattggacaggctggactccccattgcttttctaaaaatcttggaaactttgtccttcattgaattacgacactgtccacctttaatttcctcgaaaacgcctgtaactcggctgaaggttagtgcaacttcatttctttcctttactctccagagctccccaaacatcaagaaacaggacaaggcaaaccctgtaacttaaggtttgcccgacccatcgccttcgggaacaactttctcattgtgaaattcaacttcatttctagatggtcatttctagaaagagactgctgaatctgagcttcagagaagaggctcatctgagtgggatgagtgggggggtatgagggagatgtttggaaatacccaggagtgtagaccctcagtagctttttagctctgggtctttatttggttagtctttccacgccctaaactgttgttctgcagcattctctctctcctgcctttcctctcgcgcccctacatgctctctgactgccgcgggctgccggtgtagctccaggtgtacccgagcccgggagaaagtgttcagttgaccaggctgagtgtgttatcaccctgtttcatttccagccatgccttgtgttcaggcgcagtatgggtcctcgcctcaaggagccagccccgcttctcagagctacagttaccactcttcgggagaatacagctccgatttcttaactccagagtttgtcaagtttagcatggacctcaccaacactgaaatcactgccaccacttctctccccagcttcagtacctttatggacaactacagcacaggctacgacgtcaagccaccttgcttgtaccaaatgcccctgtccggacagcagtcctccattaaggtagaagacattcagatgcacaactaccagcaacacagccacctgcccccccagtctgaggagatgatgccgcactccgggtcggtttactacaagccctcctcgcccccgacgcccaccaccccgggcttccaggtgcagcacagccccatgtgggacgacccgggatctctccacaacttccaccagaactacgtggccactacgcacatgatcgagcagaggaaaacgccagtctcccgcctctccctcttctcctttaagcaatcgccccctggcaccccggtgtctagttgccagatgcgcttcgacgggcccctgcacgtccccatgaacccggagcccgccggcagccaccacgtggtggacgggcagaccttcgctgtgcccaaccccattcgcaagcccgcgtccatgggcttcccgggcctgcagatcggccacgcgtctcagctgctcgacacgcaggtgccctcaccgccgtcgcggggctccccctccaacgaggggctgtgcgctgtgtgtggggacaacgcggcctgccaacactacggcgtgcgcacctgtgagggctgcaaaggcttctttaagcgcacagtgcaaaaaaatgcaaaatacgtgtgtttagcaaataaaaactgcccagtggacaagcgtcgccggaatcgctgtcagtactgccgatttcagaagtgcctggctgttgggatggtcaaagaagtggttcgcacagacagtttaaaaggccggagaggtcgtttgccctcgaaaccgaagagcccacaggagccctctcccccttcgcccccggtgagtctgatcagtgccctcgtcagggcccatgtcgactccaacccggctatgaccagcctggactattccaggttccaggcgaaccctgactatcaaatgagtggagatgacacccagcatatccagcaattctatgatctcctgactggctccatggagatcatccggggctgggcagagaagatccctggcttcgcagacctgcccaaagccgaccaagacctgctttttgaatcagctttcttagaactgtttgtccttcgattagcatacaggtccaacccagtggagggtaaactcatcttttgcaatggggtggtcttgcacaggttgcaatgcgttcgtggctttggggaatggattgattccattgttgaattctcctccaacttgcagaatatgaacatcgacatttctgccttctcctgcattgctgccctggctatggtcacagagagacacgggctcaaggaacccaagagagtggaagaactgcaaaacaagattgtaaattgtctcaaagaccacgtgactttcaacaatggggggttgaaccgccccaattatttgtccaaactgttggggaagctcccagaacttcgtaccctttgcacacaggggctacagcgcattttctacctgaaattggaagacttggtgccaccgccagcaataattgacaaacttttcctggacactttacctttctaagacctcctcccaagcacttcaaaggaactggaatgataatggaaactgtcaagagggggcaagtcacatgggcagagatagccgtgtgagcagtctcagctcaagctgccccccatttctgtaaccctcctagcccccttgatccctaaagaaaacaaacaaacaaacaaaaactgttgctatttcctaacctgcaggcagaacctgaaagggcattttggctccggggcatcctggatttagaacatggactacacacaatacagtggtataaactttttattctcagtttaaaaatcagtttgttgttcagaagaaagattgctataaggtataatgggaaatgtttggccatgcttggttgttgcagttcagacaaatgtaacacacacacacatacacacacacacacacacacagagacacatcttaaggggacccacaagtattgccctttaacaagacttcaaagttttctgctgtaaagaaagctgtaatatatagtaaaactaaatgttgcgtgggtggcatgagttgaagaaggcaaaggcttgtaaatttacccaatgcagtttggctttttaaattattttgtgcctatttatgaataaatattacaaattctaaaagataagtgtgtttgcaaaaaaaaagaaaataaatacataaaaaagggacaagcatgttgattctaggttgaaaatgttataggcacttgctacttcagtaatgtctatattatataaatagtatttcagacactatgtagtctgttagattttataaagattggtagttatctgagcttaaacattttctcaattgtaaaataggtgggcacaagtattacacatcagaaaatcctgacaaaagggacacatagtgtttgtaacaccgtccaacattccttgtttgtaagtgttgtatgtaccgttgatgttgataaaaagaaagtttatatcttgattattttgttgtctaaagctaaacaaaacttgcatgcagcagcttttgactgtttccagagtgcttataatatacataactccctggaaataactgagcactttgaattttttttatgtcatattctgtagtatttttctttgtatatttctagtatggcacatgatatgagtcactgcctttttttctatggtgtatgacagttagagatgctgattttttttctgataaattctttctttgagaaagacaattttaatgtttacaacaataaacctgtgtacgcgacaaacttatttgtgctttgtcattatctaacaatattcgtgaaacaccgtctgatat

SEQ ID NO: 308089 - DNA, 3946 bp, Homo sapiens
  misc_feature (1)..(3): n is a, c, g, or t
  misc_feature (6)..(6): n is a, c, g, or t
  misc_feature (8)..(8): n is a, c, g, or t
nnnacnangggcacattggcggccagggccagtccgcccggcggctcgcgcacggctccgcggtcccttttgcctgtccagccggccgcctgtccctgctccctccctccgtgaggtgtccgggttcccttcgcccagctctcccacccctacccgaccccggcgcccgggctcccagagggaactgcacttcggcagagttgaatgaatgaagagagacgcggagaactcctaaggaggagattggacaggctggactccccattgcttttctaaaaatcttggaaactttgtccttcattgaattacgacactgtccacctttaatttcctcgaaaacgcctgtaactcggctgaaggttagtgcaacttcatttctttcctttactctccagagctccccaaacatcaagaaacaggacaaggcaaaccctgtaacttaaggtttgcccgacccatcgccttcgggaacaactttctcattgtgaaattcaacttcatttctagatggtcatttctagaaagagactgctgaatctgagcttcagagaagaggctcatctgagtgggatgagtgggggggtatgagggagatgtttggaaatacccaggagtgtagaccctcagtagctttttagctctgggtctttatttggttagtctttccacgccctaaactgttgttctgcagcattctctctctcctgcctttcctctcgcgcccctacatgctctctgactgccgcgggctgccggtgtagctccaggtgtacccgagcccgggagaaagtgttcagttgaccaggctgagtgtgttatcaccctgtttcatttccagccatgccttgtgttcaggcgcagtatgggtcctcgcctcaaggagccagccccgcttctcagagctacagttaccactcttcgggagaatacagctccgatttcttaactccagagtttgtcaagtttagcatggacctcaccaacactgaaatcactgccaccacttctctccccagcttcagtacctttatggacaactacagcacaggctacgacgtcaagccaccttgcttgtaccaaatgcccctgtccggacagcagtcctccattaaggtagaagacattcagatgcacaactaccagcaacacagccacctgcccccccagtctgaggagatgatgccgcactccgggtcggtttactacaagccctcctcgcccccgacgcccaccaccccgggcttccaggtgcagcacagccccatgtgggacgacccgggatctctccacaacttccaccagaactacgtggccactacgcacatgatcgagcagaggaaaacgccagtctcccgcctctccctcttctcctttaagcaatcgccccctggcaccccggtgtctagttgccagatgcgcttcgacgggcccctgcacgtccccatgaacccggagcccgccggcagccaccacgtggtggacgggcagaccttcgctgtgcccaaccccattcgcaagcccgcgtccatgggcttcccgggcctgcagatcggccacgcgtctcagctgctcgacacgcaggtgccctcaccgccgtcgcggggctccccctccaacgaggggctgtgcgctgtgtgtggggacaacgcggcctgccaacactacggcgtgcgcacctgtgagggctgcaaaggcttctttaagcgcacagtgcaaaaaaatgcaaaatacgtgtgtttagcaaataaaaactgcccagtggacaagcgtcgccggaatcgctgtcagtactgccgatttcagaagtgcctggctgttgggatggtcaaagaagtggttcgcacagacagtttaaaaggccggagaggtcgtttgccctcgaaaccgaagagcccacaggagccctctcccccttcgcccccggtgagtctgatcagtgccctcgtcagggcccatgtcgactccaacccggctatgaccagcctggactattccaggttccaggcgaaccctgactatcaaatgagtggagatgacacccagcatatccagcaattctatgatctcctgactggctccatggagatcatccggggctgggcagagaagatccctggcttcgcagacctgcccaaagccgaccaagacctgctttttgaatcagctttcttagaactgtttgtccttcgattagcatacaggtccaacccagtggagggtaaactcatcttttgcaatggggtggtcttgcacaggttgcaatgcgttcgtggctttggggaatggattgattccattgttgaattctcctccaacttgcagaatatgaacatcgacatttctgccttctcctgcattgctgccctggctatggtcacagagagacacgggctcaaggaacccaagagagtggaagaactgcaaaacaagattgtaaattgtctcaaagaccacgtgactttcaacaatggggggttgaaccgccccaattatttgtccaaactgttggggaagctcccagaacttcgtaccctttgcacacaggggctacagcgcattttctacctgaaattggaagacttggtgccaccgccagcaataattgacaaacttttcctggacactttacctttctaagacctcctcccaagcacttcaaaggaactggaatgataatggaaactgtcaagagggggcaagtcacatgggcagagatagccgtgtgagcagtctcagctcaagctgccccccatttctgtaaccctcctagcccccttgatccctaaagaaaacaaacaaacaaacaaaaactgttgctatttcctaacctgcaggcagaacctgaaagggcattttggctccggggcatcctggatttagaacatggactacacacaatacagtggtataaactttttattctcagtttaaaaatcagtttgttgttcagaagaaagattgctataaggtataatgggaaatgtttggccatgcttggttgttgcagttcagacaaatgtaacacacacacacatacacacacacacacacacacagagacacatcttaaggggacccacaagtattgccctttaacaagacttcaaagttttctgctgtaaagaaagctgtaatatatagtaaaactaaatgttgcgtgggtggcatgagttgaagaaggcaaaggcttgtaaatttacccaatgcagtttggctttttaaattattttgtgcctatttatgaataaatattacaaattctaaaagataagtgtgtttgcaaaaaaaaagaaaataaatacataaaaaagggacaagcatgttgattctaggttgaaaatgttataggcacttgctacttcagtaatgtctatattatataaatagtatttcagacactatgtagtctgttagattttataaagattggtagttatctgagcttaaacattttctcaattgtaaaataggtgggcacaagtattacacatcagaaaatcctgacaaaagggacacatagtgtttgtaacaccgtccaacattccttgtttgtaagtgttgtatgtaccgttgatgtttgcatgcagcagcttttgactgtttccagagtgcttataatatacataactccctggaaataactgagcactttgaattttttttatgtctaaaattgtcagttaatttattattttgtttgagtaagaattttaatattgccatattctgtagtatttttctttgtatatttctagtatggcacatgatatgagtcactgcctttttttctatggtgtatgacagttagagatgctgattttttttctgataaattctttctttgagaaagacaattttaatgtttacaacaataaacctgtgtacgcgacaaacttatttgtgctttgtcattatctaacaatattcgtgaaacaccgtctgatat

SEQ ID NO: 308090 - DNA, 2551 bp, Homo sapiens
  misc_feature (1)..(3): n is a, c, g, or t
  misc_feature (6)..(6): n is a, c, g, or t
  misc_feature (8)..(8): n is a, c, g, or t
nnnacnangggcacattggcggccagggccagtccgcccggcggctcgcgcacggctccgcggtcccttttgcctgtccagccggccgcctgtccctgctccctccctccgtgaggtgtccgggttcccttcgcccagctctcccacccctacccgaccccggcgcccgggctcccagagggaactgcacttcggcagagttgaatgaatgaagagagacgcggagaactcctaaggaggagattggacaggctggactccccattgcttttctaaaaatcttggaaactttgtccttcattgaattacgacactgtccacctttaatttcctcgaaaacgcctgtaactcggctgaaggttagtgcaacttcatttctttcctttactctccagagctccccaaacatcaagaaacaggacaaggcaaaccctgtaacttaaggtttgcccgacccatcgccttcgggaacaactttctcattgtgaaattcaacttcatttctagatggtcatttctagaaagagactgctgaatctgagcttcagagaagaggctcatctgagtgggatgagtgggggggtatgagggagatgtttggaaatacccaggagtgtagaccctcagtagctttttagctctgggtctttatttggttagtctttccacgccctaaactgttgttctgcagcattctctctctcctgcctttcctctcgcgcccctacatgctctctgactgccgcgggctgccggtgtagctccaggtgtacccgagcccgggagaaagtgttcagttgaccaggctgagtgtgttatcaccctgtttcatttccagccatgccttgtgttcaggcgcagtatgggtcctcgcctcaaggagccagccccgcttctcagagctacagttaccactcttcgggagaatacagctccgatttcttaactccagagtttgtcaagtttagcatggacctcaccaacactgaaatcactgccaccacttctctccccagcttcagtacctttatggacaactacagcacaggctacgacgtcaagccaccttgcttgtaccaaatgcccctgtccggacagcagtcctccattaaggtagaagacattcagatgcacaactaccagcaacacagccacctgcccccccagtctgaggagatgatgccgcactccgggtcggtttactacaagccctcctcgcccccgacgcccaccaccccgggcttccaggtgcagcacagccccatgtgggacgacccgggatctctccacaacttccaccagaactacgtggccactacgcacatgatcgagcagaggaaaacgccagtctcccgcctctccctcttctcctttaagcaatcgccccctggcaccccggtgtctagttgccagatgcgcttcgacgggcccctgcacgtccccatgaacccggagcccgccggcagccaccacgtggtggacgggcagaccttcgctgtgcccaaccccattcgcaagcccgcgtccatgggcttcccgggcctgcagatcggccacgcgtctcagctgctcgacacgcaggtgccctcaccgccgtcgcggggctccccctccaacgaggggctgtgcgctgtgtgtggggacaacgcggcctgccaacactacggcgtgcgcacctgtgagggctgcaaaggcttctttaagcgcacagtgcaaaaaaatgcaaaatacgtgtgtttagcaaataaaaactgcccagtggacaagcgtcgccggaatcgctgtcagtactgccgatttcagaagtgcctggctgttgggatggtcaaagaagtggttcgcacagacagtttaaaaggccggagaggtcgtttgccctcgaaaccgaagagcccacaggagccctctcccccttcgcccccggtgagtctgatcagtgccctcgtcagggcccatgtcgactccaacccggctatgaccagcctggactattccaggttccaggcgaaccctgactatcaaatgagtggagatgacacccagcatatccagcaattctatgatctcctgactggctccatggagatcatccggggctgggcagagaagatccctggcttcgcagacctgcccaaagccgaccaagacctgctttttgaatcagctttcttagaactgtttgtccttcgattagcatacaggtaataagggagggaggagacaatccagggaggctgtgagagaaatcaagaaaggaaaagaaagggaggaagggaaaccagagggtggggtagagaaaaagacagaataggaaatggaagtcggagaaaggaagaaaaagaaagaaaacaaaaaaagacgagaagaagcgagcccagaagccttggatgaatggaatggaggtgggatagggggcgttcttgattgttatgaaattaaaccctttcaaggtccactggtctacattttattaactcttcagtaattaggtgactcttaaatccctcatttattgctcttcaagtaattagttgtttagcttttctctctc

SEQ ID NO: 308091 - DNA, 520 bp, Homo sapiens
agagaaaaagacagaataggaaatggaagtcggagaaaggaagaaaaagaaagaaaacaaaaaaagacgagaagaagcgagcccagaagccttggatgaatggaatggaggtgggatagggggcgttcttgattgttatgaaattaaaccctttcaaggtccactggtctacattttattaactcttcagtaattaggtgactcttaaatccctcatttattgctcttcaagtaattagttgtttagcttttctctctctctttttctcccctctctctctttggtattaattgcaggtccaacccagtggagggtaaactcatcttttgcaatggggtggtcttgcacaggttgcaatgcgttcgtggctttggggaatggattgattccattgttgaattctcctccaacttgcagaatatgaacatcgacatttctgccttctcctgcattgctgccctggctatggtcacaggtcagtactgcaggcgcagggcgcttcccctccagaactgccta

SEQ ID NO: 308092 - DNA, 598 bp, Homo sapiens
ctactactactaaattcgcggcctgctcgacagcactacaagaaatatttgatggtatacaaccaaaaatgtttggaatggttttggaaaaaattattattcctgaaattcagaaggtatctggaaatgtagagaaaaagatctgtgcggttggcataaccaaattactaacagaatgtcccccaatgatggacactgagtataccaaactgtggactccattattacagtctttgattggtctttttgagttacccgaagatgataccattcctgatgaggaacattttattgacatagaagatacaccaggatatcagactgccttctcacagttggcatttgctgggaaaaaagagcatgatcctgtaggtcaaatggtgaataaccccaaaattcacctggcacagtcacttcacaagttgtctaccgcctgtccaggaagggttccatcaatggtgagcaccagcctgaatgcagaagcgctccagtatctccaagggtaccttcaggcagccagtgtgacactgctttaaactgcatttttttgtcacgaattccatcttgtaaaggatattaaatgttgctttaacctgaa

SEQ ID NO: 308093 - DNA, 805 bp, Homo sapiens
cggacggtggacgaaaacacccgacctaccgcacgcggagatatatacttcagtgccaaaagaacatcttttagtctcgattcctctcttgattaatcatcttcaagctgaaagtattgttgttcatacttacgcagctcatgctcttgaacggctctttactatgcgagggcctaacaatgccactctctttacagctgcagaaatcgcaccgtttgttgagattctgctaacaaaccttttcaaagctctcacacttcctggctcttcagaaaatgaatatattatgaaagaacccaagcaaacctcactttaatcactacatgtttgaagcaatatgtttatccataagaataacttgcaaagctaaccctgctgctgttgtaaattttgaggaggctttgtttttggtgtttactgaaattctacctattgatgcgcatgaatttataccatactattttaaagtgagattctccctttctatattcacccgtcagcgaaatatcatcattcctatatgggcatcatttcccacgttgtttatgcatttttttggaaagaaactgatgtattactgataaaagtatgatattaaagcttcttacgtaccctggctaaatagattaccaggcggtgcacccaccataactctccgttctgtgttactttccgagctgcgcgaaaatatggcgaatgtccattcgggctttagtacaaacatcacagcacattctcctctttgaattatctctacctactattataatattcgttccgattgaccaaaatattaatattttga

SEQ ID NO: 308094 - DNA, 467 bp, Homo sapiens
gcattcctggccccgccccctgcagcgggccgctcgctcatgcgctctggcctcaggctcgctgtcgcgccattttgccggggtttgaatgtgaggcggagcggcggcaggagcgggtagtgccagctacggtccgcggctggggttccctcctccgtttctgtatccccacgagatcctatagcaatggaactcagcgatgcaaatctgcaaacactaacagaatatttaaagaaaacacttgatcctgatcctgccatccgacgtccagctgagaaatttcttgaatctgttgaaggaaatcagaattatccactgttgcttttgacattactggagaagtcccaggataatgttatcaaagtatgtgcttcagtaacattcaaaaactatattaaaaggaactggagaatttgaagatgaaccaaaccttagcagcccagagcttcagaagcagttaagtgtgc

SEQ ID NO: 308095 - DNA, 3683 bp, Homo sapiens
gcattcctggccccgccccctgcagcgggccgctcgctcatgcgctctggcctcaggctcgctgtcgcgccattttgccggggtttgaatgtgaggcggagcggcggcaggagcgggtagtgccagctacggtccgcggctggggttccctcctccgtttctgtatccccacgagatcctatagcaatggaactcagcgatgcaaatctgcaaacactaacagaatatttaaagaaaacacttgatcctgatcctgccatccgacgtccagctgagaaatttcttgaatctgttgaaggaaatcagaattatccactgttgcttttgacattactggagaagtcccaggataatgttatcaaagtatgtgcttcagtaacattcaaaaactatattaaaaggaactggagaattgttgaagatgaaccaaacaaaatttgtgaagccgatcgagtggccattaaagccaacatagtgcacttgatgcttagcagcccagagcaaattcagaagcagttaagtgatgcaattagcattattggcagagaagattttccacagaaatggcctgacttgctgacagaaatggtgaatcgctttcagagtggagatttccatgttattaatggagtcctccgtacagcacattcattatttaaaagataccgtcatgaatttaagtcaaacgagttatggactgaaattaagcttgttctggatgcctttgctttgcctttgactaatctttttaaggccactattgaactctgcagtacccatgcaaatgatgcctctgccctgaggattctgttttcttccctgatcctgatctcaaaattgttctatagtttaaactttcaggatctccctgaattttttgaagataatatggaaacttggatgaataattttcatactctcttaacattggataataagcttttacaaactgatgatgaagaggaagccggcttattggagctcttaaaatcccagatttgtgataatgccgcactctatgcacaaaagtacgatgaagaattccagcgatacctgcctcgttttgttacagccatctggaatttactagttacaacgggtcaagaggttaaatatgatttgttggtaagtaatgcaattcaatttctggcttcagtttgtgagagacctcattataagaatctatttgaggaccagaacacgctgacaagtatctgtgaaaaggttattgtgcctaacatggaatttagagctgctgatgaagaagcatttgaagataattctgaggagtacataaggagagatttggaaggatctgatattgatactagacgcagggctgcttgtgatctggtacgaggattatgcaagttttttgagggacctgtgacaggaatcttctctggttatgttaattccatgctgcaggaatacgcaaaaaatccatctgtcaactggaaacacaaagatgcagccatctacctagtgacatctttggcatcaaaagcccaaacacagaagcatggaattacacaagcaaatgaacttgtaaacctaactgagttctttgtgaatcacatcctccctgatttaaaatcagctaatgtgaatgaatttcctgtccttaaagctgacggtatcaaatatattatgatttttagaaatcaagtgccaaaagaacatcttttagtctcgattcctctcttgattaatcatcttcaagctgaaagtattgttgttcatacttacgcagctcatgctcttgaacggctctttactatgcgagggcctaacaatgccactctctttacagctgcagaaatcgcaccgtttgttgagattctgctaacaaaccttttcaaagctctcacacttcctggctcttcagaaaatgaatatattatgaaagctatcatgagaagtttttctctcctacaagaagccataatcccctacatccctactctcatcactcagcttacacagaagctattagctgttagtaagaacccaagcaaacctcactttaatcactacatgtttgaagcaatatgtttatccataagaataacttgcaaagctaaccctgctgctgttgtaaattttgaggaggctttgtttttggtgtttactgaaatcttacaaaatgatgtgcaagaatttattccatacgtctttcaagtgatgtctttgcttctggaaacacacaaaaatgacatcccgtcttcctatatggccttatttcctcatctccttcagccagtgctttgggaaagaacaggaaatattcctgctctagtgaggcttcttcaagcattcttagaacgcggttcaaacacaatagcaagtgctgcagctgacaaaattcctgggttactaggtgtctttcagaagctgattgcatccaaagcaaatgaccaccaaggtttttatcttctaaacagtataatagagcacatgcctcctgaatcagttgaccaatataggaaacaaatcttcattctgctattccagagacttcagaattccaaaacaaccaagtttatcaagagttttttagtctttattaatttgtattgcataaaatatggggcactagcactacaagaaatatttgatggtatacaaccaaaaatgtttggaatggttttggaaaaaattattattcctgaaattcagaaggtatctggaaatgtagagaaaaagatctgtgcggttggcataaccaaattactaacagaatgtcccccaatgatggacactgagtataccaaactgtggactccattattacagtctttgattggtctttttgagttacccgaagatgataccattcctgatgaggaacattttattgacatagaagatacaccaggatatcagactgccttctcacagttggcatttgctgggaaaaaagagcatgatcctgtaggtcaaatggtgaataaccccaaaattcacctggcacagtcacttcacaagttgtctaccgcctgtccaggaagggttccatcaatggtgagcaccagcctgaatgcagaagcgctccagtatctccaagggtaccttcaggcagccagtgtgacactgctttaaactgcatttttctaatgggctaaacccagatggtttcctaggaaatcacaggcttctgagcacagctgcattaaaacaaaggaagttctccttttgaacttgtcacgaattccatcttgtaaaggatattaaatgttgctttaacctgaaccttgagcaaattagttggtttgtgtgatcatacagttatgtgggtggcttctagtttgcaacttcaagggacaagtattaatagttcagtgtatggcgttggtttgtgttgagcgtttgcacggtttggataatcttaaattttgacggacactgtggagactttctgttactaaatccttttgttttgaagctgttgctatttgtatttctcttgtcctttatattttttgtctgtttatttacgcttttattggaaatgtgaataagtaaagaattacttgtgttacttgccaagcagtgcacatttcatagtttcaaatctgtaatcagcaataaaaatcctaaaatatgtacctaagaacatcttaagggcaggttttcagtgctctctcatgcttttataaaaatgaagaatttctttaaatttc

SEQ ID NO: 308096 - DNA, 4131 bp, Homo sapiens
gcattcctggccccgccccctgcagcgggccgctcgctcatgcgctctggcctcaggctcgctgtcgcgccattttgccggggtttgaatgtgaggcggagcggcggcaggagcgggtagtgccagctacggtccgcggctggggttccctcctccgtttctgtatccccacgagatcctatagcaatggaactcagcgatgcaaatctgcaaacactaacagaatatttaaagaaaacacttgatcctgatcctgccatccgacgtccagctgagaaatttcttgaatctgttgaaggaaatcagaattatccactgttgcttttgacattactggagaagtcccaggataatgttatcaaagtatgtgcttcagtaacattcaaaaactatattaaaaggaactggagaattgttgaagatgaaccaaacaaaatttgtgaagccgatcgagtggccattaaagccaacatagtgcacttgatgcttagcagcccagagcaaattcagaagcagttaagtgatgcaattagcattattggcagagaagattttccacagaaatggcctgacttgctgacagaaatggtgaatcgctttcagagtggagatttccatgttattaatggagtcctccgtacagcacattcattatttaaaagataccgtcatgaatttaagtcaaacgagttatggactgaaattaagcttgttctggatgcctttgctttgcctttgactaatctttttaaggccactattgaactctgcagtacccatgcaaatgatgcctctgccctgaggattctgttttcttccctgatcctgatctcaaaattgttctatagtttaaactttcaggatctccctgaattttttgaagataatatggaaacttggatgaataattttcatactctcttaacattggataataagcttttacaaactgatgatgaagaggaagccggcttattggagctcttaaaatcccagatttgtgataatgccgcactctatgcacaaaagtacgatgaagaattccagcgatacctgcctcgttttgttacagccatctggaatttactagttacaacgggtcaagaggttaaatatgatttgttggtaagtaatgcaattcaatttctggcttcagtttgtgagagacctcattataagaatctatttgaggaccagaacacgctgacaagtatctgtgaaaaggttattgtgcctaacatggaatttagagctgctgatgaagaagcatttgaagataattctgaggagtacataaggagagatttggaaggatctgatattgatactagacgcagggctgcttgtgatctggtacgaggattatgcaagttttttgagggacctgtgacaggaatcttctctggttatgttaattccatgctgcaggaatacgcaaaaaatccatctgtcaactggaaacacaaagatgcagccatctacctagtgacatctttggcatcaaaagcccaaacacagaagcatggaattacacaagcaaatgaacttgtaaacctaactgagttctttgtgaatcacatcctccctgatttaaaatcagctaatgtgaatgaatttcctgtccttaaagctgacggtatcaaatatattatgatttttagaaatcaagtgccaaaagaacatcttttagtctcgattcctctcttgattaatcatcttcaagctgaaagtattgttgttcatacttacgcagctcatgctcttgaacggctctttactatgcgagggcctaacaatgccactctctttacagctgcagaaatcgcaccgtttgttgagattctgctaacaaaccttttcaaagctctcacacttcctggctcttcagaaaatgaatatattatgaaagctatcatgagaagtttttctctcctacaagaagccataatcccctacatccctactctcatcactcagcttacacagaagctattagctgttagtaagaacccaagcaaacctcactttaatcactacatgtttgaagcaatatgtttatccataagaataacttgcaaagctaaccctgctgctgttgtaaattttgaggaggctttgtttttggtgtttactgaaatcttacaaaatgatgtgcaagaatttattccatacgtctttcaagtgatgtctttgcttctggaaacacacaaaaatgacatcccgtcttcctatatggccttatttcctcatctccttcagccagtgctttgggaaagaacaggaaatattcctgctctagtgaggcttcttcaagcattcttagaacgcggttcaaacacaatagcaagtgctgcagctgacaaaattcctgggttactaggtgtctttcagaagctgattgcatccaaagcaaatgaccaccaaggtttttatcttctaaacagtataatagagcacatgcctcctgaatcagttgaccaatataggaaacaaatcttcattctgctattccagagacttcagaattccaaaacaaccaagtttatcaagagttttttagtctttattaatttgtattgcataaaatatggggcactagcactacaagaaatatttgatggtatacaaccaaaaatgtttggaatggttttggaaaaaattattattcctgaaattcagaaggtatctggaaatgtagagaaaaagatctgtgcggttggcataaccaaattactaacagaatgtcccccaatgatggacactgagtataccaaactgtggactccattattacagtctttgattggtctttttgagttacccgaagatgataccattcctgatgaggaacattttattgacatagaagatacaccaggatatcagactgccttctcacagttggcatttgctgggaaaaaagagcatgatcctgtaggtcaaatggtgaataaccccaaaattcacctggcacagtcacttcacaagttgtctaccgcctgtccaggaagggttccatcaatggtgagcaccagcctgaatgcagaagcgctccagtatctccaagggtaccttcaggcagccagtgtgacactgctttaaactgcatttttctaatgggctaaacccagatggtttcctaggaaatcacaggcttctgagcacagctgcattaaaacaaaggaagttctccttttgaacttgtcacgaattccatcttgtaaaggatattaaatgttgctttaacctgaaccttgagcaaattagttggtttgtgtgatcatacagttatgtgggtggcttctagtttgcaacttcaagggacaagtattaatagttcagtgtatggcgttggtttgtgttgagcgtttgcacggtttggataatcttaaattttgacggacactgtggagactttctgttactaaatccttttgttttgaagctgttgctatttgtatttctcttgtcctttatattttttgtctgtttatttacgcttttattggaaatgtgaataagtaaagaattacttgtgttacttgccaagcagtgcacatttcatagtttcaaatctgtaatcagcaataaaaatcctaaaatatgtacctaaaaaaaaaaaaaaaaaaaaaaaaaaaaaaaaaaaaaaacacaaacaaaaaaaacaaaaaaaacacaacaacaaaaaacaacaaaagagagggggggggggcgcgccaaaaaaacaccccgggggggcggcccttccccacccccttttttttaaaaagggggcccccccaaagaggggagcaaaaaagggaggggggggcggagaaaaaaccaggggtggcgagggaacaacgctacgtcggggtcacttgtagaagaagacaccccccattgtgcgtcgggcacaagtggcgacgccacccccagcaaattaagaggagcggaggaataacaaactgggttcgagctgcgacccccgccgtttagctgccgggaaactgtctctccgttttttgtaagtagccgggtcttctatactaacaacgcgacgacgcccagacggcgcgtgactgacgccagccgcgacaaaacttacccgaaaaccacacgactgaacacgacacgaagacactacaatga

SEQ ID NO: 308097 - DNA, 3252 bp, Homo sapiens
gcattcctggccccgccccctgcagcgggccgctcgctcatgcgctctggcctcaggctcgctgtcgcgccattttgccggggtttgaatgtgaggcggagcggcggcaggagcgggtagtgccagctacggtccgcggctggggttccctcctccgtttctgtatccccacgagatcctatagcaatggaactcagcgatgcaaatctgcaaacactaacagaatatttaaagaaaacacttgatcctgatcctgccatccgacgtccagctgagaaatttcttgaatctgttgaaggaaatcagaattatccactgttgcttttgacattactggagaagtcccaggataatgttatcaaagtatgtgcttcagtaacattcaaaaactatattaaaaggaactggagaattgttgaagatgaaccaaacaaaatttgtgaagccgatcgagtggccattaaagccaacatagtgcacttgatgcttagcagcccagagcaaattcagaagcagttaagtgatgcaattagcattattggcagagaagattttccacagaaatggcctgacttgctgacagaaatggtgaatcgctttcagagtggagatttccatgttattaatggagtcctccgtacagcacattcattatttaaaagataccgtcatgaatttaagtcaaacgagttatggactgaaattaagcttgttctggatgcctttgctttgcctttgactaatctttttaaggccactattgaactctgcagtacccatgcaaatgatgcctctgccctgaggattctgttttcttccctgatcctgatctcaaaattgttctatagtttaaactttcaggatctccctgaattttttgaagataatatggaaacttggatgaataattttcatactctcttaacattggataataagcttttacaaactgatgatgaagaggaagccggcttattggagctcttaaaatcccagatttgtgataatgccgcactctatgcacaaaagtacgatgaagaattccagcgatacctgcctcgttttgttacagccatctggaatttactagttacaacgggtcaagaggttaaatatgatttgttggtaagtaatgcaattcaatttctggcttcagtttgtgagagacctcattataagaatctatttgaggaccagaacacgctgacaagtatctgtgaaaaggttattgtgcctaacatggaatttagagctgctgatgaagaagcatttgaagataattctgaggagtacataaggagagatttggaaggatctgatattgatactagacgcagggctgcttgtgatctggtacgaggattatgcaagttttttgagggacctgtgacaggaatcttctctggttatgttaattccatgctgcaggaatacgcaaaaaatccatctgtcaactggaaacacaaagatgcagccatctacctagtgacatctttggcatcaaaagcccaaacacagaagcatggaattacacaagcaaatgaacttgtaaacctaactgagttctttgtgaatcacatcctccctgatttaaaatcagctaatgtgaatgaatttcctgtccttaaagctgacggtatcaaatatattatgatttttagaaatcaagtgccaaaagaacatcttttagtctcgattcctctcttgattaatcatcttcaagctgaaagtattgttgttcatacttacgcagctcatgctcttgaacggctctttactatgcgagggcctaacaatgccactctctttacagctgcagaaatcgcaccgtttgttgagattctgctaacaaaccttttcaaagctctcacacttcctggctcttcagaaaatgaatatattatgaaagctatcatgagaagtttttctctcctacaagaagccataatcccctacatccctactctcatcactcagcttacacagaagctattagctgttagtaagaacccaagcaaacctcactttaatcactacatgtttgaagcaatatgtttatccataagaataacttgcaaagctaaccctgctgctgttgtaaattttgaggaggctttgtttttggtgtttactgaaatcttacaaaatgatgtgcaagaatttattccatacgtctttcaagtgatgtctttgcttctggaaacacacaaaaatgacatcccgtcttcctatatggccttatttcctcatctccttcagccagtgctttgggaaagaacaggaaatattcctgctctagtgaggcttcttcaagcattcttagaacgcggttcaaacacaatagcaagtgctgcagctgacaaaattcctgggttactaggtgtctttcagaagctgattgcatccaaagcaaatgaccaccaaggtttttatcttctaaacagtataatagagcacatgcctcctgaatcagttgaccaatataggaaacaaatcttcattctgctattccagagacttcagaattccaaaacaaccaagtttatcaagagttttttagtctttattaatttgtattgcataaaatatggggcactagcactacaagaaatatttgatggtatacaaccaaaaatgtttggaatggttttggaaaaaattattattcctgaaattcagaaggtatctggaaatgtagagaaaaagatctgtgcggttggcataaccaaattactaacagaatgtcccccaatgatggacactgagtataccaaactgtggactccattattacagtctttgattggtctttttgagttacccgaagatgataccattcctgatgaggaacattttattgacatagaagatacaccaggatatcagactgccttctcacagttggcatttgctgggaaaaaagagcatgatcctgtaggtcaaatggtgaataaccccaaaattcacctggcacagtcacttcacaagttgtctaccgcctgtccaggaagggttccatcaatggtgagcaccagcctgaatgcagaagcgctccagtatctccaagggtaccttcaggcagccagtgtgacactgctttaaactgcatttttctaatgggctaaacccagatggtttcctaggaaatcacaggcttctgagcacagctgcattaaaacaaaggaagttctccttttgaacttgtcacgaattccatcttgtaaaggatattaaatgttgctttaacctgaa

SEQ ID NO: 308098 - DNA, 3936 bp, Homo sapiens
gcattcctggccccgccccctgcagcgggccgctcgctcatgcgctctggcctcaggctcgctgtcgcgccattttgccggggtttgaatgtgaggcggagcggcggcaggagcgggtagtgccagctacggtccgcggctggggttccctcctccgtttctgtatccccacgagatcctatagcaatggaactcagcgatgcaaatctgcaaacactaacagaatatttaaagaaaacacttgatcctgatcctgccatccgacgtccagctgagaaatttcttgaatctgttgaaggaaatcagaattatccactgttgcttttgacattactggagaagtcccaggataatgttatcaaagtatgtgcttcagtaacattcaaaaactatattaaaaggaactggagaattgttgaagatgaaccaaacaaaatttgtgaagccgatcgagtggccattaaagccaacatagtgcacttgatgcttagcagcccagagcaaattcagaagcagttaagtgatgcaattagcattattggcagagaagattttccacagaaatggcctgacttgctgacagaaatggtgaatcgctttcagagtggagatttccatgttattaatggagtcctccgtacagcacattcattatttaaaagataccgtcatgaatttaagtcaaacgagttatggactgaaattaagcttgttctggatgcctttgctttgcctttgactaatctttttaaggccactattgaactctgcagtacccatgcaaatgatgcctctgccctgaggattctgttttcttccctgatcctgatctcaaaattgttctatagtttaaactttcaggatctccctgaattttttgaagataatatggaaacttggatgaataattttcatactctcttaacattggataataagcttttacaaactgatgatgaagaggaagccggcttattggagctcttaaaatcccagatttgtgataatgccgcactctatgcacaaaagtacgatgaagaattccagcgatacctgcctcgttttgttacagccatctggaatttactagttacaacgggtcaagaggttaaatatgatttgttggtaagtaatgcaattcaatttctggcttcagtttgtgagagacctcattataagaatctatttgaggaccagaacacgctgacaagtatctgtgaaaaggttattgtgcctaacatggaatttagagctgctgatgaagaagcatttgaagataattctgaggagtacataaggagagatttggaaggatctgatattgatactagacgcagggctgcttgtgatctggtacgaggattatgcaagttttttgagggacctgtgacaggaatcttctctggttatgttaattccatgctgcaggaatacgcaaaaaatccatctgtcaactggaaacacaaagatgcagccatctacctagtgacatctttggcatcaaaagcccaaacacagaagcatggaattacacaagcaaatgaacttgtaaacctaactgagttctttgtgaatcacatcctccctgatttaaaatcagctaatgtgaatgaatttcctgtccttaaagctgacggtatcaaatatattatgatttttagaaatcaagtgccaaaagaacatcttttagtctcgattcctctcttgattaatcatcttcaagctgaaagtattgttgttcatacttacgcagctcatgctcttgaacggctctttactatgcgagggcctaacaatgccactctctttacagctgcagaaatcgcaccgtttgttgagattctgctaacaaaccttttcaaagctctcacacttcctggctcttcagaaaatgaatatattatgaaagctatcatgagaagtttttctctcctacaagaagccataatcccctacatccctactctcatcactcagcttacacagaagctattagctgttagtaagaacccaagcaaacctcactttaatcactacatgtttgaagcaatatgtttatccataagaataacttgcaaagctaaccctgctgctgttgtaaattttgaggaggctttgtttttggtgtttactgaaatcttacaaaatgatgtgcaagaatttattccatacgtctttcaagtgatgtctttgcttctggaaacacacaaaaatgacatcccgtcttcctatatggccttatttcctcatctccttcagccagtgctttgggaaagaacaggaaatattcctgctctagtgaggcttcttcaagcattcttagaacgcggttcaaacacaatagcaagtgctgcagctgacaaaattcctgggttactaggtgtctttcagaagctgattgcatccaaagcaaatgaccaccaaggtttttatcttctaaacagtataatagagcacatgcctcctgaatcagttgaccaatataggaaacaaatcttcattctgctattccagagacttcagaattccaaaacaaccaagtttatcaagagttttttagtctttattaatttgtattgcataaaatatggggcactagcactacaagaaatatttgatggtatacaaccaaaaatgtttggaatggttttggaaaaaattattattcctgaaattcagaaggtatctggaaatgtagagaaaaagatctgtgcggttggcataaccaaattactaacagaatgtcccccaatgatggacactgagtataccaaactgtggactccattattacagtctttgattggtctttttgagttacccgaagatgataccattcctgatgaggaacattttattgacatagaagatacaccaggatatcagactgccttctcacagttggcatttgctgggaaaaaagagcatgatcctgtaggtcaaatggtgaataaccccaaaattcacctggcacagtcacttcacaagttgtctaccgcctgtccaggaagggttccatcaatggtgagcaccagcctgaatgcagaagcgctccagtatctccaagggtaccttcaggcagccagtgtgacactgctttaaactgcatttttctaatgggctaaacccagatggtttcctaggaaatcacaggcttctgagcacagctgcattaaaacaaaggaagttctccttttgaacttgtcacgaattccatcttgtaaaggatattaaatgttgctttaacctgaaccttgagcaaattagttggtttgtgtgatcatacagttatgtgggtggcttctagtttgcaacttcaagggacaagtattaatagttcagtgtatggcgttggtttgtgttgagcgtttgcacggtttggataatcttaaattttgacggacactgtggagactttctgttactaaatccttttgttttgaagctgttgctatttgtatttctcttgtcctttatattttttgtctgtttatttacgcttttattggaaatgtgaataagtaaagaattacttgtgttacttgccaagcagtgcacatttcatagtttcaaatctgtaatcagcaataaaaaaaaaaaaaaaaaaaaaaaaaatttggggggggctgaggcgaaaagttttaaaacacaagttggggggggggacccaaaagtacgtgcaaccctgggcacacgggggtccacaaaagacaacccgggccctgaaacaggcgcgtgggttccccaccaataaaaaaagccgcgggcaaccccgggtcttggaaccacccaaaggatgatgaaaggcacaggcgcctacaacgggcccaaggaccgataatgacgcgaccgagtgaagaagcgaagagggagacaagaacacacaagacaccacagagacacacagcaacacagcggacaccacaacagacaaag

SEQ ID NO: 308099 - DNA, 3749 bp, Homo sapiens
gcattcctggccccgccccctgcagcgggccgctcgctcatgcgctctggcctcaggctcgctgtcgcgccattttgccggggtttgaatgtgaggcggagcggcggcaggagcgggtagtgccagctacggtccgcggctggggttccctcctccgtttctgtatccccacgagatcctatagcaatggaactcagcgatgcaaatctgcaaacactaacagaatatttaaagaaaacacttgatcctgatcctgccatccgacgtccagctgagaaatttcttgaatctgttgaaggaaatcagaattatccactgttgcttttgacattactggagaagtcccaggataatgttatcaaagtatgtgcttcagtaacattcaaaaactatattaaaaggaactggagaattgttgaagatgaaccaaacaaaatttgtgaagccgatcgagtggccattaaagccaacatagtgcacttgatgcttagcagcccagagcaaattcagaagcagttaagtgatgcaattagcattattggcagagaagattttccacagaaatggcctgacttgctgacagaaatggtgaatcgctttcagagtggagatttccatgttattaatggagtcctccgtacagcacattcattatttaaaagataccgtcatgaatttaagtcaaacgagttatggactgaaattaagcttgttctggatgcctttgctttgcctttgactaatctttttaaggccactattgaactctgcagtacccatgcaaatgatgcctctgccctgaggattctgttttcttccctgatcctgatctcaaaattgttctatagtttaaactttcaggatctccctgaattttttgaagataatatggaaacttggatgaataattttcatactctcttaacattggataataagcttttacaaactgatgatgaagaggaagccggcttattggagctcttaaaatcccagatttgtgataatgccgcactctatgcacaaaagtacgatgaagaattccagcgatacctgcctcgttttgttacagccatctggaatttactagttacaacgggtcaagaggttaaatatgatttgttggtaagtaatgcaattcaatttctggcttcagtttgtgagagacctcattataagaatctatttgaggaccagaacacgctgacaagtatctgtgaaaaggttattgtgcctaacatggaatttagagctgctgatgaagaagcatttgaagataattctgaggagtacataaggagagatttggaaggatctgatattgatactagacgcagggctgcttgtgatctggtacgaggattatgcaagttttttgagggacctgtgacaggaatcttctctggttatgttaattccatgctgcaggaatacgcaaaaaatccatctgtcaactggaaacacaaagatgcagccatctacctagtgacatctttggcatcaaaagcccaaacacagaagcatggaattacacaagcaaatgaacttgtaaacctaactgagttctttgtgaatcacatcctccctgatttaaaatcagctaatgtgaatgaatttcctgtccttaaagctgacggtatcaaatatattatgatttttagaaatcaagtgccaaaagaacatcttttagtctcgattcctctcttgattaatcatcttcaagctgaaagtattgttgttcatacttacgcagctcatgctcttgaacggctctttactatgcgagggcctaacaatgccactctctttacagctgcagaaatcgcaccgtttgttgagattctgctaacaaaccttttcaaagctctcacacttcctggctcttcagaaaatgaatatattatgaaagctatcatgagaagtttttctctcctacaagaagccataatcccctacatccctactctcatcactcagcttacacagaagctattagctgttagtaagaacccaagcaaacctcactttaatcactacatgtttgaagcaatatgtttatccataagaataacttgcaaagctaaccctgctgctgttgtaaattttgaggaggctttgtttttggtgtttactgaaatcttacaaaatgatgtgcaagaatttattccatacgtctttcaagtgatgtctttgcttctggaaacacacaaaaatgacatcccgtcttcctatatggccttatttcctcatctccttcagccagtgctttgggaaagaacaggaaatattcctgctctagtgaggcttcttcaagcattcttagaacgcggttcaaacacaatagcaagtgctgcagctgacaaaattcctgggttactaggtgtctttcagaagctgattgcatccaaagcaaatgaccaccaaggtttttatcttctaaacagtataatagagcacatgcctcctgaatcagttgaccaatataggaaacaaatcttcattctgctattccagagacttcagaattccaaaacaaccaagtttatcaagagttttttagtctttattaatttgtattgcataaaatatggggcactagcactacaagaaatatttgatggtatacaaccaaaaatgtttggaatggttttggaaaaaattattattcctgaaattcagaaggtatctggaaatgtagagaaaaagatctgtgcggttggcataaccaaattactaacagaatgtcccccaatgatggacactgagtataccaaactgtggactccattattacagtctttgattggtctttttgagttacccgaagatgataccattcctgatgaggaacattttattgacatagaagatacaccaggatatcagactgccttctcacagttggcatttgctgggaaaaaagagcatgatcctgtaggtcaaatggtgaataaccccaaaattcacctggcacagtcacttcacaagttgtctaccgcctgtccaggaagggttccatcaatggtgagcaccagcctgaatgcagaagcgctccagtatctccaagggtaccttcaggcagccagtgtgacactgctttaaactgcatttttctaatgggctaaacccagatggtttcctaggaaatcacaggcttctgagcacagctgcattaaaacaaaggaagttctccttttgaacttgtcacgaattccatcttgtaaaggatattaaatgttgctttaacctgaaaaaaaaaaaaaaaaaacacaaacaaaaaaaacaaaaaaaacacaacaacaaaaaacaacaaaagagagggggggggggcgcgccaaaaaaacaccccgggggggcggcccttccccacccccttttttttaaaaagggggcccccccaaagaggggagcaaaaaagggaggggggggcggagaaaaaaccaggggtggcgagggaacaacgctacgtcggggtcacttgtagaagaagacaccccccattgtgcgtcgggcacaagtggcgacgccacccccagcaaattaagaggagcggaggaataacaaactgggttcgagctgcgacccccgccgtttagctgccgggaaactgtctctccgttttttgtaagtagccgggtcttctatactaacaacgcgacgacgcccagacggcgcgtgactgacgccagccgcgacaaaacttacccgaaaaccacacgactgaacacgacacgaagacactacaatga

SEQ ID NO: 308100 - DNA, 3229 bp, Homo sapiens
tttagttgatgggcgagaaagtgctgtgggatgaaagttagatttactgccgatgaatatgatagtgaaatggattttggcgtaggtttggtctagggtgtagcctgagaataggggggccattcaacgcctccgtttctgtatcccacgagatcctatagcaatggaactcagcgatgcaaatctgcaaacactaacagaatatttaaagaaaacacttgatcctgatcctgccatccgacgtccagctgagaaatttcttgaatctgttgaaggaaatcagaattatccactgttgcttttgacattactggagaagtcccaggataatgttatcaaagtatgtgcttcagtaacattcaaaaactatattaaaaggaactggagaattgttgaagatgaaccaaacaaaatttgtgaagccgatcgagtggccattaaagccaacatagtgcacttgatgcttagcagcccagagcaaattcagaagcagttaagtgatgcaattagcattattggcagagaagattttccacagaaatggcctgacttgctgacagaaatggtgaatcgctttcagagtggagatttccatgttattaatggagtcctccgtacagcacattcattatttaaaagataccgtcatgaatttaagtcaaacgagttatggactgaaattaagcttgttctggatgcctttgctttgcctttgactaatctttttaaggccactattgaactctgcagtacccatgcaaatgatgcctctgccctgaggattctgttttcttccctgatcctgatctcaaaattgttctatagtttaaactttcaggatctccctgaattttttgaagataatatggaaacttggatgaataattttcatactctcttaacattggataataagcttttacaaactgatgatgaagaggaagccggcttattggagctcttaaaatcccagatttgtgataatgccgcactctatgcacaaaagtacgatgaagaattccagcgatacctgcctcgttttgttacagccatctggaatttactagttacaacgggtcaagaggttaaatatgatttgttggtaagtaatgcaattcaatttctggcttcagtttgtgagagacctcattataagaatctatttgaggaccagaacacgctgacaagtatctgtgaaaaggttattgtgcctaacatggaatttagagctgctgatgaagaagcatttgaagataattctgaggagtacataaggagagatttggaaggatctgatattgatactagacgcagggctgcttgtgatctggtacgaggattatgcaagttttttgagggacctgtgacaggaatcttctctggttatgttaattccatgctgcaggaatacgcaaaaaatccatctgtcaactggaaacacaaagatgcagccatctacctagtgacatctttggcatcaaaagcccaaacacagaagcatggaattacacaagcaaatgaacttgtaaacctaactgagttctttgtgaatcacatcctccctgatttaaaatcagctaatgtgaatgaatttcctgtccttaaagctgacggtatcaaatatattatgatttttagaaatcaagtgccaaaagaacatcttttagtctcgattcctctcttgattaatcatcttcaagctgaaagtattgttgttcatacttacgcagctcatgctcttgaacggctctttactatgcgagggcctaacaatgccactctctttacagctgcagaaatcgcaccgtttgttgagattctgctaacaaaccttttcaaagctctcacacttcctggctcttcagaaaatgaatatattatgaaagctatcatgagaagtttttctctcctacaagaagccataatcccctacatccctactctcatcactcagcttacacagaagctattagctgttagtaagaacccaagcaaacctcactttaatcactacatgtttgaagcaatatgtttatccataagaataacttgcaaagctaaccctgctgctgttgtaaattttgaggaggctttgtttttggtgtttactgaaatcttacaaaatgatgtgcaagaatttattccatacgtctttcaagtgatgtctttgcttctggaaacacacaaaaatgacatcccgtcttcctatatggccttatttcctcatctccttcagccagtgctttgggaaagaacaggaaatattcctgctctagtgaggcttcttcaagcattcttagaacgcggttcaaacacaatagcaagtgctgcagctgacaaaattcctgggttactaggtgtctttcagaagctgattgcatccaaagcaaatgaccaccaaggtttttatcttctaaacagtataatagagcacatgcctcctgaatcagttgaccaatataggaaacaaatcttcattctgctattccagagacttcagaattccaaaacaaccaagtttatcaagagttttttagtctttattaatttgtattgcataaaatatggggcactagcactacaagaaatatttgatggtatacaaccaaaaatgtttggaatggttttggaaaaaattattattcctgaaattcagaaggtatctggaaatgtagagaaaaagatctgtgcggttggcataaccaaattactaacagaatgtcccccaatgatggacactgagtataccaaactgtggactccattattacagtctttgattggtctttttgagttacccgaagatgataccattcctgatgaggaacattttattgacatagaagatacaccaggatatcagactgccttctcacagttggcatttgctgggaaaaaagagcatgatcctgtaggtcaaatggtgaataaccccaaaattcacctggcacagtcacttcacaagttgtctaccgcctgtccaggaagggttccatcaatggtgagcaccagcctgaatgcagaagcgctccagtatctccaagggtaccttcaggcagccagtgtgacactgctttaaactgcatttttctaatgggctaaacccagatggtttcctaggaaatcacaggcttctgagcacagctgcattaaaacaaaggaagttctccttttgaacttgtcacgaattccatcttgtaaaggatattaaatgttgctttaacctgaa

SEQ ID NO: 308101 - DNA, 3156 bp, Homo sapiens
gcattcctggccccgccccctgcagcgggccgctcgctcatgcgctctggcctcaggctcgctgtcgcgccattttgccggggtttgaatgtgaggcggagcggcggcaggagcgggtagtgccagctacggtccgcggctggggttccctcctccgtttctgtatccccacgagctgagaaatttcttgaatctgttgaaggaaatcagaattatccactgttgcttttgacattactggagaagtcccaggataatgttatcaaagtatgtgcttcagtaacattcaaaaactatattaaaaggaactggagaattgttgaagatgaaccaaacaaaatttgtgaagccgatcgagtggccattaaagccaacatagtgcacttgatgcttagcagcccagagcaaattcagaagcagttaagtgatgcaattagcattattggcagagaagattttccacagaaatggcctgacttgctgacagaaatggtgaatcgctttcagagtggagatttccatgttattaatggagtcctccgtacagcacattcattatttaaaagataccgtcatgaatttaagtcaaacgagttatggactgaaattaagcttgttctggatgcctttgctttgcctttgactaatctttttaaggccactattgaactctgcagtacccatgcaaatgatgcctctgccctgaggattctgttttcttccctgatcctgatctcaaaattgttctatagtttaaactttcaggatctccctgaattttttgaagataatatggaaacttggatgaataattttcatactctcttaacattggataataagcttttacaaactgatgatgaagaggaagccggcttattggagctcttaaaatcccagatttgtgataatgccgcactctatgcacaaaagtacgatgaagaattccagcgatacctgcctcgttttgttacagccatctggaatttactagttacaacgggtcaagaggttaaatatgatttgttggtaagtaatgcaattcaatttctggcttcagtttgtgagagacctcattataagaatctatttgaggaccagaacacgctgacaagtatctgtgaaaaggttattgtgcctaacatggaatttagagctgctgatgaagaagcatttgaagataattctgaggagtacataaggagagatttggaaggatctgatattgatactagacgcagggctgcttgtgatctggtacgaggattatgcaagttttttgagggacctgtgacaggaatcttctctggttatgttaattccatgctgcaggaatacgcaaaaaatccatctgtcaactggaaacacaaagatgcagccatctacctagtgacatctttggcatcaaaagcccaaacacagaagcatggaattacacaagcaaatgaacttgtaaacctaactgagttctttgtgaatcacatcctccctgatttaaaatcagctaatgtgaatgaatttcctgtccttaaagctgacggtatcaaatatattatgatttttagaaatcaagtgccaaaagaacatcttttagtctcgattcctctcttgattaatcatcttcaagctgaaagtattgttgttcatacttacgcagctcatgctcttgaacggctctttactatgcgagggcctaacaatgccactctctttacagctgcagaaatcgcaccgtttgttgagattctgctaacaaaccttttcaaagctctcacacttcctggctcttcagaaaatgaatatattatgaaagctatcatgagaagtttttctctcctacaagaagccataatcccctacatccctactctcatcactcagcttacacagaagctattagctgttagtaagaacccaagcaaacctcactttaatcactacatgtttgaagcaatatgtttatccataagaataacttgcaaagctaaccctgctgctgttgtaaattttgaggaggctttgtttttggtgtttactgaaatcttacaaaatgatgtgcaagaatttattccatacgtctttcaagtgatgtctttgcttctggaaacacacaaaaatgacatcccgtcttcctatatggccttatttcctcatctccttcagccagtgctttgggaaagaacaggaaatattcctgctctagtgaggcttcttcaagcattcttagaacgcggttcaaacacaatagcaagtgctgcagctgacaaaattcctgggttactaggtgtctttcagaagctgattgcatccaaagcaaatgaccaccaaggtttttatcttctaaacagtataatagagcacatgcctcctgaatcagttgaccaatataggaaacaaatcttcattctgctattccagagacttcagaattccaaaacaaccaagtttatcaagagttttttagtctttattaatttgtattgcataaaatatggggcactagcactacaagaaatatttgatggtatacaaccaaaaatgtttggaatggttttggaaaaaattattattcctgaaattcagaaggtatctggaaatgtagagaaaaagatctgtgcggttggcataaccaaattactaacagaatgtcccccaatgatggacactgagtataccaaactgtggactccattattacagtctttgattggtctttttgagttacccgaagatgataccattcctgatgaggaacattttattgacatagaagatacaccaggatatcagactgccttctcacagttggcatttgctgggaaaaaagagcatgatcctgtaggtcaaatggtgaataaccccaaaattcacctggcacagtcacttcacaagttgtctaccgcctgtccaggaagggttccatcaatggtgagcaccagcctgaatgcagaagcgctccagtatctccaagggtaccttcaggcagccagtgtgacactgctttaaactgcatttttctaatgggctaaacccagatggtttcctaggaaatcacaggcttctgagcacagctgcattaaaacaaaggaagttctccttttgaacttgtcacgaattccatcttgtaaaggatattaaatgttgctttaacctgaa

SEQ ID NO: 308102 - DNA, 2794 bp, Homo sapiens
  misc_feature (256)..(257): n is a, c, g, or t
  misc_feature (283)..(283): n is a, c, g, or t
  misc_feature (287)..(287): n is a, c, g, or t
  misc_feature (289)..(289): n is a, c, g, or t
aggatgccaaatctgtcaagatcaagaaaaataaggacaacgtgaagtttaaagttcgatgcagcagatacctttacaccctggtcatcactgacaaagagaaggcagagaaactgaagcagtccctgccccccggtttggcagtgaaggaactgaaatgaaccagacacactgattggaactgtattatattaaaatactaaaaatccaaaaaaaaaaaaaaaaaaaaaaaaaaaaaagcggccgctcgaattgnngacgcggccgcgaattcgcggcggcnccgngnctgcgagaagacgacagaaggggcagtacccatgcaaatgatgcctctgccctgaggattctgttttcttccctgatcctgatctcaaaattgttctatagtttaaactttcaggatctccctgaattttttgaagataatatggaaacttggatgaataattttcatactctcttaacattggataataagcttttacaaactgatgatgaagaggaagccggcttattggagctcttaaaatcccagatttgtgataatgccgcactctatgcacaaaagtacgatgaagaattccagcgatacctgcctcgttttgttacagccatctggaatttactagttacaacgggtcaagaggttaaatatgatttgttggtaagtaatgcaattcaatttctggcttcagtttgtgagagacctcattataagaatctatttgaggaccagaacacgctgacaagtatctgtgaaaaggttattgtgcctaacatggaatttagagctgctgatgaagaagcatttgaagataattctgaggagtacataaggagagatttggaaggatctgatattgatactagacgcagggctgcttgtgatctggtacgaggattatgcaagttttttgagggacctgtgacaggaatcttctctggttatgttaattccatgctgcaggaatacgcaaaaaatccatctgtcaactggaaacacaaagatgcagccatctacctagtgacatctttggcatcaaaagcccaaacacagaagcatggaattacacaagcaaatgaacttgtaaacctaactgagttctttgtgaatcacatcctccctgatttaaaatcagctaatgtgaatgaatttcctgtccttaaagctgacggtatcaaatatattatgatttttagaaatcaagtgccaaaagaacatcttttagtctcgattcctctcttgattaatcatcttcaagctgaaagtattgttgttcatacttacgcagctcatgctcttgaacggctctttactatgcgagggcctaacaatgccactctctttacagctgcagaaatcgcaccgtttgttgagattctgctaacaaaccttttcaaagctctcacacttcctggctcttcagaaaatgaatatattatgaaagctatcatgagaagtttttctctcctacaagaagccataatcccctacatccctactctcatcactcagcttacacagaagctattagctgttagtaagaacccaagcaaacctcactttaatcactacatgtttgaagcaatatgtttatccataagaataacttgcaaagctaaccctgctgctgttgtaaattttgaggaggctttgtttttggtgtttactgaaatcttacaaaatgatgtgcaagaatttattccatacgtctttcaagtgatgtctttgcttctggaaacacacaaaaatgacatcccgtcttcctatatggccttatttcctcatctccttcagccagtgctttgggaaagaacaggaaatattcctgctctagtgaggcttcttcaagcattcttagaacgcggttcaaacacaatagcaagtgctgcagctgacaaaattcctgggttactaggtgtctttcagaagctgattgcatccaaagcaaatgaccaccaaggtttttatcttctaaacagtataatagagcacatgcctcctgaatcagttgaccaatataggaaacaaatcttcattctgctattccagagacttcagaattccaaaacaaccaagtttatcaagagttttttagtctttattaatttgtattgcataaaatatggggcactagcactacaagaaatatttgatggtatacaaccaaaaatgtttggaatggttttggaaaaaattattattcctgaaattcagaaggtatctggaaatgtagagaaaaagatctgtgcggttggcataaccaaattactaacagaatgtcccccaatgatggacactgagtataccaaactgtggactccattattacagtctttgattggtctttttgagttacccgaagatgataccattcctgatgaggaacattttattgacatagaagatacaccaggatatcagactgccttctcacagttggcatttgctgggaaaaaagagcatgatcctgtaggtcaaatggtgaataaccccaaaattcacctggcacagtcacttcacaagttgtctaccgcctgtccaggaagggttccatcaatggtgagcaccagcctgaatgcagaagcgctccagtatctccaagggtaccttcaggcagccagtgtgacactgctttaaactgcatttttctaatgggctaaacccagatggtttcctaggaaatcacaggcttctgagcacagctgcattaaaacaaaggaagttctccttttgaacttgtcacgaattccatcttgtaaaggatattaaatgttgctttaacctgaa

SEQ ID NO: 308103 - DNA, 2731 bp, Homo sapiens
tttagttgatgggcgagaaagtgctgtgggatgaaagttagatttactgccgatgaatatgatagtgaaatggattttggcgtaggtttggtctagggtgtagcctgagaataggggggccattcaacgcctccgtttctgtatcccacgagatcctatagcaatggaactcagcgatgcaaatctgcaaacactaacagaatatttaaagaaaacacttgatcctgatcctgccatccgacgtccagctgagaaatttcttgaatctgttgaaggaaatcagaattatccactgttgcttttgacattactggagaagtcccaggataatgttatcaaagatctccctgaattttttgaagataatatggaaacttggatgaataattttcatactctcttaacattggataataagcttttacaaactgatgatgaagaggaagccggcttattggagctcttaaaatcccagatttgtgataatgccgcactctatgcacaaaagtacgatgaagaattccagcgatacctgcctcgttttgttacagccatctggaatttactagttacaacgggtcaagaggttaaatatgatttgttggtaagtaatgcaattcaatttctggcttcagtttgtgagagacctcattataagaatctatttgaggaccagaacacgctgacaagtatctgtgaaaaggttattgtgcctaacatggaatttagagctgctgatgaagaagcatttgaagataattctgaggagtacataaggagagatttggaaggatctgatattgatactagacgcagggctgcttgtgatctggtacgaggattatgcaagttttttgagggacctgtgacaggaatcttctctggttatgttaattccatgctgcaggaatacgcaaaaaatccatctgtcaactggaaacacaaagatgcagccatctacctagtgacatctttggcatcaaaagcccaaacacagaagcatggaattacacaagcaaatgaacttgtaaacctaactgagttctttgtgaatcacatcctccctgatttaaaatcagctaatgtgaatgaatttcctgtccttaaagctgacggtatcaaatatattatgatttttagaaatcaagtgccaaaagaacatcttttagtctcgattcctctcttgattaatcatcttcaagctgaaagtattgttgttcatacttacgcagctcatgctcttgaacggctctttactatgcgagggcctaacaatgccactctctttacagctgcagaaatcgcaccgtttgttgagattctgctaacaaaccttttcaaagctctcacacttcctggctcttcagaaaatgaatatattatgaaagctatcatgagaagtttttctctcctacaagaagccataatcccctacatccctactctcatcactcagcttacacagaagctattagctgttagtaagaacccaagcaaacctcactttaatcactacatgtttgaagcaatatgtttatccataagaataacttgcaaagctaaccctgctgctgttgtaaattttgaggaggctttgtttttggtgtttactgaaatcttacaaaatgatgtgcaagaatttattccatacgtctttcaagtgatgtctttgcttctggaaacacacaaaaatgacatcccgtcttcctatatggccttatttcctcatctccttcagccagtgctttgggaaagaacaggaaatattcctgctctagtgaggcttcttcaagcattcttagaacgcggttcaaacacaatagcaagtgctgcagctgacaaaattcctgggttactaggtgtctttcagaagctgattgcatccaaagcaaatgaccaccaaggtttttatcttctaaacagtataatagagcacatgcctcctgaatcagttgaccaatataggaaacaaatcttcattctgctattccagagacttcagaattccaaaacaaccaagtttatcaagagttttttagtctttattaatttgtattgcataaaatatggggcactagcactacaagaaatatttgatggtatacaaccaaaaatgtttggaatggttttggaaaaaattattattcctgaaattcagaaggtatctggaaatgtagagaaaaagatctgtgcggttggcataaccaaattactaacagaatgtcccccaatgatggacactgagtataccaaactgtggactccattattacagtctttgattggtctttttgagttacccgaagatgataccattcctgatgaggaacattttattgacatagaagatacaccaggatatcagactgccttctcacagttggcatttgctgggaaaaaagagcatgatcctgtaggtcaaatggtgaataaccccaaaattcacctggcacagtcacttcacaagttgtctaccgcctgtccaggaagggttccatcaatggtgagcaccagcctgaatgcagaagcgctccagtatctccaagggtaccttcaggcagccagtgtgacactgctttaaactgcatttttctaatgggctaaacccagatggtttcctaggaaatcacaggcttctgagcacagctgcattaaaacaaaggaagttctccttttgaacttgtcacgaattccatcttgtaaaggatattaaatgttgctttaacctgaa

SEQ ID NO: 308104 - DNA, 3856 bp, Homo sapiens
gcattcctggccccgccccctgcagcgggccgctcgctcatgcgctctggcctcaggctcgctgtcgcgccattttgccggggtttgaatgtgaggcggagcggcggcaggagcgggtagtgccagctacggtccgcggctggggttccctcctccgtttctgtatccccacgagatcctatagcaatggaactcagcgatgcaaatctgcaaacactaacagaatatttaaagaaaacacttgatcctgatcctgccatccgacgtccagctgagaaatttcttgaatctgttgaaggaaatcagaattatccactgttgcttttgacattactggagaagtcccaggataatgttatcaaagtatgtgcttcagtaacattcaaaaactatattaaaaggaactggagaattgttgaagatgaaccaaacaaaatttgtgaagccgatcgagtggccattaaagccaacatagtgcacttgatgcttagcagcccagagcaaattcagaagcagttaagtgatgcaattagcattattggcagagaagattttccacagaaatggcctgacttgctgacagaaatggtgaatcgctttcagagtggagatttccatgttattaatggagtcctccgtacagcacattcattatttaaaagataccgtcatgaatttaagtcaaacgagttatggactgaaattaagcttgttctggatgcctttgctttgcctttgactaatctttttaaggccactattgaactctgcagtacccatgcaaatgatgcctctgccctgaggattctgttttcttccctgatcctgatctcaaaattgttctatagtttaaactttcaggatctccctgaattttttgaagataatatggaaacttggatgaataattttcatactctcttaacattggataataagcttttacaaactgatgatgaagaggaagccggcttattggagctcttaaaatcccagatttgtgataatgccgcactctatgcacaaaagtacgatgaagaattccagcgatacctgcctcgttttgttacagccatctggaatttactagttacaacgggtcaagaggttaaatatgatttgttggtaagtaatgcaattcaatttctggcttcagtttgtgagagacctcattataagaatctatttgaggaccagaacacgctgacaagtatctgtgaaaaggttattgtgcctaacatggaatttagagctgctgatgaagaagcatttgaagataattctgaggagtacataaggagagatttggaaggatctgatattgatactagacgcagggctgcttgtgatctggtacgaggattatgcaagttttttgagggacctgtgacaggaatcttctctggttatgttaattccatgctgcaggaatacgcaaaaaatccatctgtcaactggaaacacaaagatgcagccatctacctagtgacatctttggcatcaaaagcccaaacacagaagcatggaattacacaagcaaatgaacttgtaaacctaactgagttctttgtgaatcacatcctccctgatttaaaatcagctaatgtgaatgaatttcctgtccttaaagctgacggtatcaaatatattatgatttttagaaatcaagtgccaaaagaacatcttttagtctcgattcctctcttgattaatcatcttcaagctgaaagtattgttgttcatacttacgcagctcatgctcttgaacggctctttactatgcgagggcctaacaatgccactctctttacagctgcagaaatcgcaccgtttgttgagattctgctaacaaaccttttcaaagctctcacacttcctggctcttcagaaaatgaatatattatgaaagctatcatgagaagtttttctctcctacaagaagccataatcccctacatccctactctcatcactcagcttacacagaagctattagctgttagtaagaacccaagcaaacctcactttaatcactacatgtttgaagcaatatgtttatccataagaataacttgcaaagctaaccctgctgctgttgtaaattttgaggaggctttgtttttggtgtttactgaaatcttacaaaatgatgtgcaagaatttattccatacgtctttcaagtgatgtctttgcttctggaaacacacaaaaatgacatcccgtcttcctatatggccttatttcctcatctccttcagccagtgctttgggaaagaacaggaaatattcctgctctagtgaggcttcttcaagcattcttagaacgcggttcaaacacaatagcaagtgctgcagctgacaaaattcctgggttactaggtgtctttcagaagctgattgcatccaaagcaaatgaccaccaaggtttttatcttctaaacagtataatagagcacatgcctcctgaatcagttgaccaatataggaaacaaatcttcattctgctattccagagacttcagaattccaaaacaaccaagtttatcaagagttttttagtctttattaatttgtattgcataaaatatggggcactagcactacaagaaatatttgatggtatacaaccaaaaatgtttggaatggttttggaaaaaattattattcctgaaattcagaaggtatctggaaatgtagagaaaaagatctgtgcggttggcataaccaaattactaacagaatgtcccccaatgatggacactgagtataccaaactgtggactccattattacagtctttgattggtctttttgagttacccgaagatgataccattcctgatgaggaacattttattgacatagaagatacaccaggatatcagactgccttctcacagttggcatttgctgggaaaaaagagcatgatcctgtaggtcaaatggtgaataaccccaaaattcacctggcacagtcacttcacaagttgtctaccgcctgtccaggaaggacctatttttgaaggcataaaagcagttgagtttctggagaatttttggatggtgattaatgacttgactggctgctcttcccagagctgtggcagctctcccgtagaagatggggtttgtattggcgcaccaagatctccaacagccagtgtgtgtttcccatctcttgtaggttccatcaatggtgagcaccagcctgaatgcagaagcgctccagtatctccaagggtaccttcaggcagccagtgtgacactgctttaaactgcatttttctaatgggctaaacccagatggtttcctaggaaatcacaggcttctgagcacagctgcattaaaacaaaggaagttctccttttgaacttgtcacgaattccatcttgtaaaggatattaaatgttgctttaacctgaaccttgagcaaattagttggtttgtgtgatcatacagttatgtgggtggcttctagtttgcaacttcaagggacaagtattaatagttcagtgtatggcgttggtttgtgttgagcgtttgcacggtttggataatcttaaattttgacggacactgtggagactttctgttactaaatccttttgttttgaagctgttgctatttgtatttctcttgtcctttatattttttgtctgtttatttacgcttttattggaaatgtgaataagtaaagaattacttgtgttacttgccaagcagtgcacatttcatagtttcaaatctgtaatcagcaataaaaatcctaaaatatgtacctaagaacatcttaagggcaggttttcagtgctctctcatgcttttataaaaatgaagaatttctttaaatttc

SEQ ID NO: 308105 - DNA, 3708 bp, Homo sapiens
gcattcctggccccgccccctgcagcgggccgctcgctcatgcgctctggcctcaggctcgctgtcgcgccattttgccggggtttgaatgtgaggcggagcggcggcaggagcgggtagtgccagctacggtccgcggctggggttccctcctccgtttctgtatccccacgagatcctatagcaatggaactcagcgatgcaaatctgcaaacactaacagaatatttaaagaaaacacttgatcctgatcctgccatccgacgtccagctgagaaatttcttgaatctgttgaaggaaatcagaattatccactgttgcttttgacattactggagaagtcccaggataatgttatcaaagtatgtgcttcagtaacattcaaaaactatattaaaaggaactggagaattgttgaagatgaaccaaacaaaatttgtgaagccgatcgagtggccattaaagccaacatagtgcacttgatgcttagcagcccagagcaaattcagaagcagttaagtgatgcaattagcattattggcagagaagattttccacagaaatggcctgacttgctgacagaaatggtgaatcgctttcagagtggagatttccatgttattaatggagtcctccgtacagcacattcattatttaaaagataccgtcatgaatttaagtcaaacgagttatggactgaaattaagcttgttctggatgcctttgctttgcctttgactaatctttttaaggccactattgaactctgcagtacccatgcaaatgatgcctctgccctgaggattctgttttcttccctgatcctgatctcaaaattgttctatagtttaaactttcaggatctccctgaattttttgaagataatatggaaacttggatgaataattttcatactctcttaacattggataataagcttttacaaactgatgatgaagaggaagccggcttattggagctcttaaaatcccagatttgtgataatgccgcactctatgcacaaaagtacgatgaagaattccagcgatacctgcctcgttttgttacagccatctggaatttactagttacaacgggtcaagaggttaaatatgatttgttggtaagtaatgcaattcaatttctggcttcagtttgtgagagacctcattataagaatctatttgaggaccagaacacgctgacaagtatctgtgaaaaggttattgtgcctaacatggaatttagagctgctgatgaagaagcatttgaagataattctgaggagtacataaggagagatttggaaggatctgatattgatactagacgcagggctgcttgtgatctggtacgaggattatgcaagttttttgagggacctgtgacaggaatcttctctggttatgttaattccatgctgcaggaatacgcaaaaaatccatctgtcaactggaaacacaaagatgcagccatctacctagtgacatctttggcatcaaaagcccaaacacagaagcatggaattacacaagcaaatgaacttgtaaacctaactgagttctttgtgaatcacatcctccctgatttaaaatcagctaatgtgaatgaatttcctgtccttaaagctgacggtatcaaatatattatgatttttagaaatcaagtgccaaaagaacatcttttagtctcgattcctctcttgattaatcatcttcaagctgaaagtattgttgttcatacttacgcagctcatgctcttgaacggctctttactatgcgagggcctaacaatgccactctctttacagctgcagaaatcgcaccgtttgttgagattctgctaacaaaccttttcaaagctctcacacttcctggctcttcagaaaatgaatatattatgaaagctatcatgagaagtttttctctcctacaagaagccataatcccctacatccctactctcatcactcagcttacacagaagctattagctgttagtaagaacccaagcaaacctcactttaatcactacatgtttgaagcaatatgtttatccataagaataacttgcaaagctaaccctgctgctgttgtaaattttgaggaggctttgtttttggtgtttactgaaatcttacaaaatgatgtgcaagaatttattccatacgtctttcaagtgatgtctttgcttctggaaacacacaaaaatgacatcccgtcttcctatatggccttatttcctcatctccttcagccagtgctttgggaaagaacaggaaatattcctgctctagtgaggcttcttcaagcattcttagaacgcggttcaaacacaatagcaagtgctgcagctgacaaaattcctgggttactaggtgtctttcagaagctgattgcatccaaagcaaatgaccaccaaggtttttatcttctaaacagtataatagagcacatgcctcctgaatcagttgaccaatataggaaacaaatcttcattctgctattccagagacttcagaattccaaaacaaccaagtttatcaagagttttttagtctttattaatttgtattgcataaaatatggggcactagcactacaagaaatatttgatggtatacaaccaaaaatgtttggaatggttttggaaaaaattattattcctgaaattcagaaggtatctggaaatgtagagaaaaagatctgtgcggttggcataaccaaattactaacagaatgtcccccaatgatggacactgagtataccaaactgtggactccattattacagtctttgattggtctttttgagttacccgaagatgataccattcctgatgaggaacattttattgacatagaagatacaccaggatatcagactgccttctcacagttggcatttgctgggaaaaaagagcatgatcctgtaggtcaaatggtgaataaccccaaaattcacctggcacagtcacttcacaagttgtctaccgcctgtccaggaaggacctatttttgaaggcataaaagcagttccatcaatggtgagcaccagcctgaatgcagaagcgctccagtatctccaagggtaccttcaggcagccagtgtgacactgctttaaactgcatttttctaatgggctaaacccagatggtttcctaggaaatcacaggcttctgagcacagctgcattaaaacaaaggaagttctccttttgaacttgtcacgaattccatcttgtaaaggatattaaatgttgctttaacctgaaccttgagcaaattagttggtttgtgtgatcatacagttatgtgggtggcttctagtttgcaacttcaagggacaagtattaatagttcagtgtatggcgttggtttgtgttgagcgtttgcacggtttggataatcttaaattttgacggacactgtggagactttctgttactaaatccttttgttttgaagctgttgctatttgtatttctcttgtcctttatattttttgtctgtttatttacgcttttattggaaatgtgaataagtaaagaattacttgtgttacttgccaagcagtgcacatttcatagtttcaaatctgtaatcagcaataaaaatcctaaaatatgtacctaagaacatcttaagggcaggttttcagtgctctctcatgcttttataaaaatgaagaatttctttaaatttc

SEQ ID NO: 308106 - DNA, 3050 bp, Homo sapiens
gcattcctggccccgccccctgcagcgggccgctcgctcatgcgctctggcctcaggctcgctgtcgcgccattttgccggggtttgaatgtgaggcggagcggcggcaggagcgggtagtgccagctacggtccgcggctggggttccctcctccgtttctgtatccccacgagatcctatagcaatggaactcagcgatgcaaatctgcaaacactaacagaatatttaaagaaaacacttgatcctgatcctgccatccgacgtccagctgagaaatttcttgaatctgttgaaggaaatcagaattatccactgttgcttttgacattactggagaagtcccaggataatgttatcaaagtatgtgcttcagtaacattcaaaaactatattaaaaggaactggagaattgttgaagatgaaccaaacaaaatttgtgaagccgatcgagtggccattaaagccaacatagtgcacttgatgcttagcagcccagagcaaattcagaagcagttaagtgatgcaattagcattattggcagagaagattttccacagaaatggcctgacttgctgacagaaatggtgaatcgctttcagagtggagatttccatgttattaatggagtcctccgtacagcacattcattatttaaaagataccgtcatgaatttaagtcaaacgagttatggactgaaattaagcttgttctggatgcctttgctttgcctttgactaatctttttaaggccactattgaactctgcagtacccatgcaaatgatgcctctgccctgaggattctgttttcttccctgatcctgatctcaaaattgttctatagtttaaactttcaggatctccctgaattttttgaagataatatggaaacttggatgaataattttcatactctcttaacattggataataagcttttacaaactgatgatgaagaggaagccggcttattggagctcttaaaatcccagatttgtgataatgccgcactctatgcacaaaagtacgatgaagaattccagcgatacctgcctcgttttgttacagccatctggaatttactagttacaacgggtcaagaggttaaatatgatttgttggtaagtaatgcaattcaatttctggcttcagtttgtgagagacctcattataagaatctatttgaggaccagaacacgctgacaagtatctgtgaaaaggttattgtgcctaacatggaatttagagctgctgatgaagaagcatttgaagataattctgaggagtacataaggagagatttggaaggatctgatattgatactagacgcagggctgcttgtgatctggtacgaggattatgcaagttttttgagggacctgtgacaggaatcttctctggttatgttaattccatgctgcaggaatacgcaaaaaatccatctgtcaactggaaacacaaagatgcagccatctacctagtgacatctttggcatcaaaagcccaaacacagaagcatggaattacacaagcaaatgaacttgtaaacctaactgagttctttgtgaatcacatcctccctgatttaaaatcagctaatgtgaatgaatttcctgtccttaaagctgacggtatcaaatatattatgatttttagaaatcaagtgccaaaagaacatcttttagtctcgattcctctcttgattaatcatcttcaagctgaaagtattgttgttcatacttacgcagctcatgctcttgaacggctctttactatgcgagggcctaacaatgccactctaacccaagcaaacctcactttaatcactacatgtttgaagcaatatgtttatccataagaataacttgcaaagctaaccctgctgctgttgtaaattttgaggaggctttgtttttggtgtttactgaaatcttacaaaatgatgtgcaagaatttattccatacgtctttcaagtgatgtctttgcttctggaaacacacaaaaatgacatcccgtcttcctatatggccttatttcctcatctccttcagccagtgctttgggaaagaacaggaaatattcctgctctagtgaggcttcttcaagcattcttagaacgcggttcaaacacaatagcaagtgctgcagctgacaaaattcctgggttactaggtgtctttcagaagctgattgcatccaaagcaaatgaccaccaaggtttttatcttctaaacagtataatagagcacatgcctcctgaatcagttgaccaatataggaaacaaatcttcattctgctattccagagacttcagaattccaaaacaaccaagtttatcaagagttttttagtctttattaatttgtattgcataaaatatggggcactagcactacaagaaatatttgatggtatacaaccaaaaatgtttggaatggttttggaaaaaattattattcctgaaattcagaaggtatctggaaatgtagagaaaaagatctgtgcggttggcataaccaaattactaacagaatgtcccccaatgatggacactgagtataccaaactgtggactccattattacagtctttgattggtctttttgagttacccgaagatgataccattcctgatgaggaacattttattgacatagaagatacaccaggatatcagactgccttctcacagttggcatttgctgggaaaaaagagcatgatcctgtaggtcaaatggtgaataaccccaaaattcacctggcacagtcacttcacaagttgtctaccgcctgtccaggaagggttccatcaatggtgagcaccagcctgaatgcagaagcgctccagtatctccaagggtaccttcaggcagccagtgtgacactgctttaaactgcatttttctaatgggctaaacccagatggtttcctaggaaatcacaggcttctgagcacagctgcattaaaacaaaggaagttctccttttgaacttgtcacgaattccatcttgtaaaggatattaaatgttgctttaacctgaa

SEQ ID NO: 308107 - DNA, 3425 bp, Homo sapiens
gcattcctggccccgccccctgcagcgggccgctcgctcatgcgctctggcctcaggctcgctgtcgcgccattttgccggggtttgaatgtgaggcggagcggcggcaggagcgggtagtgccagctacggtccgcggctggggttccctcctccgtttctgtatccccacgagatcctatagcaatggaactcagcgatgcaaatctgcaaacactaacagaatatttaaagaaaacacttgatcctgatcctgccatccgacgtccagctgagaaatttcttgaatctgttgaaggaaatcagaattatccactgttgcttttgacattactggagaagtcccaggataatgttatcaaagtatgtgcttcagtaacattcaaaaactatattaaaaggaactggagaattgttgaagatgaaccaaacaaaatttgtgaagccgatcgagtggccattaaagccaacatagtgcacttgatgcttagcagcccagagcaaattcagaagcagttaagtgatgcaattagcattattggcagagaagattttccacagaaatggcctgacttgctgacagaaatggtgaatcgctttcagagtggagatttccatgttattaatggagtcctccgtacagcacattcattatttaaaagataccgtcatgaatttaagtcaaacgagttatggactgaaattaagcttgttctggatgcctttgctttgcctttgactaatctttttaaggccactattgaactctgcagtacccatgcaaatgatgcctctgccctgaggattctgttttcttccctgatcctgatctcaaaattgttctatagtttaaactttcaggatctccctgaattttttgaagataatatggaaacttggatgaataattttcatactctcttaacattggataataagcttttacaaactgatgatgaagaggaagccggcttattggagctcttaaaatcccagatttgtgataatgccgcactctatgcacaaaagtacgatgaagaattccagcgatacctgcctcgttttgttacagccatctggaatttactagttacaacgggtcaagaggttaaatatgatttgttggtaagtaatgcaattcaatttctggcttcagtttgtgagagacctcattataagaatctatttgaggaccagaacacgctgacaagtatctgtgaaaaggttattgtgcctaacatggaatttagagctgctgatgaagaagcatttgaagataattctgaggagtacataaggagagatttggaaggatctgatattgatactagacgcagggctgcttgtgatctggtacgaggattatgcaagttttttgagggacctgtgacaggaatcttctctggttatgttaattccatgctgcaggaatacgcaaaaaatccatctgtcaactggaaacacaaagatgcagccatctacctagtgacatctttggcatcaaaagcccaaacacagaagcatggaattacacaagcaaatgaacttgtaaacctaactgagttctttgtgaatcacatcctccctgatttaaaatcagctaatgtgaatgaatttcctgtccttaaagctgacggtatcaaatatattatgatttttagaaatcaagtgccaaaagaacatcttttagtctcgattcctctcttgattaatcatcttcaagctgaaagtattgttgttcatacttacgcagctcatgctcttgaacggctctttactatgcgagggcctaacaatgccactctctttacagctgcagaaatcgcaccgtttgttgagattctgctaacaaaccttttcaaagctctcacacttcctggctcttcagaaaatgaatatattatgaaagctatcatgagaagtttttctctcctacaagaagccataatcccctacatccctactctcatcactcagcttacacagaagctattagctgttagtaagaacccaagcaaacctcactttaatcactacatgtttgaagcaatatgtttatccataagaataacttgcaaagctaaccctgctgctgttgtaaattttgaggaggctttgtttttggtgtttactgaaatcttacaaaatgatgtgcaagaatttattccatacgtctttcaagtgatgtctttgcttctggaaacacacaaaaatgacatcccgtcttcctatatggccttatttcctcatctccttcagccagtgctttgggaaagaacaggaaatattcctgctctagtgaggcttcttcaagcattcttagaacgcggttcaaacacaatagcaagtgctgcagctgacaaaattcctgggttactaggtgtctttcagaagctgattgcatccaaagcaaatgaccaccaaggtttttatcttctaaacagtataatagagcacatgcctcctgaatcagttgaccaatataggaaacaaatcttcattctgctattccagagacttcagaattccaaaacaaccaagtttatcaagagttttttagtctttattaatttgtattgcataaaatatggggcactagcactacaagaaatatttgatggtatacaaccaaaaatgtttggaatggttttggaaaaaattattattcctgaaattcagaaggtatctggaaatgtagagaaaaagatctgtgcggttggcataaccaaattactaacagaatgtcccccaatgatggacactgagtataccaaactgtggactccattattacagtctttgattggtctttttgagttacccgaagatgataccattcctgatgaggaacattttattgacatagaagatacaccaggatatcagactgccttctcacagttggcatttgctgggaaaaaagagcatgatcctgtaggtcaaatggtgaataaccccaaaattcacctggcacagtcacttcacaagttgtctaccgcctgtccaggaaggacctatttttgaaggcataaaagcagttgagtttctggagaatttttggatggtgattaatgacttgactggctgctcttcccagagctgtggcagctctcccgtagaagatggggtttgtattggcgcaccaagatctccaacagccagtgtgtgtttcccatctcttgtaggttccatcaatggtgagcaccagcctgaatgcagaagcgctccagtatctccaagggtaccttcaggcagccagtgtgacactgctttaaactgcatttttctaatgggctaaacccagatggtttcctaggaaatcacaggcttctgagcacagctgcattaaaacaaaggaagttctccttttgaacttgtcacgaattccatcttgtaaaggatattaaatgttgctttaacctgaa

SEQ ID NO: 308108 - DNA, 3170 bp, Homo sapiens
  misc_feature (3115)..(3115): n is a, c, g, or t
gcattcctggccccgccccctgcagcgggccgctcgctcatgcgctctggcctcaggctcgctgtcgcgccattttgccggggtttgaatgtgaggcggagcggcggcaggagcgggtagtgccagctacggtccgcggctggggttccctcctccgtttctgtatccccacgagatcctatagcaatggaactcagcgatgcaaatctgcaaacactaacagaatatttaaagaaaacacttgatcctgatcctgccatccgacgtccagctgagaaatttcttgaatctgttgaaggaaatcagaattatccactgttgcttttgacattactggagaagtcccaggataatgttatcaaagtatgtgcttcagtaacattcaaaaactatattaaaaggaactggagaattgttgaagatgaaccaaacaaaatttgtgaagccgatcgagtggccattaaagccaacatagtgcacttgatgcttagcagcccagagcaaattcagaagcagttaagtgatgcaattagcattattggcagagaagattttccacagaaatggcctgacttgctgacagaaatggtgaatcgctttcagagtggagatttccatgttattaatggagtcctccgtacagcacattcattatttaaaagataccgtcatgaatttaagtcaaacgagttatggactgaaattaagcttgttctggatgcctttgctttgcctttgactaatctttttaaggccactattgaactctgcagtacccatgcaaatgatgcctctgccctgaggattctgttttcttccctgatcctgatctcaaaattgttctatagtttaaactttcaggatctccctgaattttttgaagataatatggaaacttggatgaataattttcatactctcttaacattggataataagcttttacaaactgatgatgaagaggaagccggcttattggagctcttaaaatcccagatttgtgataatgccgcactctatgcacaaaagtacgatgaagaattccagcgatacctgcctcgttttgttacagccatctggaatttactagttacaacgggtcaagaggttaaatatgatttgttggtaagtaatgcaattcaatttctggcttcagtttgtgagagacctcattataagaatctatttgaggaccagaacacgctgacaagtatctgtgaaaaggttattgtgcctaacatggaatttagagctgctgatgaagaagcatttgaagataattctgaggagtacataaggagagatttggaaggatctgatattgatactagacgcagggctgcttgtgatctggtacgaggattatgcaagttttttgagggacctgtgacaggaatcttctctggttatgttaattccatgctgcaggaatacgcaaaaaatccatctgtcaactggaaacacaaagatgcagccatctacctagtgacatctttggcatcaaaagcccaaacacagaagcatggaattacacaagcaaatgaacttgtaaacctaactgagttctttgtgaatcacatcctccctgatttaaaatcagctaatgtgaatgaatttcctgtccttaaagctgacggtatcaaatatattatgatttttagaaatcaagtgccaaaagaacatcttttagtctcgattcctctcttgattaatcatcttcaagctgaaagtattgttgttcatacttacgcagctcatgctcttgaacggctctttactatgcgagggcctaacaatgccactctctttacagctgcagaaatcgcaccgtttgttgagattctgctaacaaaccttttcaaagctctcacacttcctggctcttcagaaaatgaatatattatgaaagctatcatgagaagtttttctctcctacaagaagccataatcccctacatccctactctcatcactcagcttacacagaagctattagctgttagtaagaacccaagcaaacctcactttaatcactacatgtttgaagcaatatgtttatccataagaataacttgcaaagctaaccctgctgctgttgtaaattttgaggaggctttgtttttggtgtttactgaaatcttacaaaatgatgtgcaagaatttattccatacgtctttcaagtgatgtctttgcttctggaaacacacaaaaatgacatcccgtcttcctatatggccttatttcctcatctccttcagccagtgctttgggaaagaacaggaaatattcctgctctagtgaggcttcttcaagcattcttagaacgcggttcaaacacaatagcaagtgctgcagctgacaaaattcctgggttactaggtgtctttcagaagctgattgcatccaaagcaaatgaccaccaaggtttttatcttctaaacagtataatagagcacatgcctcctgaatcagttgaccaatataggaaacaaatcttcattctgctattccagagacttcagaattccaaaacaaccaagtttatcaagagttttttagtctttattaatttgtattgcataaaatatggggcactagcactacaagaaatatttgatggtatacaaccaaaaatgtttggaatggttttggaaaaaattattattcctgaaattcagaaggtatctggaaatgtagagaaaaagatctgtgcggttggcataaccaaattactaacagaatgtcccccaatgatggacactgagtataccaaactgtggactccattattacagtctttgattggtctttttgagttacccgaagatgataccattcctgatgaggaacattttattgacatagaagatacaccaggatatcagactgccttctcacagttggcatttgctgggaaaaaagagcatgatcctgtaggtcaaatggtgaataaccccaaaattcacctggcacagtcacttcacaagttgtctaccgcctgtccaggaagggtaagtgtgttgtcaaagaactctgtgataaatggagactttaatgggagggcaaaaggatagtagtagttctggtgtctgttttcattggtggctgaagatngttggtggccccgcaagattgttggtggcccatgaagattgttggggatacgagc

SEQ ID NO: 308109 - DNA, 3170 bp, Homo sapiens
gcattcctggccccgccccctgcagcgggccgctcgctcatgcgctctggcctcaggctcgctgtcgcgccattttgccggggtttgaatgtgaggcggagcggcggcaggagcgggtagtgccagctacggtccgcggctggggttccctcctccgtttctgtatccccacgagatcctatagcaatggaactcagcgatgcaaatctgcaaacactaacagaatatttaaagaaaacacttgatcctgatcctgccatccgacgtccagctgagaaatttcttgaatctgttgaaggaaatcagaattatccactgttgcttttgacattactggagaagtcccaggataatgttatcaaagtatgtgcttcagtaacattcaaaaactatattaaaaggaactggagaattgttgaagatgaaccaaacaaaatttgtgaagccgatcgagtggccattaaagccaacatagtgcacttgatgcttagcagcccagagcaaattcagaagcagttaagtgatgcaattagcattattggcagagaagattttccacagaaatggcctgacttgctgacagaaatggtgaatcgctttcagagtggagatttccatgttattaatggagtcctccgtacagcacattcattatttaaaagataccgtcatgaatttaagtcaaacgagttatggactgaaattaagcttgttctggatgcctttgctttgcctttgactaatctttttaaggccactattgaactctgcagtacccatgcaaatgatgcctctgccctgaggattctgttttcttccctgatcctgatctcaaaattgttctatagtttaaactttcaggatctccctgaattttttgaagataatatggaaacttggatgaataattttcatactctcttaacattggataataagcttttacaaactgatgatgaagaggaagccggcttattggagctcttaaaatcccagatttgtgataatgccgcactctatgcacaaaagtacgatgaagaattccagcgatacctgcctcgttttgttacagccatctggaatttactagttacaacgggtcaagaggttaaatatgatttgttggtaagtaatgcaattcaatttctggcttcagtttgtgagagacctcattataagaatctatttgaggaccagaacacgctgacaagtatctgtgaaaaggttattgtgcctaacatggaatttagagctgctgatgaagaagcatttgaagataattctgaggagtacataaggagagatttggaaggatctgatattgatactagacgcagggctgcttgtgatctggtacgaggattatgcaagttttttgagggacctgtgacaggaatcttctctggttatgttaattccatgctgcaggaatacgcaaaaaatccatctgtcaactggaaacacaaagatgcagccatctacctagtgacatctttggcatcaaaagcccaaacacagaagcatggaattacacaagcaaatgaacttgtaaacctaactgagttctttgtgaatcacatcctccctgatttaaaatcagctaatgtgaatgaatttcctgtccttaaagctgacggtatcaaatatattatgatttttagaaatcaagtgccaaaagaacatcttttagtctcgattcctctcttgattaatcatcttcaagctgaaagtattgttgttcatacttacgcagctcatgctcttgaacggctctttactatgcgagggcctaacaatgccactctctttacagctgcagaaatcgcaccgtttgttgagattctgctaacaaaccttttcaaagctctcacacttcctggctcttcagaaaatgaatatattatgaaagctatcatgagaagtttttctctcctacaagaagccataatcccctacatccctactctcatcactcagcttacacagaagctattagctgttagtaagaacccaagcaaacctcactttaatcactacatgtttgaagcaatatgtttatccataagaataacttgcaaagctaaccctgctgctgttgtaaattttgaggaggctttgtttttggtgtttactgaaatcttacaaaatgatgtgcaagaatttattccatacgtctttcaagtgatgtctttgcttctggaaacacacaaaaatgacatcccgtcttcctatatggccttatttcctcatctccttcagccagtgctttgggaaagaacaggaaatattcctgctctagtgaggcttcttcaagcattcttagaacgcggttcaaacacaatagcaagtgctgcagctgacaaaattcctgggttactaggtgtctttcagaagctgattgcatccaaagcaaatgaccaccaaggtttttatcttctaaacagtataatagagcacatgcctcctgaatcagttgaccaatataggaaacaaatcttcattctgctattccagagacttcagaattccaaaacaaccaagtttatcaagaaatgtttggaatggttttggaaaaaattattattcctgaaattcagaaggtatctggaaatgtagagaaaaagatctgtgcggttggcataaccaaattactaacagaatgtcccccaatgatggacactgagtataccaaactgtggactccattattacagtctttgattggtctttttgagttacccgaagatgataccattcctgatgaggaacattttattgacatagaagatacaccaggatatcagactgccttctcacagttggcatttgctgggaaaaaagagcatgatcctgtaggtcaaatggtgaataaccccaaaattcacctggcacagtcacttcacaagttgtctaccgcctgtccaggaagggttccatcaatggtgagcaccagcctgaatgcagaagcgctccagtatctccaagggtaccttcaggcagccagtgtgacactgctttaaactgcatttttctaatgggctaaacccagatggtttcctaggaaatcacaggcttctgagcacagctgcattaaaacaaaggaagttctccttttgaacttgtcacgaattccatcttgtaaaggatattaaatgttgctttaacctgaa

SEQ ID NO: 308110 - DNA, 1147 bp, Homo sapiens
gagtgttctgaggatccctggcttctacaagagcgtacacagatgatgtgcataatttattccatacgtctttcaagtgatgtctttgcttctggaaacacacaaaaatgacatcccgtcttcctatatggccttatttcctcatctccttcagccagtgctttgggaaagaacaggaaatattcctgctctagtgaggcttcttcaagcattcttagaacgcggttcaaacacaatagcaagtgctgcagctgacaaaattcctgggttactaggtgtctttcagaagctgattgcatccaaagcaaatgaccaccaaggtttttatcttctaaacagtataatagagcacatgcctcctgaatcagttgaccaatataggaaacaaatcttcattctgctattccagagacttcagaattccaaaacaaccaagtttatcaagagttttttagtctttattaatttgtattgcataaaatatggggcactagcactacaagaaatatttgatggtatacaaccaaaaatgtttggaatggttttggaaaaaattattattcctgaaattcagaaggtatctggaaatgtagagaaaaagatctgtgcggttggcataaccaaattactaacagaatgtcccccaatgatggacactgagtataccaaactgtggactccattattacagtctttgattggtctttttgagttacccgaagatgataccattcctgatgaggaacattttattgacatagaagatacaccaggatatcagactgccttctcacagttggcatttgctgggaaaaaagagcatgatcctgtaggtcaaatggtgaataaccccaaaattcacctggcacagtcacttcacaagttgtctaccgcctgtccaggaagggttccatcaatggtgagcaccagcctgaatgcagaagcgctccagtatctccaagggtaccttcaggcagccagtgtgacactgctttaaactgcatttttctaatgggctaaacccagatggtttcctaggaaatcacaggcttctgagcacagctgcattaaaacaaaggaagttctccttttgaacttgtcacgaattccatcttgtaaaggatattaaatgttgctttaacctgaa

SEQ ID NO: 308111 - DNA, 2806 bp, Homo sapiens
gcattcctggccccgccccctgcagcgggccgctcgctcatgcgctctggcctcaggctcgctgtcgcgccattttgccggggtttgaatgtgaggcggagcggcggcaggagcgggtagtgccagctacggtccgcggctggggttccctcctccgtttctgtatccccacgagatcctatagcaatggaactcagcgatgcaaatctgcaaacactaacagaatatttaaagaaaacacttgatcctgatcctgccatccgacgtccagctgagaaatttcttgaatctgttgaaggaaatcagaattatccactgttgcttttgacattactggagaagtcccaggataatgttatcaaagtatgtgcttcagtaacattcaaaaactatattaaaaggaactggagaattgttgaagatgaaccaaacaaaatttgtgaagccgatcgagtggccattaaagccaacatagtgcacttgatgcttagcagcccagagcaaattcagaagcagttaagtgatgcaattagcattattggcagagaagattttccacagaaatggcctgacttgctgacagaaatggtgaatcgctttcagagtggagatttccatgttattaatggagtcctccgtacagcacattcattatttaaaagataccgtcatgaatttaagtcaaacgagttatggactgaaattaagcttgttctggatgcctttgctttgcctttgactaatctttttaaggccactattgaactctgcagtacccatgcaaatgatgcctctgccctgaggattctgttttcttccctgatcctgatctcaaaattgttctatagtttaaactttcaggatctccctgaattttttgaagataatatggaaacttggatgaataattttcatactctcttaacattggataataagcttttacaaactgatgatgaagaggaagccggcttattggagctcttaaaatcccagatttgtgataatgccgcactctatgcacaaaagtacgatgaagaattccagcgatacctgcctcgttttgttacagccatctggaatttactagttacaacgggtcaagaggttaaatatgatttgttggtaagtaatgcaattcaatttctggcttcagtttgtgagagacctcattataagaatctatttgaggaccagaacacgctgacaagtatctgtgaaaaggttattgtgcctaacatggaatttagagctgctgatgaagaagcatttgaagataattctgaggagtacataaggagagatttggaaggatctgatattgatactagacgcagggctgcttgtgatctggtacgaggattatgcaagttttttgagggacctgtgacaggaatcttctctggttatgttaattccatgctgcaggaatacgcaaaaaatccatctgtcaactggaaacacaaagatgcagccatctacctagtgacatctttggcatcaaaagcccaaacacagaagcatggaattacacaagcaaatgaacttgtaaacctaactgagttctttgtgaatcacatcctccctgatttaaaatcagctaatgtgaatgaatttcctgtccttaaagctgacggtatcaaatatattatgatttttagaaatcaagtgccaaaagaacatcttttagtctcgattcctctcttgattaatcatcttcaagctgaaagtattgttgttcatacttacgcagctcatgctcttgaacggctctttactatgcgagggcctaacaatgccactctctttacagctgcagaaatcgcaccgtttgttgagattctgctaacaaaccttttcaaagctctcacacttcctggctcttcagaaaatgaatatattatgaaagctatcatgagaagtttttctctcctacaagaagccataatcccctacatccctactctcatcactcagcttacacagaagctattagctgttagtaagaacccaagcaaacctcactttaatcactacatgtttgaagcaatatgtttatccataagaataacttgcaaagctaaccctgctgctgttgtaaattttgaggaggctttgtttttggtgtttactgaaatcttacaaaatgatgtgcaagaatttattccatacgtctttcaagtgatgtctttgcttctggaaacacacaaaaatgacatcccgtcttcctatatggccttatttcctcatctccttcagccagtgctttgggaaagaacaggaaatattcctgctctagtgaggcttcttcaagcattcttagaacgcggttcaaacacaatagcaagtgctgcagctgacaaaattcctgggttactaggtgtctttcagaagctgattgcatccaaagcaaatgaccaccaaggtttttatcttctaaacagtataatagagcacatgcctcctgaatcagttgaccaatataggaaacaaatcttcattctgctattccagagacttcagaattccaaaacaaccaagtttatcaagagtaagtaaaatcatctggatgttctacagaagtaatgaaagaaggtagctaaaacccttagactttatggttgcagatacattttttatccgttttaaactttatgcaaaaaatacttggccacgtgtggaggttcatgcctgtaatcgcagcactttgggtggccaagggaggccgatcgcttgagctcaggagttcaagaccagcctgggcaacatggcgaaaccctgtccctacgaaaagtacaacaaaatt

SEQ ID NO: 308112 - DNA, 948 bp, Homo sapiens
  misc_feature (29)..(29): n is a, c, g, or t
agatctagaggaccccacgcgcacgcggncaaacacaatagcaagtgtgcagttgacaaaattcctgggttactaggtgtctttcagaagctgattgcatccaaagcaaatgaccaccaaggtttttatcttctaaacagtataatagagcacatgcctcctgaatcagttgaccaatataggaaacaaatcttcattctgctattccagagacttcagaattccaaaacaaccaagtttatcaagagttttttagtctttattaatttgtattgcataaaatatggggcactagcactacaagaaatatttgatggtatacaaccaaaaatgtttggaatggttttggaaaaaattattattcctgaaattcagaaggtatctggaaatgtagagaaaaagatctgtgcggttggcataaccaaattactaacagaatgtcccccaatgatggacactgagtataccaaactgtggactccattattacagtctttgattggtctttttgagttacccgaagatgataccattcctgatgaggaacattttattgacatagaagatacaccaggatatcagactgccttctcacagttggcatttgctgggaaaaaagagcatgatcctgtaggtcaaatggtgaataaccccaaaattcacctggcacagtcacttcacaagttgtctaccgcctgtccaggaagggttccatcaatggtgagcaccagcctgaatgcagaagcgctccagtatctccaagggtaccttcaggcagccagtgtgacactgctttaaactgcatttttctaatgggctaaacccagatggtttcctaggaaatcacaggcttctgagcacagctgcattaaaacaaaggaagttctccttttgaacttgtcacgaattccatcttgtaaaggatattaaatgttgctttaacctgaa

SEQ ID NO: 308113 - DNA, 936 bp, Homo sapiens
cccgcttcagagcagtttctcacaatagcaagtgctgcagctgacaaaattcctgggttactaggtgtctttcagaagctgattgcatccaaagcaaatgaccaccaaggtttttatcttctaaacagtataatagagcacatgcctcctgaatcagttgaccaatataggaaacaaatcttcattctgctattccagagacttcagaattccaaaacaaccaagtttatcaagagttttttagtctttattaatttgtattgcataaaatatggggcactagcactacaagaaatatttgatggtatacaaccaaaaatgtttggaatggttttggaaaaaattattattcctgaaattcagaaggtatctggaaatgtagagaaaaagatctgtgcggttggcataaccaaattactaacagaatgtcccccaatgatggacactgagtataccaaactgtggactccattattacagtctttgattggtctttttgagttacccgaagatgataccattcctgatgaggaacattttattgacatagaagatacaccaggatatcagactgccttctcacagttggcatttgctgggaaaaaagagcatgatcctgtaggtcaaatggtgaataaccccaaaattcacctggcacagtcacttcacaagttgtctaccgcctgtccaggaagggttccatcaatggtgagcaccagcctgaatgcagaagcgctccagtatctccaagggtaccttcaggcagccagtgtgacactgctttaaactgcatttttctaatgggctaaacccagatggtttcctaggaaatcacaggcttctgagcacagctgcattaaaacaaaggaagttctccttttgaacttgtcacgaattccatcttgtaaaggatattaaatgttgctttaacctgaa

SEQ ID NO: 308114 - DNA, 686 bp, Homo sapiens
ctactactactaaattcgcggcctgctcgacagcactacaagaaatatttgatggtatacaaccaaaaatgtttggaatggttttggaaaaaattattattcctgaaattcagaaggtatctggaaatgtagagaaaaagatctgtgcggttggcataaccaaattactaacagaatgtcccccaatgatggacactgagtataccaaactgtggactccattattacagtctttgattggtctttttgagttacccgaagatgataccattcctgatgaggaacattttattgacatagaagatacaccaggatatcagactgccttctcacagttggcatttgctgggaaaaaagagcatgatcctgtaggtcaaatggtgaataaccccaaaattcacctggcacagtcacttcacaagttgtctaccgcctgtccaggaagggttccatcaatggtgagcaccagcctgaatgcagaagcgctccagtatctccaagggtaccttcaggcagccagtgtgacactgctttaaactgcatttttctaatgggctaaacccagatggtttcctaggaaatcacaggcttctgagcacagctgcattaaaacaaaggaagttctccttttgaacttgtcacgaattccatcttgtaaaggatattaaatgttgctttaacctgaa

SEQ ID NO: 308115 - DNA, 2477 bp, Homo sapiens
gcattcctggccccgccccctgcagcgggccgctcgctcatgcgctctggcctcaggctcgctgtcgcgccattttgccggggtttgaatgtgaggcggagcggcggcaggagcgggtagtgccagctacggtccgcggctggggttccctcctccgtttctgtatccccacgagatcctatagcaatggaactcagcgatgcaaatctgcaaacactaacagaatatttaaagaaaacacttgatcctgatcctgccatccgacgtccagctgagaaatttcttgaatctgttgaaggaaatcagaattatccactgttgcttttgacattactggagaagtcccaggataatgttatcaaagtatgtgcttcagtaacattcaaaaactatattaaaaggaactggagaattgttgaagatgaaccaaacaaaatttgtgaagccgatcgagtggccattaaagccaacatagtgcacttgatgcttagcagcccagagcaaattcagaagcagttaagtgatgcaattagcattattggcagagaagattttccacagaaatggcctgacttgctgacagaaatggtgaatcgctttcagagtggagatttccatgttattaatggagtcctccgtacagcacattcattatttaaaagataccgtcatgaatttaagtcaaacgagttatggactgaaattaagcttgttctggatgcctttgctttgcctttgactaatctttttaaggtatggaatgcatcttggtgatatttttaaattaatattttaaattgcttgaatgtttgtatacatgttaagagaatgctttgaaagcttatttgatagataatgtttagagcatttcttttgaaaaatttcaaacctacacagaaatagagatgctatagtgaactcccatctattattacacaaatttaatggttagcaacgttttattttctctgttccctttcttaggaatgttataaaagcaaatcccaagcatcatatcatttcacccaagtattttaaagtatgtgtctctaaaggaagaaatacatatttttatttgactatgtttggagtttaattaattatatatttatacattattttacagtttacaggatactttcctgaatgtgttcttggtgtttgtgaaaatcctataagattaaagaaatatatatatactttttttcttttttcttttttaaagacagggtctcactctcattgcccaggctggagtgcatgagctattacagtgccactgcaatccagcctgggcaacagagcgaggtcccgtttcttaaaaaacatatatgtgtgtggcgtgtgtatatatatgtatatatattttttcattgtattattacggagactttcaaacatatatagaaagagcataatgaagcctgcatgtgcccagcttcaataattaccaatatcttgccagttttgtttcgtttctccttttattctctgtattgagcaagtcttagacatcatacgtttcacgcgtaagtaccttattctacatcattaaccagtaaggactttttaattaaccacaataccactatcacacctaataatagtaattccttatggatcttttctttagacctatttttgaaggcataaaagcagttgagtttctggagaatttttggatggtgattaatgacttgactggctgctcttcccagagctgtggcagctctcccgtagaagatggggtttgtattggcgcaccaagatctccaacagccagtgtgtgtttcccatctcttgtaggttccatcaatggtgagcaccagcctgaatgcagaagcgctccagtatctccaagggtaccttcaggcagccagtgtgacactgctttaaactgcatttttctaatgggctaaacccagatggtttcctaggaaatcacaggcttctgagcacagctgcattaaaacaaaggaagttctccttttgaacttgtcacgaattccatcttgtaaaggatattaaatgttgctttaacctgaaccttgagcaaattagttggtttgtgtgatcatacagttatgtgggtggcttctagtttgcaacttcaagggacaagtattaatagttcagtgtatggcgttggtttgtgttgagcgtttgcacggtttggataatcttaaattttgacggacactgtggagactttctgttactaaatccttttgttttgaagctgttgctatttgtatttctcttgtcctttatattttttgtctgtttatttacgcttttattggaaatgtgaataagtaaagaattacttgtgttacttgccaagcagtgcacatttcatagtttcaaatctgtaatcagcaataaaaatcctaaaatatgtacctaagaacatcttaagggcaggttttcagtgctctctcatgcttttataaaaatgaagaatttctttaaatttc

SEQ ID NO: 308116 - DNA, 2046 bp, Homo sapiens
gcattcctggccccgccccctgcagcgggccgctcgctcatgcgctctggcctcaggctcgctgtcgcgccattttgccggggtttgaatgtgaggcggagcggcggcaggagcgggtagtgccagctacggtccgcggctggggttccctcctccgtttctgtatccccacgagatcctatagcaatggaactcagcgatgcaaatctgcaaacactaacagaatatttaaagaaaacacttgatcctgatcctgccatccgacgtccagctgagaaatttcttgaatctgttgaaggaaatcagaattatccactgttgcttttgacattactggagaagtcccaggataatgttatcaaagtatgtgcttcagtaacattcaaaaactatattaaaaggaactggagaattgttgaagatgaaccaaacaaaatttgtgaagccgatcgagtggccattaaagccaacatagtgcacttgatgcttagcagcccagagcaaattcagaagcagttaagtgatgcaattagcattattggcagagaagattttccacagaaatggcctgacttgctgacagaaatggtgaatcgctttcagagtggagatttccatgttattaatggagtcctccgtacagcacattcattatttaaaagataccgtcatgaatttaagtcaaacgagttatggactgaaattaagcttgttctggatgcctttgctttgcctttgactaatctttttaaggtatggaatgcatcttggtgatatttttaaattaatattttaaattgcttgaatgtttgtatacatgttaagagaatgctttgaaagcttatttgatagataatgtttagagcatttcttttgaaaaatttcaaacctacacagaaatagagatgctatagtgaactcccatctattattacacaaatttaatggttagcaacgttttattttctctgttccctttcttaggaatgttataaaagcaaatcccaagcatcatatcatttcacccaagtattttaaagtatgtgtctctaaaggaagaaatacatatttttatttgactatgtttggagtttaattaattatatatttatacattattttacagtttacaggatactttcctgaatgtgttcttggtgtttgtgaaaatcctataagattaaagaaatatatatatactttttttcttttttcttttttaaagacagggtctcactctcattgcccaggctggagtgcatgagctattacagtgccactgcaatccagcctgggcaacagagcgaggtcccgtttcttaaaaaacatatatgtgtgtggcgtgtgtatatatatgtatatatattttttcattgtattattacggagactttcaaacatatatagaaagagcataatgaagcctgcatgtgcccagcttcaataattaccaatatcttgccagttttgtttcgtttctccttttattctctgtattgagcaagtcttagacatcatacgtttcacgcgtaagtaccttattctacatcattaaccagtaaggactttttaattaaccacaataccactatcacacctaataatagtaattccttatggatcttttctttagacctatttttgaaggcataaaagcagttgagtttctggagaatttttggatggtgattaatgacttgactggctgctcttcccagagctgtggcagctctcccgtagaagatggggtttgtattggcgcaccaagatctccaacagccagtgtgtgtttcccatctcttgtaggttccatcaatggtgagcaccagcctgaatgcagaagcgctccagtatctccaagggtaccttcaggcagccagtgtgacactgctttaaactgcatttttctaatgggctaaacccagatggtttcctaggaaatcacaggcttctgagcacagctgcattaaaacaaaggaagttctccttttgaacttgtcacgaattccatcttgtaaaggatattaaatgttgctttaacctgaa

SEQ ID NO: 308117 - DNA, 835 bp, Homo sapiens
ctccggtcgttctagaggatcctaataatggagtcacagtttggtatactcagtgtcaccattgggcacattctgttagtaattggttatgccaaccggagagtcacttcacaagttgtctaccgcctgtccaggaaggacctatttttgaaggcataaaagcagttccatcaatggtgagcaccagcctgaatgcagaagcgctccagtatctccaagggtaccttcaggcagccagtgtgacactgctttaaactgcatttttctaatgggctaaacccagatggtttcctaggaaatcacaggcttctgagcacagctgcattaaaacaaaggaagttctccttttgaacttgtcacgaattccatcttgtaaaggatattaaatgttgctttaacctgaaccttgagcaaattagttggtttgtgtgatcatacagttatgtgggtggcttctagtttgcaacttcaagggacaagtattaatagttcagtgtatggcgttggtttgtgttgagcgtttgcacggtttggataatcttaaattttgacggacactgtggagactttctgttactaaatccttttgttttgaagctgttgctatttgtatttctcttgtcctttatattttttgtctgtttatttacgcttttattggaaatgtgaataagtaaagaattacttgtgttacttgccaagcagtgcacatttcatagtttcaaatctgtaatcagcaataaaaatcctaaaatatgtacctaagaacatcttaagggcaggttttcagtgctctctcatgcttttataaaaatgaagaatttctttaaatttc

SEQ ID NO: 308118 - DNA, 654 bp, Homo sapiens
gcattcctggccccgccccctgcagcgggccgctcgctcatgcgctctggcctcaggctcgctgtcgcgccattttgccggggtttgaatgtgaggcggagcggcggcaggagcgggtagtgccagctacggtccgcggctggggttccctcctccgtttctgtatccccacgagatcctatagcaatggaactcagcgatgcaaatctgcaaacactaacagaatatttaaagaaaacacttgatcctgatcctgccatccgacgtccagctgagaaatttcttgaatctgttgaaggaaatcagaattatccactgttgcttttgacattactggagaagtcccaggataatgttatcaaagtatgtgcttcagtaacattcaaaaactatattaaaaggaactggagaattgttccatcaatggtgagcaccagcctgaatgcagaagcgctccagtatctccaagggtaccttcaggcagccagtgtgacactgctttaaactgcatttttctaatgggctaaacccagatggtttcctaggaaatcacaggcttctgagcacagctgcattaaaacaaaggaagttctccttttgaacttgtcacgaattccatcttgtaaaggatattaaatgttgctttaacctgaa

SEQ ID NO: 308119 - DNA, 653 bp, Homo sapiens
tttagttgatgggcgagaaagtgctgtgggatgaaagttagatttactgccgatgaatatgatagtgaaatggattttggcgtaggtttggtctagggtgtagcctgagaataggggggccattcaacgcctccgtttctgtatcccacgagatcctatagcaatggaactcagcgatgcaaatctgcaaacactaacagaatatttaaagaaaacacttgatcctgatcctgccatccgacgtccaggtaaagaaaataaacgttttttggttgattaattccttcaggacaggtgagagaaacctatgtattatctgcctccttataaatatatttaaaaaaattcatacttgggttctcaagcgtagtttataagtgttacagctgctataccatggtgtgttgtttcttttttgagtaaaatagcttttatttggcatcttctgggattaaaaagtactagttttcggataaaaagtactgacatgtttagaatgctttgtctttgaccttttccaaaatacccacttaaaacatgcctgctttaggccggatgcggtggctcacacctgtaatcccagcactttgggaggctgaggcaggagaattgcttgaatccaggaagcggaggttgcagttaaccgaggccac

SEQ ID NO: 308120 - DNA, 345 bp, Homo sapiens
gagttacagcaagcttattttctttaattaaaaacactgagccctttttttcttgtattatgtactacaaatatattttaagtgaatggatttaggagtgagaacaaaggaggaaaaatcccttcaatagaaatgtaataaggctgtatagttgcattttgtcagcactttataataagagtttatttcccagatcgaagtaatccatctattattaaaatgtggtagcatttttttatttttatttttatttatttatttttttagacagggtctcactcttatccaggctggaatgcagtagtacgattatggctcactgcagcctcaacctcccaggttcaa

SEQ ID NO: 308121 - DNA, 757 bp, Homo sapiens
taaactcatagtggtagggaaagcattccccaaaaggaaattgggttgttttagctagaataggagatgaacagcccaaaaggacatgtcccacatcagtgttcagctggatagcagtttgagaagttcttacttaaatgagtactactatttttgcttacaccttttgaattctgagaagtcaggtttaatgaagctcttgagaacttgtctggcagggagaccaaggaaagaggcataatctaccctcaggggacttgtaccctcattaagaaggcagtactatgccacaagaaatcagtaactaaaagacaattagtttatctgccttggtggtcatcttacaataaacgtagttcagaaaagaaaggggatgtattagtatgcactgagcttgagctttgtaaggaaagtcttcatatagtcttagctgaaccttgaaggaagatttagattaggatgagaactagaggtggcatcatttatagcatacaaacagaggcagaagtcagaatgctttatgcagctgccagatgtagctggagcagagaattcttgtcagaataggtaatgctcaggctgtgaagcctgtgtataaaatgttttgtccacgtggtaagggaacttataaaagtggtgttcttaatattttaatcaaaagtttcaagtcagtgtttattctggatctccctgaattttttgaagataatatggaaacttggatgaataattttcatactctcttaacattggataa

SEQ ID NO: 308122 - DNA, 391 bp, Homo sapiens
gctcgctgtcgcgccattttgccggggtttgaatgtgaggcggagcggcggcaggagcgggtagtgccagctacggtccgcggctggggttccctcctccgtttctgtatccccacgaggtgaggcgcggggcgtgcacggcctaccagagtggctcttggggcccagctgaggaagggatgaggcgctcccggtactaacgagcgctagggagtgagaaccgcgcctctgggcgagagcggaatgtgggcccggggttcgggtggtgcgctcaggcaaggtcttcggcttccctagggagcgcttgccgcgcctcgcggcatcctaggtctctggcccaggtgcggcgaccccagggcctgtgagggctgagggcaactgaggcgcggcc

SEQ ID NO: 308123 - DNA, 533 bp, Homo sapiens
gatgaagaggaagccggcttattggagctcttaaaatcccagatttgtgataatgccgcactctatgcacaaaagtacgatgaagaattccagcgatacctgcctcgttttgttacagccatctggaatttactagttacaacgggtcaagaggttaaatatgatttggtaagatgatggtggagacaaataattaaaagacattctctccctatctcctccaagaaataagctgttgagttttgcttttaaaaatattcttgtttttgtgttttgttccagttggtaagtaatgcaattcaatttctggcttcagtttgtgagagacctcattataagaatctatttgaggaccagaacacgctgacaagtatctgtgaaaaggttattgtgcctaacatggaatttagaggtaattatggcaaaagtatattagtataaatctactaagtctgtgtttgttttttgtaacatattcagtctaattcatttattactggataaaacttgtatgtcatttatttcttattttc

SEQ ID NO: 308124 - DNA, 581 bp, Homo sapiens
tttttcagggggattcatggacccctttaagagtctgatctaggtgatctctaagacaattttatgacagaagcccaactaaactgacttatctttaaggggaagaactgaataagccaagaaaagaaccatcttaatttcaaaggtccccttttattcttgagactatgagtctgtaattttgtgtctctgagcaattgctggttttaagtcttccgagtattttcttgacctttttatctcttgctttcttccaatccaggactccattattacagtctttgattggtctttttgagttacccgaagatgataccattcctgatgaggaacattttattgacatagaagatacaccaggatatcagactgccttctcacagttggcatttgctgggaaaaaagagcatgatcctgtaggtcaaatggtgaataaccccaaaattcacctggcacagtcacttcacaagttgtctaccgcctgtccaggaagggtaagtgtgttgtcaaagaactctgtgataaatggagactttaatgggagggcaaaaggatagtagtagttctggtgtctgttttca

SEQ ID NO: 308125 - DNA, 504 bp, Homo sapiens
ctcatttgggggattatcagtaagtagacatagacattgaggcccacagaagttaaggctagtggcattactaggacttagtatttcttctctgcgagggcacgtgggcttaagacaagttacagctctgggatctgaggtttgtataagcaactctgtaactctgaagtatttttttcatggtggactttgggccatttaaaaaaaaattcaaatgaacaagcactagggtataattggtgtttttttcttaattttgatttttaaaaaataagatggcctctattttaaatgtgttttataaaggttaggtgtggattattagcataattaggttttttttttttaatttcagaacccaagcaaacctcactttaatcactacatgtttgaagcaatatgtttatccataagaataacttgcaaagctaaccctgctgctgttgtaaattttgaggaggctttgtttttggtgtttactgaaatcttacaaaatgatgtgca

SEQ ID NO: 308126 - DNA, 311 bp, Homo sapiens
tttttatctggtgtcccctagttcttctacttggggattttgtaaacaggtctgtgtatccttatttattaccacatatgaggttattttgtgtaggttataataatatatcttggttttttatctttccagaaggaaaaaagctaatgtcatacagatctgctttatcccctggctgttttaattggctttctctgaatcatttctgtttctgtcagtgctgctgtggtgtacccgattatatcaatgttacacacttgaattgatatgacatgtggctgatgtttcatgggtgaaatttaactctaggt

SEQ ID NO: 308127 - DNA, 390 bp, Homo sapiens
ttttttttttgagactgggtcttgctctgttgcccaggttagaatgcagtggtgcaattacagttcactgaagcctcaatttctcccacttcagcctcccaagtatctgagacctcaggcacgttgctaccatgcctggctaatcattttattattattattatttatagagatggggttgcatcatgttgcccaggctggtctcaaactcctgggctcaagcaatccaccagcctcagcctccaaaagtgctgggattacaggcgtgagtcactgtgcccagcccctccttgattttgatgaggaattcactgtcatttaaattggttttcccctataggtacagtatttttctgactactttcaattttttaaaatttatctttagtc

SEQ ID NO: 308128 - DNA, 1253 bp, Homo sapiens
ttttttttttttttttttttttaccctggatgatgattaccattgttgctaatagtttttatctaagtaagcctatgcttgatttctttcagaaaccatttcattggatatcattttttctaaggtttcatttctcccaagtttgtttttttcaataggatagtcagttgacaaaatgtttggcattcttatactatttattgtttacatttaaaattaggtgcaaacagctagtttctcaaatgacctcctaattgattttttttctttaagataaaagtattggttgaggcactggtttataagcatttgtggactttgcagccttatctttaaaaaaaaaaaaattaaaactgtggtccttaaatatcctgtctgaactttggattggaaggcacatttccctttgttattggctatgtagattagcttagaatctgtaagcatatagtgtggttaaatatgtatttcaacttttgttatctttgttgattacttgaataccctaaaaccaatggctgggaaaagatcattgccagactatgtcttcctgatggatctttcttcctgatgggtcttaatggttccagtcagtctgtggccagattcaggatgagataacattcaccatgtcctctctgtagggtttctcatgttttgtctttatcacctggtttctggagaagcagctgcagtctgagttatgataccacttgtggtgtatcagttgcttagggtggggaagaagtataggcttgtctgtattcctctgtgccgggagctggagtcaagattggaagtggaacctaagtgtcaagagttgacagtcatgtccttcctactggcaaaactcttctgagcccagtgggcatggtgggagctggtctcataacctttgtgactagagaaaggatctttttcttaaactatgctttatgagtttgtccctggagagctgcttcttgaagtgtcttggcgcttgcttcggaactttcttgagtaaattaagacattcataattgcaaacacaactctaaaaaatttgacagtaatatgatcagctagatcataccaaaagtaggacaacctagtttatagtttttaattgttgaattattagtgtatttcatctcgattaccttgttcctagagaagtttacttcagattatgctaatgtggttatacagagtcacttagatttttggaacaaatcttaaaccttatacagtgactacgttttaattaaaagaga

SEQ ID NO: 308129 - DNA, 498 bp, Homo sapiens
agtcttatttcaatatggtggtagattattattggcctgtgctgaattcttagaatataagggactcatctgataaaattttcttttctggttcaggtttaaacttatttttaaacgtttctacaagcaattctaaatatgcatataaagttgcaaatttttattagttttttttttttttttttttttaccctggatgatgattaccattgttgctaatagtttttatctaagtaagcctatgcttgatttctttcagaaaccatttcattggatatcattttttctaaggtttcatttctcccaagtttgtttttttcaataggatagtcagttgacaaaatgtttggcattcttatactatttattgtttacatttaaaattaggtgcaaacagctagtttctcaaatgacctcctaattgattttttttctttaagataaaagtattggttgaggcactggtttataagcatttgtggactttgcagccttatc

SEQ ID NO: 308130 - DNA, 2252 bp, Homo sapiens
gggggcgcgcgcgcgcgggcccgggagaggctcccgagccaggcggtcttcggtcctcgcagcgcttccagctccccgcgcccctatgtgagggagacggggaggcccgcggcgcgcaggggagggcgaggcatgtgcacgggccggagggtgctgcagccgcccgaggaagaggaggacggcggcgaggaggagagcggggggctcgcggcggcgggccccggccgaggggatgcagtggactgtgtgtgtctggctgtagcagacgcgaggcggcgacgaggcgccggggacccgcgcgaggggcggccgggaggcggcggcggcggccgccagaagtagcagcaggaccggcggcggcgacggcagccctgaaatgcattttcctctccagcggccatgttaaccaggaaaccttcggccgccgctcccgccgcctacccgaccgattggcggcagtaagcacacaatgaatgatcacctgcatgtcggcagccacgctcacggacagatccaggttcaacagttgtttgaggataacagtaacaagcggacagtgctcacgacacaaccaaatgggcttacaacagtgggcaaaacgggcttgccagtggtgccagagcggcagctggacagcattcatagacggcaggggagctccacctctctaaagtccatggaaggcatggggaaggtgaaagccacccccatgacacctgaacaagcaatgaagcaatacatgcaaaaactcacagccttcgaacaccatgagattttcagctaccctgaaatatatttcttgggtctaaatgctaagaagcgccagggcatgacaggtgggcccaacaatggtggctatgatgatgaccagggatcatatgtgcaggtgccccacgatcacgtggcttacaggtatgaggtcctcaaggtcattgggaaggggagctttgggcaggtggtcaaggcctacgatcacaaagtccaccagcacgtggccctaaagatggtgcggaatgagaagcgcttccaccggcaagcagcggaggagatccgaatcctggaacacctgcggaagcaggacaaggataacacaatgaatgtcatccatatgctggagaatttcaccttccgcaaccacatctgcatgacgtttgagctgctgagcatgaacctctatgagctcatcaagaagaataaattccagggcttcagtctgcctttggttcgcaagtttgcccactcgattctgcagtgcttggatgctttgcacaaaaacagaataattcactgtgaccttaagcccgagaacattttgttaaagcagcagggtagaagcggtattaaagtaattgattttggctccagttgttacgagcatcagcgtgtctacacgtacatccagtcgcgtttttaccgggctccagaagtgatccttggggccaggtatggcatgcccattgatatgtggagcctgggctgcattttagcagagctcctgacgggttaccccctcttgcctggggaagatgaaggggaccagctggcctgtatgattgaactgttgggcatgccctcacagaaactgctggatgcatccaaacgagccaaaaattttgtgagctccaagggttatccccgttactgcactgtcacgactctctcagatggctctgtggtcctaaacggaggccgttcccggagggggaaactgaggggcccaccggagagcagagagtgggggaacgcgctgaaggggtgtgatgatccccttttccttgacttcttaaaacagtgtttagagtgggatcctgcagtgcgcatgaccccaggccaggctttgcggcacccctggctgaggaggcggttgccaaagcctcccaccggggagaaaacgtcagtgaaaaggataactgagagcaccggtgctatcacatctatatccaagttacctccaccttctagctcagcttccaaactgaggactaatttggcgcagatgacagatgccaatgggaatattcagcagaggacagtgttgccaaaacttgttagctgagctcacgtcccctgatgctggtaacctgaaagatacgacattgctgagccttactgggttgaaaaggagtagctcagacctgtttttatttgctcaataactctactcatttgtatcttttcagcacttaattttaatgtaagaaagttgttcattttgtttttataaaatacatgaggacaatgctttaagtttt

SEQ ID NO: 308131 - DNA, 2314 bp, Homo sapiens
gggggcgcgcgcgcgcgggcccgggagaggctcccgagccaggcggtcttcggtcctcgcagcgcttccagctccccgcgcccctatgtgagggagacggggaggcccgcggcgcgcaggggagggcgaggcatgtgcacgggccggagggtgctgcagccgcccgaggaagaggaggacggcggcgaggaggagagcggggggctcgcggcggcgggccccggccgaggcggcggcggcggccgccagaagtagcagcaggaccggcggcggcgacggcagccctgaaatgcattttcctctccagcggccatgttaaccaggaaaccttcggccgccgctcccgccgcctacccgaccggccgaggtggggacagcgccgttcgtcagcttcaggcttccccggggctcggtgcaggggccacccggagcggagtggggactggcccgccctcccccatcgccctgccgcctctccgggccagcaacgctgccgccgcagcccacacgattggcggcagtaagcacacaatgaatgatcacctgcatgtcggcagccacgctcacggacagatccaggttcaacagttgtttgaggataacagtaacaagcggacagtgctcacgacacaaccaaatgggcttacaacagtgggcaaaacgggcttgccagtggtgccagagcggcagctggacagcattcatagacggcaggggagctccacctctctaaagtccatggaaggcatggggaaggtgaaagccacccccatgacacctgaacaagcaatgaagcaatacatgcaaaaactcacagccttcgaacaccatgagattttcagctaccctgaaatatatttcttgggtctaaatgctaagaagcgccagggcatgacaggtgggcccaacaatggtggctatgatgatgaccagggatcatatgtgcaggtgccccacgatcacgtggcttacaggtatgaggtcctcaaggtcattgggaaggggagctttgggcaggtggtcaaggcctacgatcacaaagtccaccagcacgtggccctaaagatggtgcggaatgagaagcgcttccaccggcaagcagcggaggagatccgaatcctggaacacctgcggaagcaggacaaggataacacaatgaatgtcatccatatgctggagaatttcaccttccgcaaccacatctgcatgacgtttgagctgctgagcatgaacctctatgagctcatcaagaagaataaattccagggcttcagtctgcctttggttcgcaagtttgcccactcgattctgcagtgcttggatgctttgcacaaaaacagaataattcactgtgaccttaagcccgagaacattttgttaaagcagcagggtagaagcggtattaaagtaattgattttggctccagttgttacgagcatcagcgtgtctacacgtacatccagtcgcgtttttaccgggctccagaagtgatccttggggccaggtatggcatgcccattgatatgtggagcctgggctgcattttagcagagctcctgacgggttaccccctcttgcctggggaagatgaaggggaccagctggcctgtatgattgaactgttgggcatgccctcacagaaactgctggatgcatccaaacgagccaaaaattttgtgagctccaagggttatccccgttactgcactgtcacgactctctcagatggctctgtggtcctaaacggaggccgttcccggagggggaaactgaggggcccaccggagagcagagagtgggggaacgcgctgaaggggtgtgatgatccccttttccttgacttcttaaaacagtgtttagagtgggatcctgcagtgcgcatgaccccaggccaggctttgcggcacccctggctgaggaggcggttgccaaagcctcccaccggggagaaaacgtcagtgaaaaggataactgagagcaccggtgctatcacatctatatccaagttacctccaccttctagctcagcttccaaactgaggactaatttggcgcagatgacagatgccaatgggaatattcagcagaggacagtgttgccaaaacttgttagctgagctcacgtcccctgatgctggtaacctgaaagatacgacattgctgagccttactgggttgaaaaggagtagctcagacctgtttttatttgctcaataactctactcatttgtatcttttcagcacttaattttaatgtaagaaagttgttcattttgtttttataaaatacatgaggacaatgctttaagtttt

SEQ ID NO: 308132 - DNA, 8900 bp, Homo sapiens
  misc_feature (7746)..(7746): n is a, c, g, or t
gggggcgcgcgcgcgcgggcccgggagaggctcccgagccaggcggtcttcggtcctcgcagcgcttccagctccccgcgcccctatgtgagggagacggggaggcccgcggcgcgcaggggagggcgaggcatgtgcacgggccggagggtgctgcagccgcccgaggaagaggaggacggcggcgaggaggagagcggggggctcgcggcggcgggccccggccgaggggatgcagtggactgtgtgtgtctggctgtagcagacgcgaggcggcgacgaggcgccggggacccgcgcgaggggcggccgggaggcggcggcggcggccgccagaagtagcagcaggaccggcggcggcgacggcagccctgaaatgcattttcctctccagcggccatgttaaccaggaaaccttcggccgccgctcccgccgcctacccgaccggccgaggtggggacagcgccgttcgtcagcttcaggcttccccggggctcggtgcaggggccacccggagcggagtggggactggcccgccctcccccatcgccctgccgcctctccgggccagcaacgctgccgccgcagcccacacgattggcggcagtaagcacacaatgaatgatcacctgcatgtcggcagccacgctcacggacagatccaggttcaacagttgtttgaggataacagtaacaagcggacagtgctcacgacacaaccaaatgggcttacaacagtgggcaaaacgggcttgccagtggtgccagagcggcagctggacagcattcatagacggcaggggagctccacctctctaaagtccatggaaggcatggggaaggtgaaagccacccccatgacacctgaacaagcaatgaagcaatacatgcaaaaactcacagccttcgaacaccatgagattttcagctaccctgaaatatatttcttgggtctaaatgctaagaagcgccagggcatgacaggtgggcccaacaatggtggctatgatgatgaccagggatcatatgtgcaggtgccccacgatcacgtggcttacaggtatgaggtcctcaaggtcattgggaaggggagctttgggcaggtggtcaaggcctacgatcacaaagtccaccagcacgtggccctaaagatggtgcggaatgagaagcgcttccaccggcaagcagcggaggagatccgaatcctggaacacctgcggaagcaggacaaggataacacaatgaatgtcatccatatgctggagaatttcaccttccgcaaccacatctgcatgacgtttgagctgctgagcatgaacctctatgagctcatcaagaagaataaattccagggcttcagtctgcctttggttcgcaagtttgcccactcgattctgcagtgcttggatgctttgcacaaaaacagaataattcactgtgaccttaagcccgagaacattttgttaaagcagcagggtagaagcggtattaaagtaattgattttggctccagttgttacgagcatcagcgtgtctacacgtacatccagtcgcgtttttaccgggctccagaagtgatccttggggccaggtatggcatgcccattgatatgtggagcctgggctgcattttagcagagctcctgacgggttaccccctcttgcctggggaagatgaaggggaccagctggcctgtatgattgaactgttgggcatgccctcacagaaactgctggatgcatccaaacgagccaaaaattttgtgagctccaagggttatccccgttactgcactgtcacgactctctcagatggctctgtggtcctaaacggaggccgttcccggagggggaaactgaggggcccaccggagagcagagagtgggggaacgcgctgaaggggtgtgatgatccccttttccttgacttcttaaaacagtgtttagagtgggatcctgcagtgcgcatgaccccaggccaggctttgcggcacccctggctgaggaggcggttgccaaagcctcccaccggggagaaaacgtcagtgaaaaggataactgagagcaccggtgctatcacatctatatccaagttacctccaccttctagctcagcttccaaactgaggactaatttggcgcagatgacagatgccaatgggaatattcagcagaggacagtgttgccaaaacttgttagctgagctcacgtcccctgatgctggtaacctgaaagatacgacattgctgagccttactgggttgaaaaggagtagctcagacctgtttttatttgctcaataactctactcatttgtatcttttcagcacttaattttaatgtaagaaagttgttcattttgtttttataaaatacatgaggacaatgctttaagtttttatactttcagaaactttttgtgttctaaaagtacaatgagccttactgtatttagtgtggcagaataataacatcagtggcaggccactgattacttcatgactgccacgcatttacagattggtgtcaaagacattcactatgtttttatggttcatgttatatcctccccagggtgacagccccttaaggccctccttttccctccatgctccaggtccatgcacaggtgtagcatgtcctgcttccgtttttcataaattaatctgggtgttgggggtagtgggaggagaacggtcagaatcaaagtgacattctaagaaaaactgtaccttagagattttcctctagtgctcaaacaaatacaaaataagatccccaaggtttaaactgcccagttagcattctgacattctaaaagccggcaaagcagcttttagtggataaatgggaatggaaacgtgtgtgttcctccaaattttctagtatgatcggtgagctgttttgtaaagaagcctcatattacagagttgcttttgcacctaaatttagaattgtattccatgaactgttcctcccttttctctgcttttctcctctctgttcctcttttaataccacacgtctgttgcttgcatttagtttgtcttcttccttcagctgtgtatcccagactgttaatacagaaaagagacatttcagctgtgattatgaccattgtttcatattccaattaaaaaaagaacagcagcctagctacttaaggtggggatttccatagttccaaagaagatttagcagattagagtgagttcacacttttcaggtgccactgtaaggttctctcagcctgggaaactatcaactctttctttaaaaagaaagagggttgaaaatcctctggacgaacagaagtcactttggctgttcagtaaggccaatgttaacaacacgtttagaggaggaaaagttcaacctcaagttaaatggtttgacttattcttcgtatcattagaagaaccccagagatagcattcctctattttattttactttcttttggattgcactgattgtttttgtgggaatgacactttatctggcaaagtaactgagagtttggtaaaagaatattttcttctctgaataataattattttcacagtgaaaatttcagtattttatcactaatgtatgagcaatgatctatatcaatttcaaggcacgtgaaaaaaattttttagtatgtgcaatttaatatagaaagatttctgcctgtttggacaataggttttgggtagtacagattaggataagtaagcttatatatgcacagagattattgtattacctgtaaattgatttacaagtacttaaaagcgtggtccccagtgaggccaagaaagtttccggttaagttctttaataataatcctacagtttatcttaagaaaaaaaaaaaggtttgaaaaaaacactttaatttaggcttcgttggttgatggtggaaaaaaatgctcaggaaatatttcagatatttgccaaaaaaccagtaataaggttaccttattaaaatagtgatatttgctttactatttaaggtgtcactgataaattaatttgtacttctgtgtttagaaattatagcttcttttcccttagtcaaattttttagcatattatacacatttctgtgtaatctgtggaagtgcaataatatgttagtaagttacattttaaataatgctcatgtgacaatactcccaatcaatggcttatagaatttaaagatctgtatattagattttggcttaaaggcatgagaagtataagacttggtttggtggctttgtaagaccaccagcctcttaatgatggttagcttctttaggtcattaaatcaataaaaacatataatgctgttttgctcttctaatgctcctcttccatttccagttatcttcacatttacatttaaatatacaaacctgagcctgccattattaatttccctataaaatgacgatacatgtgaacatttataaatggactaatactgcttgtctttcccccaccgcacaaaactggttcttaagatgccagcaatgaatttgagactatctttatttataaatggaaaccggaaacttttataccaaactataataatgtgcagcactgtagggcttttttttttttccctccaaatacagtgaaatttttttattcacaagagctgccacatctcagcatttagtaatagagctgctttaataaaattctagtttgattgtcatgtcaaaaaaagaaaaatgttgcatctttgtgattttaaaacataaattaatgaaggctctgataggctattaggagttggcttggaaacagtttttggtctcacaggttaccattgtttggggatgtctgagctgttttcagatctaggaatagcacagtgttgtcttgtctttggcagtctcatttggctctgtttcttgcaccaccagcatgttcattaccacttaaatatattgctacagcagtggaacaacagagtggtgcaagacactgtagattaacggtagaggagaaattgtgcccttagtgttaacaatgtgccttttgttctgaatgccatgttgtagggcatgcattttttggcctctttaactcttcgaattctagtcagtaagaatggaacccatctctgcaaagatacatctgtcttaaatatctagttacaggccttaatagaaaccataaggcatgactcatcttcaggcactgaaaaaagataaccatcaggtagtgttacacaaggacttcctatatttaaggggttaaagatggtctttgttgtatcttaacatcagactgatttttacattttttttttgttatgctaacactagacaaaaatcaactgtatttgtaaaaatttacctcaaaccatttaattttatagtgtgattaatcccagggcatttggtatgaaccaaagtgcattccttttatatgtgcctggctctagtaaggatggccagggatttttacaatttgggtgcaaggcacttaagccacttttaaacttaatgggtggtttggggtcgtgttaaatgactccatcagaatgttagaaaacactttaggcatcagtagcattgggccatattggaatcctaaagtgtgaattattttaaggagagcattcatttttgtaatttttttcatcaaaaatatttctggtaagcagaagactttttaaaaaaactgatctggtctcggtaaaggttttaatattgcccaacataatgctgtaatagcattaaaaaaagtatttgtgaactctgtttcttaggggcttgtacatctctctgctatggacatacataaaattaattgtaattatactcagctcaactgctacagttctgtctaggcagtggcttgggtttttatcgagcaacaacttagacacgtgactgtaatatgctgcaactgtgtgtactgaaaatatgtgaaaatggttgaatgtggactgtgtatatatgtatgtaaaaatttctgtgagatgctgctgtcgccacttaacattaaatatgttctagtggattttaatcctagtggccagttctatgatactgtatgtattatacagctgatgacaggagtaagactgtttagtgaatatctgttaaattttattgttgtggccagagataatttcagaataaaattttaatgtcctaccttacttctctcccctttctaactataatttaactcctgatctatttctggtattatcctttgtcaattagcctggagagggtttagaatgcaaaatggatagctctatatcagggtcttgagaagttaaaataattcattctactagtttgttcatagcaatactttattagttcaatataagtatgcagattccaagtggaaaaacaaaggttttagtaagtagttcttgcttttcccaggatattctattccttcacctgtcagatttttatgttaacttttttatatatagcctctgctgtgttctttattatgctagagcttcatatcttcttttattttaaccttcacaatgatagttaagctgggggagcagaacctgtcaattattccccaccagtcttcattcttttctctgcacaagttctggtaaattattctaatgtgctctaaccagttccacccaatgttttttaatgcttatgagtttgcagtttttgtacttggtggtctctgtggttcacatttttttgtgttgtagtgtctcctgcctcggttggctcagaaaataaggcctaggaactgcaattagctcatgatttgtcaagttcagttagtaccaagctaagagtttacttacagatgacagcaagcagatgctctagtaattcgtcagacattgcagggatattgtgtagtcagatattaccctcttgtggaaagaactacctcacatcattatttatttcccttctgttaccaacagccaaggaattacttagtgtggctccctgcatcaatactgggatatgcttaaacaagggaatgccataagagttcccaattgcctcgtcatagcctgggccatagatttttgttactgctaatcttgcttcttaaagttcacacccagtgcaaaaaacccaatcagcaaactaaccccaaaatccaatatatttagaaatgtaagtgttaagagatgtgcattatgtacaaaattgaaaattggtgctaaagtggcaatgtcaatttaaaatttcttgtccagatctgactgactgactcaggagattatagttcctactcattctctttccttttatcagatctttcaaaagcgctttttaaaattgatcaatgtgcaattctgtttgagtctctacagtcctatcccttttggaatgaacagctacacaaataaatattcttggaacttcgaagttgtcttcaaactagctctagaaaatgtccctagttgacattagtgttggtctgttagaaggggaaattgatttgactgcttcatgttttgaaaagagcattaagagggatttgaggaaggtatatgtggctttcttttttcttaagtttgaattacacttgatttcctttgggttattaggcagataaacccttgtcattagtaatacttagcactgtccaaaatgaaaaatgactgccagtgtgttgcacatacataagaaaattacatcttactgcgaagtctttggtttgtttccttatttggtttgactttgacttactattttgctatggtcatatccttaatatctgcggtacatttcatatntatatatggggtgggagcataattgccattcccatgtgtctcaaggaagcttaatgaggaaactaatgagttaatattaactcttctgaagaaagctgacattttaggagtattaagtcatctgtcgttaaggagcagcaagaatatattatgattgtatcacatgttccagaagagcattaccccttacatagaaagctccttggagatttcatgatgttggatgaacatcagtttatccttatacatccctatgagctataattatcctcatttgatacttgaggaaactgaagtgacttgctccaaagtgactacaaaaacattgcagtttgaggcttaggttgtaatcaggtaattttggtcttggacagtaagggaaaatccataatacataaaacacaaaagtttagaaagggggggaagttgagctagcaatgggcatttctattatttaagttacatatcagtttccaggaatatttttcaaatgggacaaactaaaaagttgaggactagagcatcgtagtgtctaagtgcacctaataacttaatgcatgtgcacacaccctcagttaatttgtaagagagtgacttctcattgttatttgtggagaggctaattatagtagcttcattctttattttctgtgttcttaaatttttttttacatttgaaagtatgaaaatactatttttgacactttactgatactcagggattaaaagttaaattttactgactgtagcagcaggtaaatctcttaaatttactcaggtttcctatcctttgcctccatatttaagaaaatatagaatgcctgccagggaaatatataaaaataaaaatttcaaatacaattttaaaataccaatttgtaaataaaccaatttacaaactaaaatattgtgtctttccttgctttttatcccaatttatctcccctcctaagtttgaggagttttatatattaaggctatttcttcatttgtaaaaatgaagtatgctatttgcaaagcaaaagcccatgaaaagccccaaatcatttaagtaaagcttactgaattgttttcaattgttttgggagaaatgtaactaattataagcaatttatgtggaccagcagcaaataaatgtatgagtacatttgggc

SEQ ID NO: 308133 - DNA, 8751 bp, Homo sapiens
  misc_feature (7597)..(7597): n is a, c, g, or t
gggggcgcgcgcgcgcgggcccgggagaggctcccgagccaggcggtcttcggtcctcgcagcgcttccagctccccgcgcccctatgtgagggagacggggaggcccgcggcgcgcaggggagggcgaggcatgtgcacgggccggagggtgctgcagccgcccgaggaagaggaggacggcggcgaggaggagagcggggggctcgcggcggcgggccccggccgaggggatgcagtggactgtgtgtgtctggctgtagcagacgcgaggcggcgacgaggcgccggggacccgcgcgaggggcggccgggaggcggcggcggcggccgccagaagtagcagcaggaccggcggcggcgacggcagccctgaaatgcattttcctctccagcggccatgttaaccaggaaaccttcggccgccgctcccgccgcctacccgaccgattggcggcagtaagcacacaatgaatgatcacctgcatgtcggcagccacgctcacggacagatccaggttcaacagttgtttgaggataacagtaacaagcggacagtgctcacgacacaaccaaatgggcttacaacagtgggcaaaacgggcttgccagtggtgccagagcggcagctggacagcattcatagacggcaggggagctccacctctctaaagtccatggaaggcatggggaaggtgaaagccacccccatgacacctgaacaagcaatgaagcaatacatgcaaaaactcacagccttcgaacaccatgagattttcagctaccctgaaatatatttcttgggtctaaatgctaagaagcgccagggcatgacaggtgggcccaacaatggtggctatgatgatgaccagggatcatatgtgcaggtgccccacgatcacgtggcttacaggtatgaggtcctcaaggtcattgggaaggggagctttgggcaggtggtcaaggcctacgatcacaaagtccaccagcacgtggccctaaagatggtgcggaatgagaagcgcttccaccggcaagcagcggaggagatccgaatcctggaacacctgcggaagcaggacaaggataacacaatgaatgtcatccatatgctggagaatttcaccttccgcaaccacatctgcatgacgtttgagctgctgagcatgaacctctatgagctcatcaagaagaataaattccagggcttcagtctgcctttggttcgcaagtttgcccactcgattctgcagtgcttggatgctttgcacaaaaacagaataattcactgtgaccttaagcccgagaacattttgttaaagcagcagggtagaagcggtattaaagtaattgattttggctccagttgttacgagcatcagcgtgtctacacgtacatccagtcgcgtttttaccgggctccagaagtgatccttggggccaggtatggcatgcccattgatatgtggagcctgggctgcattttagcagagctcctgacgggttaccccctcttgcctggggaagatgaaggggaccagctggcctgtatgattgaactgttgggcatgccctcacagaaactgctggatgcatccaaacgagccaaaaattttgtgagctccaagggttatccccgttactgcactgtcacgactctctcagatggctctgtggtcctaaacggaggccgttcccggagggggaaactgaggggcccaccggagagcagagagtgggggaacgcgctgaaggggtgtgatgatccccttttccttgacttcttaaaacagtgtttagagtgggatcctgcagtgcgcatgaccccaggccaggctttgcggcacccctggctgaggaggcggttgccaaagcctcccaccggggagaaaacgtcagtgaaaaggataactgagagcaccggtgctatcacatctatatccaagttacctccaccttctagctcagcttccaaactgaggactaatttggcgcagatgacagatgccaatgggaatattcagcagaggacagtgttgccaaaacttgttagctgagctcacgtcccctgatgctggtaacctgaaagatacgacattgctgagccttactgggttgaaaaggagtagctcagacctgtttttatttgctcaataactctactcatttgtatcttttcagcacttaattttaatgtaagaaagttgttcattttgtttttataaaatacatgaggacaatgctttaagtttttatactttcagaaactttttgtgttctaaaagtacaatgagccttactgtatttagtgtggcagaataataacatcagtggcaggccactgattacttcatgactgccacgcatttacagattggtgtcaaagacattcactatgtttttatggttcatgttatatcctccccagggtgacagccccttaaggccctccttttccctccatgctccaggtccatgcacaggtgtagcatgtcctgcttccgtttttcataaattaatctgggtgttgggggtagtgggaggagaacggtcagaatcaaagtgacattctaagaaaaactgtaccttagagattttcctctagtgctcaaacaaatacaaaataagatccccaaggtttaaactgcccagttagcattctgacattctaaaagccggcaaagcagcttttagtggataaatgggaatggaaacgtgtgtgttcctccaaattttctagtatgatcggtgagctgttttgtaaagaagcctcatattacagagttgcttttgcacctaaatttagaattgtattccatgaactgttcctcccttttctctgcttttctcctctctgttcctcttttaataccacacgtctgttgcttgcatttagtttgtcttcttccttcagctgtgtatcccagactgttaatacagaaaagagacatttcagctgtgattatgaccattgtttcatattccaattaaaaaaagaacagcagcctagctacttaaggtggggatttccatagttccaaagaagatttagcagattagagtgagttcacacttttcaggtgccactgtaaggttctctcagcctgggaaactatcaactctttctttaaaaagaaagagggttgaaaatcctctggacgaacagaagtcactttggctgttcagtaaggccaatgttaacaacacgtttagaggaggaaaagttcaacctcaagttaaatggtttgacttattcttcgtatcattagaagaaccccagagatagcattcctctattttattttactttcttttggattgcactgattgtttttgtgggaatgacactttatctggcaaagtaactgagagtttggtaaaagaatattttcttctctgaataataattattttcacagtgaaaatttcagtattttatcactaatgtatgagcaatgatctatatcaatttcaaggcacgtgaaaaaaattttttagtatgtgcaatttaatatagaaagatttctgcctgtttggacaataggttttgggtagtacagattaggataagtaagcttatatatgcacagagattattgtattacctgtaaattgatttacaagtacttaaaagcgtggtccccagtgaggccaagaaagtttccggttaagttctttaataataatcctacagtttatcttaagaaaaaaaaaaaggtttgaaaaaaacactttaatttaggcttcgttggttgatggtggaaaaaaatgctcaggaaatatttcagatatttgccaaaaaaccagtaataaggttaccttattaaaatagtgatatttgctttactatttaaggtgtcactgataaattaatttgtacttctgtgtttagaaattatagcttcttttcccttagtcaaattttttagcatattatacacatttctgtgtaatctgtggaagtgcaataatatgttagtaagttacattttaaataatgctcatgtgacaatactcccaatcaatggcttatagaatttaaagatctgtatattagattttggcttaaaggcatgagaagtataagacttggtttggtggctttgtaagaccaccagcctcttaatgatggttagcttctttaggtcattaaatcaataaaaacatataatgctgttttgctcttctaatgctcctcttccatttccagttatcttcacatttacatttaaatatacaaacctgagcctgccattattaatttccctataaaatgacgatacatgtgaacatttataaatggactaatactgcttgtctttcccccaccgcacaaaactggttcttaagatgccagcaatgaatttgagactatctttatttataaatggaaaccggaaacttttataccaaactataataatgtgcagcactgtagggcttttttttttttccctccaaatacagtgaaatttttttattcacaagagctgccacatctcagcatttagtaatagagctgctttaataaaattctagtttgattgtcatgtcaaaaaaagaaaaatgttgcatctttgtgattttaaaacataaattaatgaaggctctgataggctattaggagttggcttggaaacagtttttggtctcacaggttaccattgtttggggatgtctgagctgttttcagatctaggaatagcacagtgttgtcttgtctttggcagtctcatttggctctgtttcttgcaccaccagcatgttcattaccacttaaatatattgctacagcagtggaacaacagagtggtgcaagacactgtagattaacggtagaggagaaattgtgcccttagtgttaacaatgtgccttttgttctgaatgccatgttgtagggcatgcattttttggcctctttaactcttcgaattctagtcagtaagaatggaacccatctctgcaaagatacatctgtcttaaatatctagttacaggccttaatagaaaccataaggcatgactcatcttcaggcactgaaaaaagataaccatcaggtagtgttacacaaggacttcctatatttaaggggttaaagatggtctttgttgtatcttaacatcagactgatttttacattttttttttgttatgctaacactagacaaaaatcaactgtatttgtaaaaatttacctcaaaccatttaattttatagtgtgattaatcccagggcatttggtatgaaccaaagtgcattccttttatatgtgcctggctctagtaaggatggccagggatttttacaatttgggtgcaaggcacttaagccacttttaaacttaatgggtggtttggggtcgtgttaaatgactccatcagaatgttagaaaacactttaggcatcagtagcattgggccatattggaatcctaaagtgtgaattattttaaggagagcattcatttttgtaatttttttcatcaaaaatatttctggtaagcagaagactttttaaaaaaactgatctggtctcggtaaaggttttaatattgcccaacataatgctgtaatagcattaaaaaaagtatttgtgaactctgtttcttaggggcttgtacatctctctgctatggacatacataaaattaattgtaattatactcagctcaactgctacagttctgtctaggcagtggcttgggtttttatcgagcaacaacttagacacgtgactgtaatatgctgcaactgtgtgtactgaaaatatgtgaaaatggttgaatgtggactgtgtatatatgtatgtaaaaatttctgtgagatgctgctgtcgccacttaacattaaatatgttctagtggattttaatcctagtggccagttctatgatactgtatgtattatacagctgatgacaggagtaagactgtttagtgaatatctgttaaattttattgttgtggccagagataatttcagaataaaattttaatgtcctaccttacttctctcccctttctaactataatttaactcctgatctatttctggtattatcctttgtcaattagcctggagagggtttagaatgcaaaatggatagctctatatcagggtcttgagaagttaaaataattcattctactagtttgttcatagcaatactttattagttcaatataagtatgcagattccaagtggaaaaacaaaggttttagtaagtagttcttgcttttcccaggatattctattccttcacctgtcagatttttatgttaacttttttatatatagcctctgctgtgttctttattatgctagagcttcatatcttcttttattttaaccttcacaatgatagttaagctgggggagcagaacctgtcaattattccccaccagtcttcattcttttctctgcacaagttctggtaaattattctaatgtgctctaaccagttccacccaatgttttttaatgcttatgagtttgcagtttttgtacttggtggtctctgtggttcacatttttttgtgttgtagtgtctcctgcctcggttggctcagaaaataaggcctaggaactgcaattagctcatgatttgtcaagttcagttagtaccaagctaagagtttacttacagatgacagcaagcagatgctctagtaattcgtcagacattgcagggatattgtgtagtcagatattaccctcttgtggaaagaactacctcacatcattatttatttcccttctgttaccaacagccaaggaattacttagtgtggctccctgcatcaatactgggatatgcttaaacaagggaatgccataagagttcccaattgcctcgtcatagcctgggccatagatttttgttactgctaatcttgcttcttaaagttcacacccagtgcaaaaaacccaatcagcaaactaaccccaaaatccaatatatttagaaatgtaagtgttaagagatgtgcattatgtacaaaattgaaaattggtgctaaagtggcaatgtcaatttaaaatttcttgtccagatctgactgactgactcaggagattatagttcctactcattctctttccttttatcagatctttcaaaagcgctttttaaaattgatcaatgtgcaattctgtttgagtctctacagtcctatcccttttggaatgaacagctacacaaataaatattcttggaacttcgaagttgtcttcaaactagctctagaaaatgtccctagttgacattagtgttggtctgttagaaggggaaattgatttgactgcttcatgttttgaaaagagcattaagagggatttgaggaaggtatatgtggctttcttttttcttaagtttgaattacacttgatttcctttgggttattaggcagataaacccttgtcattagtaatacttagcactgtccaaaatgaaaaatgactgccagtgtgttgcacatacataagaaaattacatcttactgcgaagtctttggtttgtttccttatttggtttgactttgacttactattttgctatggtcatatccttaatatctgcggtacatttcatatntatatatggggtgggagcataattgccattcccatgtgtctcaaggaagcttaatgaggaaactaatgagttaatattaactcttctgaagaaagctgacattttaggagtattaagtcatctgtcgttaaggagcagcaagaatatattatgattgtatcacatgttccagaagagcattaccccttacatagaaagctccttggagatttcatgatgttggatgaacatcagtttatccttatacatccctatgagctataattatcctcatttgatacttgaggaaactgaagtgacttgctccaaagtgactacaaaaacattgcagtttgaggcttaggttgtaatcaggtaattttggtcttggacagtaagggaaaatccataatacataaaacacaaaagtttagaaagggggggaagttgagctagcaatgggcatttctattatttaagttacatatcagtttccaggaatatttttcaaatgggacaaactaaaaagttgaggactagagcatcgtagtgtctaagtgcacctaataacttaatgcatgtgcacacaccctcagttaatttgtaagagagtgacttctcattgttatttgtggagaggctaattatagtagcttcattctttattttctgtgttcttaaatttttttttacatttgaaagtatgaaaatactatttttgacactttactgatactcagggattaaaagttaaattttactgactgtagcagcaggtaaatctcttaaatttactcaggtttcctatcctttgcctccatatttaagaaaatatagaatgcctgccagggaaatatataaaaataaaaatttcaaatacaattttaaaataccaatttgtaaataaaccaatttacaaactaaaatattgtgtctttccttgctttttatcccaatttatctcccctcctaagtttgaggagttttatatattaaggctatttcttcatttgtaaaaatgaagtatgctatttgcaaagcaaaagcccatgaaaagccccaaatcatttaagtaaagcttactgaattgttttcaattgttttgggagaaatgtaactaattataagcaatttatgtggaccagcagcaaataaatgtatgagtacatttgggc

SEQ ID NO: 308134 - DNA, 6156 bp, Homo sapiens
gggggcgcgcgcgcgcgggcccgggagaggctcccgagccaggcggtcttcggtcctcgcagcgcttccagctccccgcgcccctatgtgagggagacggggaggcccgcggcgcgcaggggagggcgaggcatgtgcacgggccggagggtgctgcagccgcccgaggaagaggaggacggcggcgaggaggagagcggggggctcgcggcggcgggccccggccgaggggatgcagtggactgtgtgtgtctggctgtagcagacgcgaggcggcgacgaggcgccggggacccgcgcgaggggcggccgggaggcggcggcggcggccgccagaagtagcagcaggaccggcggcggcgacggcagccctgaaatgcattttcctctccagcggccatgttaaccaggaaaccttcggccgccgctcccgccgcctacccgaccggccgaggtggggacagcgccgttcgtcagcttcaggcttccccggggctcggtgcaggggccacccggagcggagtggggactggcccgccctcccccatcgccctgccgcctctccgggccagcaacgctgccgccgcagcccacacgattggcggcagtaagcacacaatgaatgatcacctgcatgtcggcagccacgctcacggacagatccaggttcaacagttgtttgaggataacagtaacaagcggacagtgctcacgacacaaccaaatgggcttacaacagtgggcaaaacgggcttgccagtggtgccagagcggcagctggacagcattcatagacggcaggggagctccacctctctaaagtccatggaaggcatggggaaggtgaaagccacccccatgacacctgaacaagcaatgaagcaatacatgcaaaaactcacagccttcgaacaccatgagattttcagctaccctgaaatatatttcttgggtctaaatgctaagaagcgccagggcatgacaggtgggcccaacaatggtggctatgatgatgaccagggatcatatgtgcaggtgccccacgatcacgtggcttacaggtatgaggtcctcaaggtcattgggaaggggagctttgggcaggtggtcaaggcctacgatcacaaagtccaccagcacgtggccctaaagatggtgcggaatgagaagcgcttccaccggcaagcagcggaggagatccgaatcctggaacacctgcggaagcaggacaaggataacacaatgaatgtcatccatatgctggagaatttcaccttccgcaaccacatctgcatgacgtttgagctgctgagcatgaacctctatgagctcatcaagaagaataaattccagggcttcagtctgcctttggttcgcaagtttgcccactcgattctgcagtgcttggatgctttgcacaaaaacagaataattcactgtgaccttaagcccgagaacattttgttaaagcagcagggtagaagcggtattaaagtaattgattttggctccagttgttacgagcatcagcgtgtctacacgtacatccagtcgcgtttttaccgggctccagaagtgatccttggggccaggtatggcatgcccattgatatgtggagcctgggctgcattttagcagagctcctgacgggttaccccctcttgcctggggaagatgaaggggaccagctggcctgtatgattgaactgttgggcatgccctcacagaaactgctggatgcatccaaacgagccaaaaattttgtgagctccaagggttatccccgttactgcactgtcacgactctctcagatggctctgtggtcctaaacggaggccgttcccggagggggaaactgaggggcccaccggagagcagagagtgggggaacgcgctgaaggggtgtgatgatccccttttccttgacttcttaaaacagtgtttagagtgggatcctgcagtgcgcatgaccccaggccaggctttgcggcacccctggctgaggaggcggttgccaaagcctcccaccggggagaaaacgtcagtgaaaaggataactgagagcaccggtgctatcacatctatatccaagttacctccaccttctagctcagcttccaaactgaggactaatttggcgcagatgacagatgccaatgggaatattcagcagaggacagtgttgccaaaacttgttagctgagctcacgtcccctgatgctggtaacctgaaagatacgacattgctgagccttactgggttgaaaaggagtagctcagacctgtttttatttgctcaataactctactcatttgtatcttttcagcacttaattttaatgtaagaaagttgttcattttgtttttataaaatacatgaggacaatgctttaagtttttatactttcagaaactttttgtgttctaaaagtacaatgagccttactgtatttagtgtggcagaataataacatcagtggcaggccactgattacttcatgactgccacgcatttacagattggtgtcaaagacattcactatgtttttatggttcatgttatatcctccccagggtgacagccccttaaggccctccttttccctccatgctccaggtccatgcacaggtgtagcatgtcctgcttccgtttttcataaattaatctgggtgttgggggtagtgggaggagaacggtcagaatcaaagtgacattctaagaaaaactgtaccttagagattttcctctagtgctcaaacaaatacaaaataagatccccaaggtttaaactgcccagttagcattctgacattctaaaagccggcaaagcagcttttagtggataaatgggaatggaaacgtgtgtgttcctccaaattttctagtatgatcggtgagctgttttgtaaagaagcctcatattacagagttgcttttgcacctaaatttagaattgtattccatgaactgttcctcccttttctctgcttttctcctctctgttcctcttttaataccacacgtctgttgcttgcatttagtttgtcttcttccttcagctgtgtatcccagactgttaatacagaaaagagacatttcagctgtgattatgaccattgtttcatattccaattaaaaaaagaacagcagcctagctacttaaggtggggatttccatagttccaaagaagatttagcagattagagtgagttcacacttttcaggtgccactgtaaggttctctcagcctgggaaactatcaactctttctttaaaaagaaagagggttgaaaatcctctggacgaacagaagtcactttggctgttcagtaaggccaatgttaacaacacgtttagaggaggaaaagttcaacctcaagttaaatggtttgacttattcttcgtatcattagaagaaccccagagatagcattcctctattttattttactttcttttggattgcactgattgtttttgtgggaatgacactttatctggcaaagtaactgagagtttggtaaaagaatattttcttctctgaataataattattttcacagtgaaaatttcagtattttatcactaatgtatgagcaatgatctatatcaatttcaaggcacgtgaaaaaaattttttagtatgtgcaatttaatatagaaagatttctgcctgtttggacaataggttttgggtagtacagattaggataagtaagcttatatatgcacagagattattgtattacctgtaaattgatttacaagtacttaaaagcgtggtccccagtgaggccaagaaagtttccggttaagttctttaataataatcctacagtttatcttaagaaaaaaaaaaaggtttgaaaaaaacactttaatttaggcttcgttggttgatggtggaaaaaaatgctcaggaaatatttcagatatttgccaaaaaaccagtaataaggttaccttattaaaatagtgatatttgctttactatttaaggtgtcactgataaattaatttgtacttctgtgtttagaaattatagcttcttttcccttagtcaaattttttagcatattatacacatttctgtgtaatctgtggaagtgcaataatatgttagtaagttacattttaaataatgctcatgtgacaatactcccaatcaatggcttatagaatttaaagatctgtatattagattttggcttaaaggcatgagaagtataagacttggtttggtggctttgtaagaccaccagcctcttaatgatggttagcttctttaggtcattaaatcaataaaaacatataatgctgttttgctcttctaatgctcctcttccatttccagttatcttcacatttacatttaaatatacaaacctgagcctgccattattaatttccctataaaatgacgatacatgtgaacatttataaatggactaatactgcttgtctttcccccaccgcacaaaactggttcttaagatgccagcaatgaatttgagactatctttatttataaatggaaaccggaaacttttataccaaactataataatgtgcagcactgtagggcttttttttttttccctccaaatacagtgaaatttttttattcacaagagctgccacatctcagcatttagtaatagagctgctttaataaaattctagtttgattgtcatgtcaaaaaaagaaaaatgttgcatctttgtgattttaaaacataaattaatgaaggctctgataggctattaggagttggcttggaaacagtttttggtctcacaggttaccattgtttggggatgtctgagctgttttcagatctaggaatagcacagtgttgtcttgtctttggcagtctcatttggctctgtttcttgcaccaccagcatgttcattaccacttaaatatattgctacagcagtggaacaacagagtggtgcaagacactgtagattaacggtagaggagaaattgtgcccttagtgttaacaatgtgccttttgttctgaatgccatgttgtagggcatgcattttttggcctctttaactcttcgaattctagtcagtaagaatggaacccatctctgcaaagatacatctgtcttaaatatctagttacaggccttaatagaaaccataaggcatgactcatcttcaggcactgaaaaaagataaccatcaggtagtgttacacaaggacttcctatatttaaggggttaaagatggtctttgttgtatcttaacatcagactgatttttacattttttttttgttatgctaacactagacaaaaatcaactgtatttgtaaaaatttacctcaaaccatttaattttatagtgtgattaatcccagggcatttggtatgaaccaaagtgcattccttttatatgtgcctggctctagtaaggatggccagggatttttacaatttgggtgcaaggcacttaagccacttttaaacttaatgggtggtttggggtcgtgttaaatgactccatcagaatgttagaaaacactttaggcatcagtagcattgggccatattggaatcctaaagtgtgaattattttaaggagagcattcatttttgtaatttttttcatcaaaaatatttctggtaagcagaagactttttaaaaaaactgatctggtctcggtaaaggttttaatattgcccaacataatgctgtaatagcattaaaaaaagtatttgtgaactctgtttcttaggggcttgtacatctctctgctatggacatacataaaattaattgtaattatactcagctcaactgctacagttctgtctaggcagtggcttgggtttttatcgagcaacaacttagacacgtgactgtaatatgctgcaactgtgtgtactgaaaatatgtgaaaatggttgaatgtggactgtgtatatatgtatgtaaaaatttctgtgagatgctgctgtcgccacttaacattaaatatgttctagtggattttaatcctagtggccagttctatgatactgtatgtattatacagctgatgacaggagtaagactgtttagtgaatatctgttaaattttattgttgtggccagagataatttcagaataaaattttaatgtcctacctta

SEQ ID NO: 308135 - DNA, 4702 bp, Homo sapiens
gggggcgcgcgcgcgcgggcccgggagaggctcccgagccaggcggtcttcggtcctcgcagcgcttccagctccccgcgcccctatgtgagggagacggggaggcccgcggcgcgcaggggagggcgaggcatgtgcacgggccggagggtgctgcagccgcccgaggaagaggaggacggcggcgaggaggagagcggggggctcgcggcggcgggccccggccgaggggatgcagtggactgtgtgtgtctggctgtagcagacgcgaggcggcgacgaggcgccggggacccgcgcgaggggcggccgggaggcggcggcggcggccgccagaagtagcagcaggaccggcggcggcgacggcagccctgaaatgcattttcctctccagcggccatgttaaccaggaaaccttcggccgccgctcccgccgcctacccgaccggccgaggtggggacagcgccgttcgtcagcttcaggcttccccggggctcggtgcaggggccacccggagcggagtggggactggcccgccctcccccatcgccctgccgcctctccgggccagcaacgctgccgccgcagcccacacgattggcggcagtaagcacacaatgaatgatcacctgcatgtcggcagccacgctcacggacagatccaggttcaacagttgtttgaggataacagtaacaagcggacagtgctcacgacacaaccaaatgggcttacaacagtgggcaaaacgggcttgccagtggtgccagagcggcagctggacagcattcatagacggcaggggagctccacctctctaaagtccatggaaggcatggggaaggtgaaagccacccccatgacacctgaacaagcaatgaagcaatacatgcaaaaactcacagccttcgaacaccatgagattttcagctaccctgaaatatatttcttgggtctaaatgctaagaagcgccagggcatgacaggtgggcccaacaatggtggctatgatgatgaccagggatcatatgtgcaggtgccccacgatcacgtggcttacaggtatgaggtcctcaaggtcattgggaaggggagctttgggcaggtggtcaaggcctacgatcacaaagtccaccagcacgtggccctaaagatggtgcggaatgagaagcgcttccaccggcaagcagcggaggagatccgaatcctggaacacctgcggaagcaggacaaggataacacaatgaatgtcatccatatgctggagaatttcaccttccgcaaccacatctgcatgacgtttgagctgctgagcatgaacctctatgagctcatcaagaagaataaattccagggcttcagtctgcctttggttcgcaagtttgcccactcgattctgcagtgcttggatgctttgcacaaaaacagaataattcactgtgaccttaagcccgagaacattttgttaaagcagcagggtagaagcggtattaaagtaattgattttggctccagttgttacgagcatcagcgtgtctacacgtacatccagtcgcgtttttaccgggctccagaagtgatccttggggccaggtatggcatgcccattgatatgtggagcctgggctgcattttagcagagctcctgacgggttaccccctcttgcctggggaagatgaaggggaccagctggcctgtatgattgaactgttgggcatgccctcacagaaactgctggatgcatccaaacgagccaaaaattttgtgagctccaagggttatccccgttactgcactgtcacgactctctcagatggctctgtggtcctaaacggaggccgttcccggagggggaaactgaggggcccaccggagagcagagagtgggggaacgcgctgaaggggtgtgatgatccccttttccttgacttcttaaaacagtgtttagagtgggatcctgcagtgcgcatgaccccaggccaggctttgcggcacccctggctgaggaggcggttgccaaagcctcccaccggggagaaaacgtcagtgaaaaggataactgagagcaccggtgctatcacatctatatccaagttacctccaccttctagctcagcttccaaactgaggactaatttggcgcagatgacagatgccaatgggaatattcagcagaggacagtgttgccaaaacttgttagctgagctcacgtcccctgatgctggtaacctgaaagatacgacattgctgagccttactgggttgaaaaggagtagctcagacctgtttttatttgctcaataactctactcatttgtatcttttcagcacttaattttaatgtaagaaagttgttcattttgtttttataaaatacatgaggacaatgctttaagtttttatactttcagaaactttttgtgttctaaaagtacaatgagccttactgtatttagtgtggcagaataataacatcagtggcaggccactgattacttcatgactgccacgcatttacagattggtgtcaaagacattcactatgtttttatggttcatgttatatcctccccagggtgacagccccttaaggccctccttttccctccatgctccaggtccatgcacaggtgtagcatgtcctgcttccgtttttcataaattaatctgggtgttgggggtagtgggaggagaacggtcagaatcaaagtgacattctaagaaaaactgtaccttagagattttcctctagtgctcaaacaaatacaaaataagatccccaaggtttaaactgcccagttagcattctgacattctaaaagccggcaaagcagcttttagtggataaatgggaatggaaacgtgtgtgttcctccaaattttctagtatgatcggtgagctgttttgtaaagaagcctcatattacagagttgcttttgcacctaaatttagaattgtattccatgaactgttcctcccttttctctgcttttctcctctctgttcctcttttaataccacacgtctgttgcttgcatttagtttgtcttcttccttcagctgtgtatcccagactgttaatacagaaaagagacatttcagctgtgattatgaccattgtttcatattccaattaaaaaaagaacagcagcctagctacttaaggtggggatttccatagttccaaagaagatttagcagattagagtgagttcacacttttcaggtgccactgtaaggttctctcagcctgggaaactatcaactctttctttaaaaagaaagagggttgaaaatcctctggacgaacagaagtcactttggctgttcagtaaggccaatgttaacaacacgtttagaggaggaaaagttcaacctcaagttaaatggtttgacttattcttcgtatcattagaagaaccccagagatagcattcctctattttattttactttcttttggattgcactgattgtttttgtgggaatgacactttatctggcaaagtaactgagagtttggtaaaagaatattttcttctctgaataataattattttcacagtgaaaatttcagtattttatcactaatgtatgagcaatgatctatatcaatttcaaggcacgtgaaaaaaattttttagtatgtgcaatttaatatagaaagatttctgcctgtttggacaataggttttgggtagtacagattaggataagtaagcttatatatgcacagagattattgtattacctgtaaattgatttacaagtacttaaaagcgtggtccccagtgaggccaagaaagtttccggttaagttctttaataataatcctacagtttatcttaagaaaaaaaaaaaggtttgaaaaaaacactttaatttaggcttcgttggttgatggtggaaaaaaatgctcaggaaatatttcagatatttgccaaaaaaccagtaataaggttaccttattaaaatagtgatatttgctttactatttaaggtgtcactgataaattaatttgtacttctgtgtttagaaattatagcttcttttcccttagtcaaattttttagcatattatacacatttctgtgtaatctgtggaagtgcaataatatgttagtaagttacattttaaataatgctcatgtgacaatactcccaatcaatggcttatagaatttaaagatctgtatattagattttggcttaaaggcatgagaagtataagacttggtttggtggctttgtaagaccaccagcctcttaatgatggttagcttctttaggtcattaaatcaataaaaacatataatgctgttttgctcttctaatgctcctcttccatttccagttatcttcacatttacatttaaatatacaaacctgagcctgccattattaatttccctataaaatgacgatacatgtgaacatttataaatggactaatactgcttgtctttcccccaccgcacaaaactggttcttaagatgccagcaatgaatttgagactatctttatttataaatggaaaccggaaacttttataccaaactataataatgtgcagcactgtagggcttttttttttttccctccaaatacagtgaaatttttttattcacaagagctgccacatctcagcatttagtaatagagctgctttaataaaattctagtttgattgtcatgtc

SEQ ID NO: 308136 - DNA, 8813 bp, Homo sapiens
  misc_feature (7659)..(7659): n is a, c, g, or t
gggggcgcgcgcgcgcgggcccgggagaggctcccgagccaggcggtcttcggtcctcgcagcgcttccagctccccgcgcccctatgtgagggagacggggaggcccgcggcgcgcaggggagggcgaggcatgtgcacgggccggagggtgctgcagccgcccgaggaagaggaggacggcggcgaggaggagagcggggggctcgcggcggcgggccccggccgaggcggcggcggcggccgccagaagtagcagcaggaccggcggcggcgacggcagccctgaaatgcattttcctctccagcggccatgttaaccaggaaaccttcggccgccgctcccgccgcctacccgaccggccgaggtggggacagcgccgttcgtcagcttcaggcttccccggggctcggtgcaggggccacccggagcggagtggggactggcccgccctcccccatcgccctgccgcctctccgggccagcaacgctgccgccgcagcccacacgattggcggcagtaagcacacaatgaatgatcacctgcatgtcggcagccacgctcacggacagatccaggttcaacagttgtttgaggataacagtaacaagcggacagtgctcacgacacaaccaaatgggcttacaacagtgggcaaaacgggcttgccagtggtgccagagcggcagctggacagcattcatagacggcaggggagctccacctctctaaagtccatggaaggcatggggaaggtgaaagccacccccatgacacctgaacaagcaatgaagcaatacatgcaaaaactcacagccttcgaacaccatgagattttcagctaccctgaaatatatttcttgggtctaaatgctaagaagcgccagggcatgacaggtgggcccaacaatggtggctatgatgatgaccagggatcatatgtgcaggtgccccacgatcacgtggcttacaggtatgaggtcctcaaggtcattgggaaggggagctttgggcaggtggtcaaggcctacgatcacaaagtccaccagcacgtggccctaaagatggtgcggaatgagaagcgcttccaccggcaagcagcggaggagatccgaatcctggaacacctgcggaagcaggacaaggataacacaatgaatgtcatccatatgctggagaatttcaccttccgcaaccacatctgcatgacgtttgagctgctgagcatgaacctctatgagctcatcaagaagaataaattccagggcttcagtctgcctttggttcgcaagtttgcccactcgattctgcagtgcttggatgctttgcacaaaaacagaataattcactgtgaccttaagcccgagaacattttgttaaagcagcagggtagaagcggtattaaagtaattgattttggctccagttgttacgagcatcagcgtgtctacacgtacatccagtcgcgtttttaccgggctccagaagtgatccttggggccaggtatggcatgcccattgatatgtggagcctgggctgcattttagcagagctcctgacgggttaccccctcttgcctggggaagatgaaggggaccagctggcctgtatgattgaactgttgggcatgccctcacagaaactgctggatgcatccaaacgagccaaaaattttgtgagctccaagggttatccccgttactgcactgtcacgactctctcagatggctctgtggtcctaaacggaggccgttcccggagggggaaactgaggggcccaccggagagcagagagtgggggaacgcgctgaaggggtgtgatgatccccttttccttgacttcttaaaacagtgtttagagtgggatcctgcagtgcgcatgaccccaggccaggctttgcggcacccctggctgaggaggcggttgccaaagcctcccaccggggagaaaacgtcagtgaaaaggataactgagagcaccggtgctatcacatctatatccaagttacctccaccttctagctcagcttccaaactgaggactaatttggcgcagatgacagatgccaatgggaatattcagcagaggacagtgttgccaaaacttgttagctgagctcacgtcccctgatgctggtaacctgaaagatacgacattgctgagccttactgggttgaaaaggagtagctcagacctgtttttatttgctcaataactctactcatttgtatcttttcagcacttaattttaatgtaagaaagttgttcattttgtttttataaaatacatgaggacaatgctttaagtttttatactttcagaaactttttgtgttctaaaagtacaatgagccttactgtatttagtgtggcagaataataacatcagtggcaggccactgattacttcatgactgccacgcatttacagattggtgtcaaagacattcactatgtttttatggttcatgttatatcctccccagggtgacagccccttaaggccctccttttccctccatgctccaggtccatgcacaggtgtagcatgtcctgcttccgtttttcataaattaatctgggtgttgggggtagtgggaggagaacggtcagaatcaaagtgacattctaagaaaaactgtaccttagagattttcctctagtgctcaaacaaatacaaaataagatccccaaggtttaaactgcccagttagcattctgacattctaaaagccggcaaagcagcttttagtggataaatgggaatggaaacgtgtgtgttcctccaaattttctagtatgatcggtgagctgttttgtaaagaagcctcatattacagagttgcttttgcacctaaatttagaattgtattccatgaactgttcctcccttttctctgcttttctcctctctgttcctcttttaataccacacgtctgttgcttgcatttagtttgtcttcttccttcagctgtgtatcccagactgttaatacagaaaagagacatttcagctgtgattatgaccattgtttcatattccaattaaaaaaagaacagcagcctagctacttaaggtggggatttccatagttccaaagaagatttagcagattagagtgagttcacacttttcaggtgccactgtaaggttctctcagcctgggaaactatcaactctttctttaaaaagaaagagggttgaaaatcctctggacgaacagaagtcactttggctgttcagtaaggccaatgttaacaacacgtttagaggaggaaaagttcaacctcaagttaaatggtttgacttattcttcgtatcattagaagaaccccagagatagcattcctctattttattttactttcttttggattgcactgattgtttttgtgggaatgacactttatctggcaaagtaactgagagtttggtaaaagaatattttcttctctgaataataattattttcacagtgaaaatttcagtattttatcactaatgtatgagcaatgatctatatcaatttcaaggcacgtgaaaaaaattttttagtatgtgcaatttaatatagaaagatttctgcctgtttggacaataggttttgggtagtacagattaggataagtaagcttatatatgcacagagattattgtattacctgtaaattgatttacaagtacttaaaagcgtggtccccagtgaggccaagaaagtttccggttaagttctttaataataatcctacagtttatcttaagaaaaaaaaaaaggtttgaaaaaaacactttaatttaggcttcgttggttgatggtggaaaaaaatgctcaggaaatatttcagatatttgccaaaaaaccagtaataaggttaccttattaaaatagtgatatttgctttactatttaaggtgtcactgataaattaatttgtacttctgtgtttagaaattatagcttcttttcccttagtcaaattttttagcatattatacacatttctgtgtaatctgtggaagtgcaataatatgttagtaagttacattttaaataatgctcatgtgacaatactcccaatcaatggcttatagaatttaaagatctgtatattagattttggcttaaaggcatgagaagtataagacttggtttggtggctttgtaagaccaccagcctcttaatgatggttagcttctttaggtcattaaatcaataaaaacatataatgctgttttgctcttctaatgctcctcttccatttccagttatcttcacatttacatttaaatatacaaacctgagcctgccattattaatttccctataaaatgacgatacatgtgaacatttataaatggactaatactgcttgtctttcccccaccgcacaaaactggttcttaagatgccagcaatgaatttgagactatctttatttataaatggaaaccggaaacttttataccaaactataataatgtgcagcactgtagggcttttttttttttccctccaaatacagtgaaatttttttattcacaagagctgccacatctcagcatttagtaatagagctgctttaataaaattctagtttgattgtcatgtcaaaaaaagaaaaatgttgcatctttgtgattttaaaacataaattaatgaaggctctgataggctattaggagttggcttggaaacagtttttggtctcacaggttaccattgtttggggatgtctgagctgttttcagatctaggaatagcacagtgttgtcttgtctttggcagtctcatttggctctgtttcttgcaccaccagcatgttcattaccacttaaatatattgctacagcagtggaacaacagagtggtgcaagacactgtagattaacggtagaggagaaattgtgcccttagtgttaacaatgtgccttttgttctgaatgccatgttgtagggcatgcattttttggcctctttaactcttcgaattctagtcagtaagaatggaacccatctctgcaaagatacatctgtcttaaatatctagttacaggccttaatagaaaccataaggcatgactcatcttcaggcactgaaaaaagataaccatcaggtagtgttacacaaggacttcctatatttaaggggttaaagatggtctttgttgtatcttaacatcagactgatttttacattttttttttgttatgctaacactagacaaaaatcaactgtatttgtaaaaatttacctcaaaccatttaattttatagtgtgattaatcccagggcatttggtatgaaccaaagtgcattccttttatatgtgcctggctctagtaaggatggccagggatttttacaatttgggtgcaaggcacttaagccacttttaaacttaatgggtggtttggggtcgtgttaaatgactccatcagaatgttagaaaacactttaggcatcagtagcattgggccatattggaatcctaaagtgtgaattattttaaggagagcattcatttttgtaatttttttcatcaaaaatatttctggtaagcagaagactttttaaaaaaactgatctggtctcggtaaaggttttaatattgcccaacataatgctgtaatagcattaaaaaaagtatttgtgaactctgtttcttaggggcttgtacatctctctgctatggacatacataaaattaattgtaattatactcagctcaactgctacagttctgtctaggcagtggcttgggtttttatcgagcaacaacttagacacgtgactgtaatatgctgcaactgtgtgtactgaaaatatgtgaaaatggttgaatgtggactgtgtatatatgtatgtaaaaatttctgtgagatgctgctgtcgccacttaacattaaatatgttctagtggattttaatcctagtggccagttctatgatactgtatgtattatacagctgatgacaggagtaagactgtttagtgaatatctgttaaattttattgttgtggccagagataatttcagaataaaattttaatgtcctaccttacttctctcccctttctaactataatttaactcctgatctatttctggtattatcctttgtcaattagcctggagagggtttagaatgcaaaatggatagctctatatcagggtcttgagaagttaaaataattcattctactagtttgttcatagcaatactttattagttcaatataagtatgcagattccaagtggaaaaacaaaggttttagtaagtagttcttgcttttcccaggatattctattccttcacctgtcagatttttatgttaacttttttatatatagcctctgctgtgttctttattatgctagagcttcatatcttcttttattttaaccttcacaatgatagttaagctgggggagcagaacctgtcaattattccccaccagtcttcattcttttctctgcacaagttctggtaaattattctaatgtgctctaaccagttccacccaatgttttttaatgcttatgagtttgcagtttttgtacttggtggtctctgtggttcacatttttttgtgttgtagtgtctcctgcctcggttggctcagaaaataaggcctaggaactgcaattagctcatgatttgtcaagttcagttagtaccaagctaagagtttacttacagatgacagcaagcagatgctctagtaattcgtcagacattgcagggatattgtgtagtcagatattaccctcttgtggaaagaactacctcacatcattatttatttcccttctgttaccaacagccaaggaattacttagtgtggctccctgcatcaatactgggatatgcttaaacaagggaatgccataagagttcccaattgcctcgtcatagcctgggccatagatttttgttactgctaatcttgcttcttaaagttcacacccagtgcaaaaaacccaatcagcaaactaaccccaaaatccaatatatttagaaatgtaagtgttaagagatgtgcattatgtacaaaattgaaaattggtgctaaagtggcaatgtcaatttaaaatttcttgtccagatctgactgactgactcaggagattatagttcctactcattctctttccttttatcagatctttcaaaagcgctttttaaaattgatcaatgtgcaattctgtttgagtctctacagtcctatcccttttggaatgaacagctacacaaataaatattcttggaacttcgaagttgtcttcaaactagctctagaaaatgtccctagttgacattagtgttggtctgttagaaggggaaattgatttgactgcttcatgttttgaaaagagcattaagagggatttgaggaaggtatatgtggctttcttttttcttaagtttgaattacacttgatttcctttgggttattaggcagataaacccttgtcattagtaatacttagcactgtccaaaatgaaaaatgactgccagtgtgttgcacatacataagaaaattacatcttactgcgaagtctttggtttgtttccttatttggtttgactttgacttactattttgctatggtcatatccttaatatctgcggtacatttcatatntatatatggggtgggagcataattgccattcccatgtgtctcaaggaagcttaatgaggaaactaatgagttaatattaactcttctgaagaaagctgacattttaggagtattaagtcatctgtcgttaaggagcagcaagaatatattatgattgtatcacatgttccagaagagcattaccccttacatagaaagctccttggagatttcatgatgttggatgaacatcagtttatccttatacatccctatgagctataattatcctcatttgatacttgaggaaactgaagtgacttgctccaaagtgactacaaaaacattgcagtttgaggcttaggttgtaatcaggtaattttggtcttggacagtaagggaaaatccataatacataaaacacaaaagtttagaaagggggggaagttgagctagcaatgggcatttctattatttaagttacatatcagtttccaggaatatttttcaaatgggacaaactaaaaagttgaggactagagcatcgtagtgtctaagtgcacctaataacttaatgcatgtgcacacaccctcagttaatttgtaagagagtgacttctcattgttatttgtggagaggctaattatagtagcttcattctttattttctgtgttcttaaatttttttttacatttgaaagtatgaaaatactatttttgacactttactgatactcagggattaaaagttaaattttactgactgtagcagcaggtaaatctcttaaatttactcaggtttcctatcctttgcctccatatttaagaaaatatagaatgcctgccagggaaatatataaaaataaaaatttcaaatacaattttaaaataccaatttgtaaataaaccaatttacaaactaaaatattgtgtctttccttgctttttatcccaatttatctcccctcctaagtttgaggagttttatatattaaggctatttcttcatttgtaaaaatgaagtatgctatttgcaaagcaaaagcccatgaaaagccccaaatcatttaagtaaagcttactgaattgttttcaattgttttgggagaaatgtaactaattataagcaatttatgtggaccagcagcaaataaatgtatgagtacatttgggc

SEQ ID NO: 308137 - DNA, 4955 bp, Homo sapiens
gggggcgcgcgcgcgcgggcccgggagaggctcccgagccaggcggtcttcggtcctcgcagcgcttccagctccccgcgcccctatgtgagggagacggggaggcccgcggcgcgcaggggagggcgaggcatgtgcacgggccggagggtgctgcagccgcccgaggaagaggaggacggcggcgaggaggagagcggggggctcgcggcggcgggccccggccgaggggatgcagtggactgtgtgtgtctggctgtagcagacgcgaggcggcgacgaggcgccggggacccgcgcgaggggcggccgggaggcggcggcggcggccgccagaagtagcagcaggaccggcggcggcgacggcagccctgaaatgcattttcctctccagcggccatgttaaccaggaaaccttcggccgccgctcccgccgcctacccgaccggccgaggtggggacagcgccgttcgtcagcttcaggcttccccggggctcggtgcaggggccacccggagcggagtggggactggcccgccctcccccatcgccctgccgcctctccgggccagcaacgctgccgccgcagcccacacgattggcggcagtaagcacacaatgaatgatcacctgcatgtcggcagccacgctcacggacagatccaggttcaacagttgtttgaggataacagtaacaagcggacagtgctcacgacacaaccaaatgggcttacaacagtgggcaaaacgggcttgccagtggtgccagagcggcagctggacagcattcatagacggcaggggagctccacctctctaaagtccatggaaggcatggggaaggtgaaagccacccccatgacacctgaacaagcaatgaagcaatacatgcaaaaactcacagccttcgaacaccatgagattttcagctaccctgaaatatatttcttgggtctaaatgctaagaagcgccagggcatgacaggtgggcccaacaatggtggctatgatgatgaccagggatcatatgtgcaggtgccccacgatcacgtggcttacaggtatgaggtcctcaaggtcattgggaaggggagctttgggcaggtggtcaaggcctacgatcacaaagtccaccagcacgtggccctaaagatggtgcggaatgagaagcgcttccaccggcaagcagcggaggagatccgaatcctggaacacctgcggaagcaggacaaggataacacaatgaatgtcatccatatgctggagaatttcaccttccgcaaccacatctgcatgacgtttgagctgctgagcatgaacctctatgagctcatcaagaagaataaattccagggcttcagtctgcctttggttcgcaagtttgcccactcgattctgcagtgcttggatgctttgcacaaaaacagaataattcactgtgaccttaagcccgagaacattttgttaaagcagcagggtagaagcggtattaaagtaattgattttggctccagttgttacgagcatcagcgtgtctacacgtacatccagtcgcgtttttaccgggctccagaagtgatccttggggccaggtatggcatgcccattgatatgtggagcctgggctgcattttagcagagctcctgacgggttaccccctcttgcctggggaagatgaaggggaccagctggcctgtatgattgaactgttgggcatgccctcacagaaactgctggatgcatccaaacgagccaaaaattttgtgagctccaagggttatccccgttactgcactgtcacgactctctcagatggctctgtggtcctaaacggaggccgttcccggagggggaaactgaggggcccaccggagagcagagagtgggggaacgcgctgaaggggtgtgatgatccccttttccttgacttcttaaaacagtgtttagagtgggatcctgcagtgcgcatgaccccaggccaggctttgcggcacccctggctgaggaggcggttgccaaagcctcccaccggggagaaaacgtcagtgaaaaggataactgagagcaccggtgctatcacatctatatccaagttacctccaccttctagctcagcttccaaactgaggactaatttggcgcagatgacagatgccaatgggaatattcagcagaggacagtgttgccaaaacttgttagctgagctcacgtcccctgatgctggtaacctgaaagatacgacattgctgagccttactgggttgaaaaggagtagctcagacctgtttttatttgctcaataactctactcatttgtatcttttcagcacttaattttaatgtaagaaagttgttcattttgtttttataaaatacatgaggacaatgctttaagtttttatactttcagaaactttttgtgttctaaaagtacaatgagccttactgtatttagtgtggcagaataataacatcagtggcaggccactgattacttcatgactgccacgcatttacagattggtgtcaaagacattcactatgtttttatggttcatgttatatcctccccagggtgacagccccttaaggccctccttttccctccatgctccaggtccatgcacaggtgtagcatgtcctgcttccgtttttcataaattaatctgggtgttgggggtagtgggaggagaacggtcagaatcaaagtgacattctaagaaaaactgtaccttagagattttcctctagtgctcaaacaaatacaaaataagatccccaaggtttaaactgcccagttagcattctgacattctaaaagccggcaaagcagcttttagtggataaatgggaatggaaacgtgtgtgttcctccaaattttctagtatgatcggtgagctgttttgtaaagaagcctcatattacagagttgcttttgcacctaaatttagaattgtattccatgaactgttcctcccttttctctgcttttctcctctctgttcctcttttaataccacacgtctgttgcttgcatttagtttgtcttcttccttcagctgtgtatcccagactgttaatacagaaaagagacatttcagctgtgattatgaccattgtttcatattccaattaaaaaaagaacagcagcctagctacttaaggtggggatttccatagttccaaagaagatttagcagattagagtgagttcacacttttcaggtgccactgtaaggttctctcagcctgggaaactatcaactctttctttaaaaagaaagagggttgaaaatcctctggacgaacagaagtcactttggctgttcagtaaggccaatgttaacaacacgtttagaggaggaaaagttcaacctcaagttaaatggtttgacttattcttcgtatcattagaagaaccccagagatagcattcctctattttattttactttcttttggattgcactgattgtttttgtgggaatgacactttatctggcaaagtaactgagagtttggtaaaagaatattttcttctctgaataataattattttcacagtgaaaatttcagtattttatcactaatgtatgagcaatgatctatatcaatttcaaggcacgtgaaaaaaattttttagtatgtgcaatttaatatagaaagatttctgcctgtttggacaataggttttgggtagtacagattaggataagtaagcttatatatgcacagagattattgtattacctgtaaattgatttacaagtacttaaaagcgtggtccccagtgaggccaagaaagtttccggttaagttctttaataataatcctacagtttatcttaagaaaaaaaaaaaggtttgaaaaaaacactttaatttaggcttcgttggttgatggtggaaaaaaatgctcaggaaatatttcagatatttgccaaaaaaccagtaataaggttaccttattaaaatagtgatatttgctttactatttaaggtgtcactgataaattaatttgtacttctgtgtttagaaattatagcttcttttcccttagtcaaattttttagcatattatacacatttctgtgtaatctgtggaagtgcaataatatgttagtaagttacattttaaataatgctcatgtgacaatactcccaatcaatggcttatagaatttaaagatctgtatattagattttggcttaaaggcatgagaagtataagacttggtttggtggctttgtaagaccaccagcctcttaatgatggttagcttctttaggtcattaaatcaataaaaacatataatgctgttttgctcttctaatgctcctcttccatttccagttatcttcacatttacatttaaatatacaaacctgagcctgccattattaatttccctataaaatgacgatacatgtgaacatttataaatggactaatactgcttgtctttcccccaccgcacaaaactggttcttaagatgccagcaatgaatttgagactatctttatttataaatggaaaccggaaacttttataccaaactataataatgtgcagcactgtagggcttttttttttttccctccaaatacagtgaaatttttttattcacaagagctgccacatctcagcatttagtaatagagctgctttaataaaattctagtttgattgtcatgtcaaaaaaagaaaaatgttgcatctttgtgattttaaaacataaattaatgaaggctctgataggctattaggagttggcttggaaacagtttttggtctcacaggttaccattgtttggggatgtctgagctgttttcagatctaggaatagcacagtgttgtcttgtctttggcagtctcatttggctctgttgttccactgctgtagcaatatatttaagtggtaatgaacatgctggtggtgcactcgtgc

SEQ ID NO: 308138 - DNA, 804 bp, Homo sapiens
gggggcgcgcgcgcgcgggcccgggagaggctcccgagccaggcggtcttcggtcctcgcagcgcttccagctccccgcgcccctatgtgagggagacggggaggcccgcggcgcgcaggggagggcgaggcatgtgcacgggccggagggtgctgcagccgcccgaggaagaggaggacggcggcgaggaggagagcggggggctcgcggcggcgggccccggccgaggggatgcagtggactgtgtgtgtctggctgtagcagacgcgaggcggcgacgaggcgccggggacccgcgcgaggggcggccgggaggcggcggcggcggccgccagaagtagcagcaggaccggcggcggcgacggcagccctgaaatgcattttcctctccagcggccatgttaaccaggaaaccttcggccgccgctcccgccgcctacccgaccggccgaggtggggacagcgccgttcgtcagcttcaggcttccccggggctcggtgcaggggccacccggagcggagtggggactggcccgccctcccccatcgccctgccgcctctccgggccagcaacgctgccgccgcagcccacacgggccacacagactgtcagaatgtttgaggaggagctaaaattccagtctttttggactcaattctattaccataatactatacagcatttctaagatgacttcagaaaagtttttaaacgcccaagactattatcacagtggaatatctgctgtttgccattttcttattggaagaaatgaaaactaccaaactggttagactattg

SEQ ID NO: 308139 - DNA, 594 bp, Homo sapiens
tcattcacccgcgccacccggaagccgcggttcctaccaaccgttcttattgctggcggcctgaggagcccatcatggcgacgccccctaagcggcgggcggtggaggccacgggggagaaagtgctgcgctacgagaccttcatcagtgacgtgctgcagcgggacttgcgaaaggtgctggaccatcgagacaaggtatatgagcagctggccaaataccttcaactgagaaatgtcattgagcgactccaggaagctaagcactcggagttatatatgcaggtggatttgggctgtaacttcttcgttgacacagtggtcccagatacttcacgcatctatgtggccctgggatatggttttttcctggagttgacactggcagaagctctcaagttcattgatcgtaagagctctctcctcacagagctcagcaacagcctcaccaaggactccatgaatatcaaagcccatatccacatgttgctagaggggcttagagaactacaaggcctgcagaatttcccagagaagcctcaccattgacttcttccccccatcctcagacattaaagagcctgaatgcctttga

SEQ ID NO: 308140 - DNA, 673 bp, Homo sapiens
tattgtagttagaaccatctgacacatagcttttattccattggttttttgttatgtctttctttacaagaatttgaagtccatcaggccgggagttttgtttgttgtgtttgctgctatctcccagtgcctaaaattgcctggcatacagtaggcatttaataatctttgaatcagtgaaaaccagatggtggcttggcatttccacataggaatgagccaggtggaaatcatccaggatataagtagatcttgaagtgataaggaagggtcatcataatcatgtggggcccattttgccctttcttgtttcttttctctaggctcagcaacagcctcaccaaggactccatgaatatcaaagcccatatccacatgttgctagaggtgagagcagctcacccccactaccagactctgtgtttagggtggtgacctgaagaaggaagagagcgaaagaagggaaggaccatctttccctctaaactggagtcaagggagggaggtcagagcaagcctgggggcgtaacccagacccagtctttgttcaatctcttctgtcctctttttcaggggcttagagaactacaaggcctgcagaatttcccagagaagcctcaccattgacttcttccccccatcctcagacattaaagagcctgaatgcctttga

SEQ ID NO: 308141 - DNA, 772 bp, Homo sapiens
tcattcacccgcgccacccggaagccgcggttcctaccaaccgttcttattgctggcggcctgaggtaaaggccgcgcttgggtgtccctgggtggtcgggtccccgagttgggaggggcggaaggctgaacctccagcttgagccggacaagccgattcccagcgttgagagggtagagatgaactgtgtgtgaggccaaactggatcggtcaacatggtcttccccctccccactccccaggagcccatcatggcgacgccccctaagcggcgggcggtggaggccacgggggagaaagtgctgcgctacgagaccttcatcagtgacgtgctgcagcgggacttgcgaaaggtgctggaccatcgagacaaggtatatgagcagctggccaaataccttcaactgagaaatgtcattgagcgactccaggaagctaagcactcggagttatatatgcaggtggatttgggctgtaacttcttcgttgacacagtggtcccagatacttcacgcatctatgtggccctgggatatggttttttcctggagttgacactggcagaagctctcaagttcattgatcgtaagagctctctcctcacagagctcagcaacagcctcaccaaggactccatgaatatcaaagcccatatccacatgttgctagaggggcttagagaactacaaggcctgcagaatttcccagagaagcctcaccattgacttcttccccccatcctcagacattaaagagcctgaatgcctttga

SEQ ID NO: 308142 - DNA, 563 bp, Homo sapiens
aaacttacggctaggtagcgaggctgggtgcgaggagcccatcatggcgacgccccctaagcggcgggcggtggaggccacgggggagaaagtgctgcgctacgagaccttcatcagtgacgtgctgcagcgggacttgcgaaaggtgctggaccatcgagacaaggtatatgagcagctggccaaataccttcaactgagaaatgtcattgagcgactccaggaagctaagcactcggagttatatatgcaggtggatttgggctgtaacttcttcgttgacacagtggtcccagatacttcacgcatctatgtggccctgggatatggttttttcctggagttgacactggcagaagctctcaagttcattgatcgtaagagctctctcctcacagagctcagcaacagcctcaccaaggactccatgaatatcaaagcccatatccacatgttgctagaggggcttagagaactacaaggcctgcagaatttcccagagaagcctcaccattgacttcttccccccatcctcagacattaaagagcctgaatgcctttga

SEQ ID NO: 308143 - DNA, 747 bp, Homo sapiens
aaacttacggctaggtagcgaggctgggtgcgaggagcccatcatggcgacgccccctaagcggcgggcggtggaggccacgggggagaaagtgctgcgctacgagaccttcatcagtgacgtgctgcagcgggacttgcgaaaggtgctggaccatcgagacaaggtatatgagcagctggccaaataccttcaactgagaaatgtcattgagcgactccaggaagctaagcactcggagttatatatgcaggtggatttgggctgtaacttcttcgttgacacagtggtcccagatacttcacgcatctatgtggccctgggatatggttttttcctggagttgacactggcagaagctctcaagttcattgatcgtaagagctctctcctcacagagctcagcaacagcctcaccaaggactccatgaatatcaaagcccatatccacatgttgctagaggggcttagagaactacaaggcctgcagaatttcccagagaagcctcaccattgacttcttccccccatcctcagacattaaagagcctgaatgcctttgaaaaaaaaaaaaaaaaaaaaaaaaaaaaaaaaaaaaaaaaaacccgggggcctttagtgggggggggggaaaaaggggttgaaaggggccggggaaaggggttcccggcccattttttggcacaagggggaaacgggggggccccaaaaggggggggggaaaaaatgaaaacgcggggacccgct

SEQ ID NO: 308144 - DNA, 517 bp, Homo sapiens
tcattcacccgcgccacccggaagccgcggttcctaccaaccgttcttattgctggcggcctgaggagcccatcatggcgacgccccctaagcggcgggcggtggaggccacgggggagaaagtgctgcgctacgagaccttcatcagtgacgtgctgcagcgggacttgcgaaaggtgctggaccatcgagacaaggtatatgagcagctggccaaataccttcaactgagaaatgtcattgagcgactccaggaagctaagcactcggagttatatatgcaggtggatttgggctgtaacttcttcgttgacacagtggtcccagatacttcacgcatctatgtggccctgggatatggttttttcctggagttgacactggcagaagctctcaagttcattgatcgtaagagctctctcctcacagaaggctccagcacccggcctacccagggcctcctgatttcaagccatatcacatttgctaggggctggacctcagcctcgatttccag

SEQ ID NO: 308145 - DNA, 487 bp, Homo sapiens
tattgtagttagaaccatctgacacatagcttttattccattggttttttgttatgtctttctttacaagaatttgaagtccatcaggccgggagttttgtttgttgtgtttgctgctatctcccagtgcctaaaattgcctggcatacagtaggcatttaataatctttgaatcagtgaaaaccagatggtggcttggcatttccacataggaatgagccaggtggaaatcatccaggatataagtagatcttgaagtgataaggaagggtcatcataatcatgtggggcccattttgccctttcttgtttcttttctctaggctcagcaacagcctcaccaaggactccatgaatatcaaagcccatatccacatgttgctagaggggcttagagaactacaaggcctgcagaatttcccagagaagcctcaccattgacttcttccccccatcctcagacattaaagagcctgaatgcctttga

SEQ ID NO: 308146 - DNA, 481 bp, Homo sapiens
tgagtatcttctatgtaccaggcactatgcgaggttttatatcccagtaggatataagctaggtgctggggatgtgacagtgaataaaataggacaaaatccctgccttcccagagcctcaatttggggaagggtggggagcaaaacataaactatgctaaacagtgataaggacttctccccacttcctctaacctctctttcctcagcccagatacttcacgcatctatgtggccctgggatatggttttttcctggagttgacactggcagaagctctcaagttcattgatcgtaagagctctctcctcacagagctcagcaacagcctcaccaaggactccatgaatatcaaagcccatatccacatgttgctagaggggcttagagaactacaaggcctgcagaatttcccagagaagcctcaccattgacttcttccccccatcctcagacattaaagagcctgaatgcctttga

SEQ ID NO: 308147 - DNA, 391 bp, Homo sapiens
tttcaattagggagatagttggtattaggattaggattgttgtgaagtatagtacggatgctacttgtccaatgatggtaaaagggtagcttactggttgtcctccgattcaggttagaatgaggaggtctgcggctaggagtcaataaagtgattggcttagtgggcgaaatattatgctttgttgtttggatatatggaggatggggattattgctaggatgaggatggatagtaatagggcaaggacgcctcctactctgtatgggggatctccgagatcccccatacagtaagtccattccatgaggatagtgtgtaaaaacaccaccatttccaacactcttctccctttacccatggctgcctggaatgatacttaaggactcat

SEQ ID NO: 308148 - DNA, 988 bp, Homo sapiens
tcattcacccgcgccacccggaagccgcggttcctaccaaccgttcttattgctggcggcctgaggtaaaggccgcgcttgggtgtccctgggtggtcgggtccccgagttgggaggggcggaaggctgaacctccagcttgagccggacaagccgattcccagcgttgagagggtagagatgaactgtgtgtgaggccaaactggatcggtcaacatggtcttccccctccccactccccaggagcccatcatggcgacgccccctaagcggcgggcggtggaggccacgggggagaaagtgctgcgctacgagaccttcatcagtgacgtgctgcagcgggacttgcgaaaggtgctggaccatcgagacaaggtatatgagcagctggccaaataccttcaactgagaaatgtcattgagcgactccaggaagctaagcactcggagttatatatgcaggtggatttgggctgtaacttcttcgttgacacagtggtcccagatacttcacgcatctatgtggccctgggatatggttttttcctggagttgacactggcagaagctctcaagttcattgatcgtaagagctctctcctcacagagctcagcaacagcctcaccaaggactccatgaatatcaaagcccatatccacatgttgctagaggggcttagagaactacaaggcctgcagaatttcccagagaagcctcaccattgacttcttccccccatcctcagacattaaagagcctgaatgcctttgaaaaaaaaacaagcacaaaaaacctcagagcgcacctaatcgtacagggtcgccggaaacaagagggcacccgacacgggcccatggggacataaagaggttacaccggacccaaagcaccctggagccaccggcgcgacaaccatagacagaggacccccaatataagaagagccagaataacaaacagacaggcagggtacaccgggcctactct

SEQ ID NO: 308149 - DNA, 923 bp, Homo sapiens
tcattcacccgcgccacccggaagccgcggttcctaccaaccgttcttattgctggcggcctgaggtaaaggccgcgcttgggtgtccctgggtggtcgggtccccgagttgggaggggcggaaggctgaacctccagcttgagccggacaagccgattcccagcgttgagagggtagagatgaactgtgtgtgaggccaaactggatcggtcaacatggtcttccccctccccactccccaggagcccatcatggcgacgccccctaagcggcgggcggtggaggccacgggggagaaagtgctgcgctacgagaccttcatcagtgacgtgctgcagcgggacttgcgaaaggtgctggaccatcgagacaaggtatatgagcagctggccaaataccttcaactgagaaatgtcattgagcgactccaggaagctaagcactcggagttatatatgcaggtggatttgggctgtaacttcttcgttgacacagtggtcccagatacttcacgcatctatgtggccctgggatatggttttttcctggagttgacactggcagaagctctcaagttcattgatcgtaagagctctctcctcacagagctcagcaacagcctcaccaaggactccatgaatatcaaagcccatatccacatgttgctagaggggcttagagaactacaaggcctgcagaatttcccagagaagcctcaccattgacttcttccccccatcctcagacattaaagagcctgaatgcctttgattgaacaacaaccctacaataaaataaaaacaatagcactacaaacaaaaacaccggggggccttttgccgggcggcgagaacacacggtgtatcaaacgggccgctgtccataaaggggtcccggacccctttctgtttcacagggggac

SEQ ID NO: 308150 - DNA, 1183 bp, Homo sapiens
tcattcacccgcgccacccggaagccgcggttcctaccaaccgttcttattgctggcggcctgaggtaaaggccgcgcttgggtgtccctgggtggtcgggtccccgagttgggaggggcggaaggctgaacctccagcttgagccggacaagccgattcccagcgttgagagggtagagatgaactgtgtgtgaggccaaactggatcggtcaacatggtcttccccctccccactccccaggagcccatcatggcgacgccccctaagcggcgggcggtggaggccacgggggagaaagtgctgcgctacgagaccttcatcagtgacgtgctgcagcgggacttgcgaaaggtgctggaccatcgagacaaggtatatgagcagctggccaaataccttcaactgagaaatgtcattgagcgactccaggaagctaagcactcggagttatatatgcaggtggatttgggctgtaacttcttcgttgacacagtggtcccagatacttcacgcatctatgtggccctgggatatggttttttcctggagttgacactggcagaagctctcaagttcattgatcgtaagagctctctcctcacagagctcagcaacagcctcaccaaggactccatgaatatcaaagcccatatccacatgttgctagaggggcttagagaactacaaggcctgcagaatttcccagagaagcctcaccattgacttcttccccccatcctcagacattaaagagcctgaatgcctttgaaaaaaaaagccaagttccaaatccaaaataataaatgaacgtgctgataaacattcttcttatggttccagcccctactttagttattttcctaaattttacatgtgtaccttttcaagaaagagtaagttttttaagtgatcaatatttatgagaactggactttcttcatataattaaaaaaaaaaaaaaaaaccctaaaaacaaaatccacaacgcaccctactcaaactcagataaaatacacatttgttcattaaagctcacctgctttagagaattttttctcttcacacattagcacagtaagccaatgtttgatccatgctgcaaaagctacacaaaacgaaaagccctggtaactccctagggaactcttaaggcaaagcaaaagcaaaaaccttatgctac

SEQ ID NO: 308151 - DNA, 1004 bp, Homo sapiens
tcattcacccgcgccacccggaagccgcggttcctaccaaccgttcttattgctggcggcctgaggtaaaggccgcgcttgggtgtccctgggtggtcgggtccccgagttgggaggggcggaaggctgaacctccagcttgagccggacaagccgattcccagcgttgagagggtagagatgaactgtgtgtgaggccaaactggatcggtcaacatggtcttccccctccccactccccaggagcccatcatggcgacgccccctaagcggcgggcggtggaggccacgggggagaaagtgctgcgctacgagaccttcatcagtgacgtgctgcagcgggacttgcgaaaggtgctggaccatcgagacaaggtatatgagcagctggccaaataccttcaactgagaaatgtcattgagcgactccaggaagctaagcactcggagttatatatgcaggtggatttgggctgtaacttcttcgttgacacagtggtcccagatacttcacgcatctatgtggccctgggatatggttttttcctggagttgacactggcagaagctctcaagttcattgatcgtaagagctctctcctcacagagctcagcaacagcctcaccaaggactccatgaatatcaaagcccatatccacatgttgctagaggggcttagagaactacaaggcctgcagaatttcccagagaagcctcaccattgacttcttccccccatcctcagacattaaagagcctgaatgcctttgaaaaaaaaaaaaaaaaaccctaaaaacaaaatccacaacgcaccctactcaaactcagataaaatacacatttgttcattaaagctcacctgctttagagaattttttctcttcacacattagcacagtaagccaatgtttgatccatgctgcaaaagctacacaaaacgaaaagccctggtaactccctagggaactcttaaggcaaagcaaaagcaaaaaccttatgctac

SEQ ID NO: 308152 - DNA, 958 bp, Homo sapiens
tcattcacccgcgccacccggaagccgcggttcctaccaaccgttcttattgctggcggcctgaggtaaaggccgcgcttgggtgtccctgggtggtcgggtccccgagttgggaggggcggaaggctgaacctccagcttgagccggacaagccgattcccagcgttgagagggtagagatgaactgtgtgtgaggccaaactggatcggtcaacatggtcttccccctccccactccccaggagcccatcatggcgacgccccctaagcggcgggcggtggaggccacgggggagaaagtgctgcgctacgagaccttcatcagtgacgtgctgcagcgggacttgcgaaaggtgctggaccatcgagacaaggtatatgagcagctggccaaataccttcaactgagaaatgtcattgagcgactccaggaagctaagcactcggagttatatatgcaggtggatttgggctgtaacttcttcgttgacacagtggtcccagatacttcacgcatctatgtggccctgggatatggttttttcctggagttgacactggcagaagctctcaagttcattgatcgtaagagctctctcctcacagagctcagcaacagcctcaccaaggactccatgaatatcaaagcccatatccacatgttgctagaggtgagagcagctcacccccactaccagactctgtgtttagggtggtgacctgaagaaggaagagagcgaaagaagggaaggaccatctttccctctaaactggagtcaagggagggaggtcagagcaagcctgggggcgtaacccagacccagtctttgttcaatctcttctgtcctctttttcaggggcttagagaactacaaggcctgcagaatttcccagagaagcctcaccattgacttcttccccccatcctcagacattaaagagcctgaatgcctttga

SEQ ID NO: 308153 - DNA, 1208 bp, Homo sapiens
tcattcacccgcgccacccggaagccgcggttcctaccaaccgttcttattgctggcggcctgaggtaaaggccgcgcttgggtgtccctgggtggtcgggtccccgagttgggaggggcggaaggctgaacctccagcttgagccggacaagccgattcccagcgttgagagggtagagatgaactgtgtgtgaggccaaactggatcggtcaacatggtcttccccctccccactccccaggagcccatcatggcgacgccccctaagcggcgggcggtggaggccacgggggagaaagtgctgcgctacgagaccttcatcagtgacgtgctgcagcgggacttgcgaaaggtgctggaccatcgagacaaggtatatgagcagctggccaaataccttcaactgagaaatgtcattgagcgactccaggaagctaagcactcggagttatatatgcaggtggatttgggctgtaacttcttcgttgacacagtggtcccagatacttcacgcatctatgtggccctgggatatggttttttcctggagttgacactggcagaagctctcaagttcattgatcgtaagagctctctcctcacagatgttgaactcataggttttcataaggctcagcaacagcctcaccaaggactccatgaatatcaaagcccatatccacatgttgctagaggggcttagagaactacaaggcctgcagaatttcccagagaagcctcaccattgacttcttccccccatcctcagacattaaagagcctgaatgcctttgaaaaaaaaagccaagttccaaatccaaaataataaatgaacgtgctgataaacattcttcttatggttccagcccctactttagttattttcctaaattttacatgtgtaccttttcaagaaagagtaagttttttaagtgatcaatatttatgagaactggactttcttcatataattaaaaaaaaaaaaaaaaaccctaaaaacaaaatccacaacgcaccctactcaaactcagataaaatacacatttgttcattaaagctcacctgctttagagaattttttctcttcacacattagcacagtaagccaatgtttgatccatgctgcaaaagctacacaaaacgaaaagccctggtaactccctagggaactcttaaggcaaagcaaaagcaaaaaccttatgctac

SEQ ID NO: 308154 - DNA, 713 bp, Homo sapiens
tcattcacccgcgccacccggaagccgcggttcctaccaaccgttcttattgctggcggcctgaggtaaaggccgcgcttgggtgtccctgggtggtcgggtccccgagttgggaggggcggaaggctgaacctccagcttgagccggacaagccgattcccagcgttgagagggtagagatgaactgtgtgtgaggccaaactggatcggtcaacatggtcttccccctccccactccccaggagcccatcatggcgacgccccctaagcggcgggcggtggaggccacgggggagaaagtgctgcgctacgagaccttcatcagtgacgtgctgcagcgggacttgcgaaaggtgctggaccatcgagacaaggtatatgagcagctggccaaataccttcaactgagaaatgtcattgagcgactccaggaagctaagcactcggagttatatatgcaggtggatttgggctgtaacttcttcgttgacacagtggttggcagaagctctcaagttcattgatcgtaagagctctctcctcacagagctcagcaacagcctcaccaaggactccatgaatatcaaagcccatatccacatgttgctagaggggcttagagaactacaaggcctgcagaatttcccagagaagcctcaccattgacttcttccccccatcctcagacattaaagagcctgaatgcctttga

SEQ ID NO: 308155 - DNA, 898 bp, Homo sapiens
tattgtagttagaaccatctgacacatagcttttattccattggttttttgttatgtctttctttacaagaatttgaagtccatcaggccgggagttttgtttgttgtgtttgctgctatctcccagtgcctaaaattgcctggcatacagtaggcatttaataatctttgaatcagtgaaaaccagatggtggcttggcatttccacataggaatgagccaggtggaaatcatccaggatataagtagatcttgaagtgataaggaagggtcatcataatcatgtggggcccattttgccctttcttgtttcttttctctaggctcagcaacagcctcaccaaggactccatgaatatcaaagcccatatccacatgttgctagaggggcttagagaactacaaggcctgcagaatttcccagagaagcctcaccattgacttcttccccccatcctcagacattaaagagcctgaatgcctttgaaaaaaaaagccaagttccaaatccaaaataataaatgaacgtgctgataaacattcttcttatggttccagcccctactttagttattttcctaaattttacatgtgtaccttttcaagaaagagtaagttttttaagtgatcaatatttatgagaactggactttcttcatataattaaaaaaaaaaaaaaaaaccctaaaaacaaaatccacaacgcaccctactcaaactcagataaaatacacatttgttcattaaagctcacctgctttagagaattttttctcttcacacattagcacagtaagccaatgtttgatccatgctgcaaaagctacacaaaacgaaaagccctggtaactccctagggaactcttaaggcaaagcaaaagcaaaaaccttatgctac

SEQ ID NO: 308156 - DNA, 1492 bp, Homo sapiens
ccacaacaaagttcagagatccagctaatattcaaagtagggtcaacctgaactaggaccttcaaggcatcatcacagcaaactgctcagatctccaccccagatggaaggcccagaccatggcaaggcactcttctcgacccctgcaggtattcttaaaaggattctacagacactttttgagcacctcactggaacagactctgggctcaggctgagaacagagacagccagccccagcccccacctcaagctggagacagggtatgaatggagctgtgcctgagctgaagcttctctgtggggcagacgtcttgaagaccttccagacccccaacctctggaaggatgcgcacatccaggaaatagtggagaagtttggcttggtgtgcgtgggccgagtaggtcacgacccaaaaggttacatcgcagaatctcccatcctacggatgcaccagcacaacattcacctggccaaggagcctgtgcagaatgagatcagtgccacatacatcaggcgagccttgggccaagggcagagcgtaaagtacctgattcccgatgctgtcatcacgtacatcaaggaccatggcctctacaccaagggcagtacctggaaaggcaaaagcacccagagcactgagggcaagacaagctagggaggggggactcagcacccacacctcctccaacaagctcctgctggggagagggctgttaaggtttctgttttactttggtttttgcttctccatttttcatttgctttatttctacagtgattctacttctgaggagtcttctgtcccaggaagagataccttctttacaggagaggaaaggtctaaatcacaaggatagacatttatcaaagaagttaaaatggtgtggcaggtcattaggattaggcagaatctctcagagctgctggacaaggaggtctacttattttgtgtggatggtaattatggcatgcacgctgaatgcagttctgagcatggcagcggcccctgagggtcagatcagaattgcccacaatgtgttttttaactaggaccaggtgcagcatgctagtcttgattggaaagatttgacaggatgctaattactgaacagtgggttttgtcaacgccctggtttcagaatatgaactgaggagtcaaacagttggaaacagcacattgctgatttacactggatcttgccttagaaaccattgtctgcctgcctaaccagcctttcataaaatttaaacaaaactctttctacgtagtgatcctcaagcaatatttttgatacagcaagtgtcaaacttgctatagcataaaagccggggctcctgatttccaggtttctaaaaaggaactgaggtaaaacagatgcctgaccgttttaaaggatcttttttaatgttttatgactgcctgtctgtttgaatactggcaaagggataaataataaattgacatcaaaaagtactaatgaaaaattt

SEQ ID NO: 308157 - DNA, 1953 bp, Homo sapiens
aatagcgaaggggcggggcgcagatctgtttccctcagactccatctgcccggggccgctaagggagcgcaaggtcaagttcgccttggccctgcctccagctcaggtactagggggtctagacctgaggctgcccgggccggaggcagccttgagtcccgagaccaaacgtcgtttccctctcggacctcgggcgccgggccgcgcgctgaccgacagcccctgctaggcccagcaggtcccctagtcccccgcagtcccccgagactcgccgagcgccgttgctgagccctgcaaatagcagctacctgcttcagcctagatcctgccatgaagcggactgctgctccctggctcccactctgatctgcttttcactcttgccttgtctcccaattaataagcagggtggccactgcaacaggtgtggatgtgcctgacaagatgaagagccgaatacctgtggtgctcctggcctgtggctcctttaaccccatcaccaacatgcacctgcgcatgtttgaggtggccagagatcacctacaccaaacaggaatgtaccaggtcatccagggtatcatctctcctgtcaacgacacctatgggaagaaagacctcgcagcttctcatcaccgagtggccatggcccggctggccctgcagacatccgactggatccgggtggacccttgggagagtgagcaggcacagtggatggagacagtgaaggtgctgagctgtgcctgagctgaagcttctctgtggggcagacgtcttgaagaccttccagacccccaacctctggaaggatgcgcacatccaggaaatagtggagaagtttggcttggtgtgcgtgggccgagtaggtcacgacccaaaaggttacatcgcagaatctcccatcctacggatgcaccagcacaacattcacctggccaaggagcctgtgcagaatgagatcagtgccacatacatcaggcgagccttgggccaagggcagagcgtaaagtacctgattcccgatgctgtcatcacgtacatcaaggaccatggcctctacaccaagggcagtacctggaaaggcaaaagcacccagagcactgagggcaagacaagctagggaggggggactcagcacccacacctcctccaacaagctcctgctggggagagggctgttaaggtttctgttttactttggtttttgcttctccatttttcatttgctttatttctacagtgattctacttctgaggagtcttctgtcccaggaagagataccttctttacaggagaggaaaggtctaaatcacaaggatagacatttatcaaagaagttaaaatggtgtggcaggtcattaggattaggcagaatctctcagagctgctggacaaggaggtctacttattttgtgtggatggtaattatggcatgcacgctgaatgcagttctgagcatggcagcggcccctgagggtcagatcagaattgcccacaatgtgttttttaactaggaccaggtgcagcatgctagtcttgattggaaagatttgacaggatgctaattactgaacagtgggttttgtcaacgccctggtttcagaatatgaactgaggagtcaaacagttggaaacagcacattgctgatttacactggatcttgccttagaaaccattgtctgcctgcctaaccagcctttcataaaatttaaacaaaactctttctacgtagtgatcctcaagcaatatttttgatacagcaagtgtcaaacttgctatagcataaaagccggggctcctgatttccaggtttctaaaaaggaactgaggtaaaacagatgcctgaccgttttaaaggatcttttttaatgttttatgactgcctgtctgtttgaatactggcaaagggataaataataaattgacatcaaaaagtactaatgaaaaattt

SEQ ID NO: 308158 - DNA, 1887 bp, Homo sapiens
aatagcgaaggggcggggcgcagatctgtttccctcagactccatctgcccggggccgctaagggagcgcaaggtcaagttcgccttggccctgcctccagctcaggtactagggggtctagacctgaggctgcccgggccggaggcagccttgagtcccgagaccaaacgtcgtttccctctcggacctcgggcgccgggccgcgcgctgaccgacagcccctgctaggcccagcaggtcccctagtcccccgcagtcccccgagactcgccgagcgccgttgctgagccctgcaaatagcagctacctgcttcagcctagatcctgccatgaagcggactgctgctccctggctcccactctgatctgcttttcactcttgccttgtctcccaattaataaggaatgtaccaggtcatccagggtatcatctctcctgtcaacgacacctatgggaagaaagacctcgcagcttctcatcaccgagtggccatggcccggctggccctgcagacatccgactggatccgggtggacccttgggagagtgagcaggcacagtggatggagacagtgaaggtgctgaggcatcatcacagcaaactgctcagatctccaccccagatggaaggcccagaccatggcaaggcactcttctcgacccctgcagctgtgcctgagctgaagcttctctgtggggcagacgtcttgaagaccttccagacccccaacctctggaaggatgcgcacatccaggaaatagtggagaagtttggcttggtgtgcgtgggccgagtaggtcacgacccaaaaggttacatcgcagaatctcccatcctacggatgcaccagcacaacattcacctggccaaggagcctgtgcagaatgagatcagtgccacatacatcaggcgagccttgggccaagggcagagcgtaaagtacctgattcccgatgctgtcatcacgtacatcaaggaccatggcctctacaccaagggcagtacctggaaaggcaaaagcacccagagcactgagggcaagacaagctagggaggggggactcagcacccacacctcctccaacaagctcctgctggggagagggctgttaaggtttctgttttactttggtttttgcttctccatttttcatttgctttatttctacagtgattctacttctgaggagtcttctgtcccaggaagagataccttctttacaggagaggaaaggtctaaatcacaaggatagacatttatcaaagaagttaaaatggtgtggcaggtcattaggattaggcagaatctctcagagctgctggacaaggaggtctacttattttgtgtggatggtaattatggcatgcacgctgaatgcagttctgagcatggcagcggcccctgagggtcagatcagaattgcccacaatgtgttttttaactaggaccaggtgcagcatgctagtcttgattggaaagatttgacaggatgctaattactgaacagtgggttttgtcaacgccctggtttcagaatatgaactgaggagtcaaacagttggaaacagcacattgctgatttacactggatcttgccttagaaaccattgtctgcctgcctaaccagcctttcataaaatttaaacaaaactctttctacgtagtgatcctcaagcaatatttttgatacagcaagtgtcaaacttgctatagcataaaagccggggctcctgatttccaggtttctaaaaaggaactgaggtaaaacagatgcctgaccgttttaaaggatcttttttaatgttttatgactgcctgtctgtttgaatactggcaaagggataaataataaattgacatcaaaaagtactaatgaaaaattt

SEQ ID NO: 308159 - DNA, 1634 bp, Homo sapiens
aagtcatcttttaaacgcaaaagaactgaagaacaagcgttctgtgatttgaatgacagcaagtgcaaaggcacaacactgaaaaaaattatatttatagatagcacctggaaccaaacaaacaaaatattcactgatgagcgacttcaaggaatgtaccaggtcatccagggtatcatctctcctgtcaacgacacctatgggaagaaagacctcgcagcttctcatcaccgagtggccatggcccggctggccctgcagacatccgactggatccgggtggacccttgggagagtgagcaggcacagtggatggagacagtgaaggtgctgaggcatcatcacagcaaactgctcagatctccaccccagatggaaggcccagaccatggcaaggcactcttctcgacccctgcagctgtgcctgagctgaagcttctctgtggggcagacgtcttgaagaccttccagacccccaacctctggaaggatgcgcacatccaggaaatagtggagaagtttggcttggtgtgcgtgggccgagtaggtcacgacccaaaaggttacatcgcagaatctcccatcctacggatgcaccagcacaacattcacctggccaaggagcctgtgcagaatgagatcagtgccacatacatcaggcgagccttgggccaagggcagagcgtaaagtacctgattcccgatgctgtcatcacgtacatcaaggaccatggcctctacaccaagggcagtacctggaaaggcaaaagcacccagagcactgagggcaagacaagctagggaggggggactcagcacccacacctcctccaacaagctcctgctggggagagggctgttaaggtttctgttttactttggtttttgcttctccatttttcatttgctttatttctacagtgattctacttctgaggagtcttctgtcccaggaagagataccttctttacaggagaggaaaggtctaaatcacaaggatagacatttatcaaagaagttaaaatggtgtggcaggtcattaggattaggcagaatctctcagagctgctggacaaggaggtctacttattttgtgtggatggtaattatggcatgcacgctgaatgcagttctgagcatggcagcggcccctgagggtcagatcagaattgcccacaatgtgttttttaactaggaccaggtgcagcatgctagtcttgattggaaagatttgacaggatgctaattactgaacagtgggttttgtcaacgccctggtttcagaatatgaactgaggagtcaaacagttggaaacagcacattgctgatttacactggatcttgccttagaaaccattgtctgcctgcctaaccagcctttcataaaatttaaacaaaactctttctacgtagtgatcctcaagcaatatttttgatacagcaagtgtcaaacttgctatagcataaaagccggggctcctgatttccaggtttctaaaaaggaactgaggtaaaacagatgcctgaccgttttaaaggatcttttttaatgttttatgactgcctgtctgtttgaatactggcaaagggataaataataaattgacatcaaaaagtactaatgaaaaattt

SEQ ID NO: 308160 - DNA, 692 bp, Homo sapiens
aatagcgaaggggcggggcgcagatctgtttccctcagactccatctgcccggggccgctaagggagcgcaaggtcaagttcgccttggccctgcctccagctcaggtactagggggtctagacctgaggctgcccgggccggaggcagccttgagtcccgagaccaaacgtcgtttccctctcggacctcgggcgccgggccgcgcgctgaccgacagcccctgctaggcccagcaggtcccctagtcccccgcagtcccccgagactcgccgagcgccgttgctgagccctgcaaatagcagctacctgcttcagcctagatcctgccatgaagcggactgctgctccctggctcccactctgatctgcttttcactcttgccttgtctcccaattaataaggggtggctggcagaggatccttacaccgacaaggaaggtatgctttgcttttgtttttagcagcattgtgtgcccgtagcaacagcgggttaaaaagaaaaagtactggagatcgcatgaaggttgattgccctagagaagtcgacacgctcacacagatggaaatgatttcaccgagtcctgaaaaatgtggtcgtcagccccacatacaaaccacgacttgtgttttctttaagatgaggagtctggtcaagaggtctgtgtaataaaagatgtttgtagaatcca

SEQ ID NO: 308161 - DNA, 629 bp, Homo sapiens
aatagcgaaggggcggggcgcagatctgtttccctcagactccatctgcccggggccgctaagggagcgcaaggtcaagttcgccttggccctgcctccagctcaggtactagggggtctagacctgaggctgcccgggccggaggcagccttgagtcccgagaccaaacgtcgtttccctctcggacctcgggcgccgggccgcgcgctgaccgacagcccctgctaggcccagcaggtcccctagtcccccgcagtcccccgagactcgccgagcgccgttgctgagccctgcaaatagcagctacctgcttcagcctagatcctgccatgaagcggactgctgctccctggctcccactctgatctgcttttcactcttgccttgtctcccaattaataagcattgtgtgcccgtagcaacagcgggttaaaaagaaaaagtactggagatcgcatgaaggttgattgccctagagaagtcgacacgctcacacagatggaaatgatttcaccgagtcctgaaaaatgtggtcgtcagccccacatacaaaccacgacttgtgttttctttaagatgaggagtctggtcaagaggtctgtgtaataaaagatgtttgtagaatcca

SEQ ID NO: 308162 - DNA, 282 bp, Homo sapiens
ctcccacctacattcaaaatacccgcagactttcagctacctgcttcagcctagatcctgccatgaagcggactgctgctccctggctcccactctgatctgcttttcactcttgccttgtctcccaattaataagcagggcacagtgggacgtgcctgtaatcccagttactcaggaggaagaggcaggagaatcacttgaacctgggaggcagaggctgcggtgagttgagatcgtgccattgcactccagcctgggcaacaagagcaaaacgctatctc

SEQ ID NO: 308163 - DNA, 2073 bp, Homo sapiens
aatagcgaaggggcggggcgcagatctgtttccctcagactccatctgcccggggccgctaagggagcgcaaggtcaagttcgccttggccctgcctccagctcaggtactagggggtctagacctgaggctgcccgggccggaggcagccttgagtcccgagaccaaacgtcgtttccctctcggacctcgggcgccgggccgcgcgctgaccgacagcccctgctaggcccagcaggtcccctagtcccccgcagtcccccgagactcgccgagcgccgttgctgagccctgcaaatagcagctacctgcttcagcctagatcctgccatgaagcggactgctgctccctggctcccactctgatctgcttttcactcttgccttgtctcccaattaataaggggtggctggcagaggatccttacaccgacaaggaagcagggtggccactgcaacaggtgtggatgtgcctgacaagatgaagagccgaatacctgtggtgctcctggcctgtggctcctttaaccccatcaccaacatgcacctgcgcatgtttgaggtggccagagatcacctacaccaaacaggaatgtaccaggtcatccagggtatcatctctcctgtcaacgacacctatgggaagaaagacctcgcagcttctcatcaccgagtggccatggcccggctggccctgcagacatccgactggatccgggtggacccttgggagagtgagcaggcacagtggatggagacagtgaaggtgctgaggcatcatcacagcaaactgctcagatctccaccccagatggaaggcccagaccatggcaaggcactcttctcgacccctgcagctgtgcctgagctgaagcttctctgtggggcagacgtcttgaagaccttccagacccccaacctctggaaggatgcgcacatccaggaaatagtggagaagtttggcttggtgtgcgtgggccgagtaggtcacgacccaaaaggttacatcgcagaatctcccatcctacggatgcaccagcacaacattcacctggccaaggagcctgtgcagaatgagatcagtgccacatacatcaggcgagccttgggccaagggcagagcgtaaagtacctgattcccgatgctgtcatcacgtacatcaaggaccatggcctctacaccaagggcagtacctggaaaggcaaaagcacccagagcactgagggcaagacaagctagggaggggggactcagcacccacacctcctccaacaagctcctgctggggagagggctgttaaggtttctgttttactttggtttttgcttctccatttttcatttgctttatttctacagtgattctacttctgaggagtcttctgtcccaggaagagataccttctttacaggagaggaaaggtctaaatcacaaggatagacatttatcaaagaagttaaaatggtgtggcaggtcattaggattaggcagaatctctcagagctgctggacaaggaggtctacttattttgtgtggatggtaattatggcatgcacgctgaatgcagttctgagcatggcagcggcccctgagggtcagatcagaattgcccacaatgtgttttttaactaggaccaggtgcagcatgctagtcttgattggaaagatttgacaggatgctaattactgaacagtgggttttgtcaacgccctggtttcagaatatgaactgaggagtcaaacagttggaaacagcacattgctgatttacactggatcttgccttagaaaccattgtctgcctgcctaaccagcctttcataaaatttaaacaaaactctttctacgtagtgatcctcaagcaatatttttgatacagcaagtgtcaaacttgctatagcataaaagccggggctcctgatttccaggtttctaaaaaggaactgaggtaaaacagatgcctgaccgttttaaaggatcttttttaatgttttatgactgcctgtctgtttgaatactggcaaagggataaataataaattgacatcaaaaagtactaatgaaaaattt

SEQ ID NO: 308164 - DNA, 2036 bp, Homo sapiens
aatagcgaaggggcggggcgcagatctgtttccctcagactccatctgcccggggccgctaagggagcgcaaggtcaagttcgccttggccctgcctccagctcaggtactagggggtctagacctgaggctgcccgggccggaggcagccttgagtcccgagaccaaacgtcgtttccctctcggacctcgggcgccgggccgcgcgctgaccgacagcccctgctaggcccagcaggtcccctagtcccccgcagtcccccgagactcgccgagcgccgttgctgagccctgcaaatagcagctacctgcttcagcctagatcctgccatgaagcggactgctgctccctggctcccactctgatctgcttttcactcttgccttgtctcccaattaataagcagggtggccactgcaacaggtgtggatgtgcctgacaagatgaagagccgaatacctgtggtgctcctggcctgtggctcctttaaccccatcaccaacatgcacctgcgcatgtttgaggtggccagagatcacctacaccaaacaggaatgtaccaggtcatccagggtatcatctctcctgtcaacgacacctatgggaagaaagacctcgcagcttctcatcaccgagtggccatggcccggctggccctgcagacatccgactggatccgggtggacccttgggagagtgagcaggcacagtggatggagacagtgaaggtgctgaggcatcatcacagcaaactgctcagatctccaccccagatggaaggcccagaccatggcaaggcactcttctcgacccctgcagctgtgcctgagctgaagcttctctgtggggcagacgtcttgaagaccttccagacccccaacctctggaaggatgcgcacatccaggaaatagtggagaagtttggcttggtgtgcgtgggccgagtaggtcacgacccaaaaggttacatcgcagaatctcccatcctacggatgcaccagcacaacattcacctggccaaggagcctgtgcagaatgagatcagtgccacatacatcaggcgagccttgggccaagggcagagcgtaaagtacctgattcccgatgctgtcatcacgtacatcaaggaccatggcctctacaccaagggcagtacctggaaaggcaaaagcacccagagcactgagggcaagacaagctagggaggggggactcagcacccacacctcctccaacaagctcctgctggggagagggctgttaaggtttctgttttactttggtttttgcttctccatttttcatttgctttatttctacagtgattctacttctgaggagtcttctgtcccaggaagagataccttctttacaggagaggaaaggtctaaatcacaaggatagacatttatcaaagaagttaaaatggtgtggcaggtcattaggattaggcagaatctctcagagctgctggacaaggaggtctacttattttgtgtggatggtaattatggcatgcacgctgaatgcagttctgagcatggcagcggcccctgagggtcagatcagaattgcccacaatgtgttttttaactaggaccaggtgcagcatgctagtcttgattggaaagatttgacaggatgctaattactgaacagtgggttttgtcaacgccctggtttcagaatatgaactgaggagtcaaacagttggaaacagcacattgctgatttacactggatcttgccttagaaaccattgtctgcctgcctaaccagcctttcataaaatttaaacaaaactctttctacgtagtgatcctcaagcaatatttttgatacagcaagtgtcaaacttgctatagcataaaagccggggctcctgatttccaggtttctaaaaaggaactgaggtaaaacagatgcctgaccgttttaaaggatcttttttaatgttttatgactgcctgtctgtttgaatactggcaaagggataaataataaattgacatcaaaaagtactaatgaaaaattt

SEQ ID NO: 308165 - DNA, 3600 bp, Homo sapiens
aagtgcacggaggagttccgggggccaggcggccgccgcgagtctggtatcctgagcttcgtgagttgagcgctgctgctccgcggtggagtcaccgcaccgctcccgggatcatggtgttctacttcaccagcagcagcgttaattcatctgcctacactatttacatgggaaaagataaatatgaaaatgaagatctgatcaagcatggctggcctgaagatatctgggagagaatatagaagacatcccaaaggaagtgctgatggactgtgcccaccttgtgaaggccaatagcattcaaggctgcaagatgaacaacgttaatgtggtatatacgccgtggtctaacctgaagaaaacagctgacatggatgtggggcagataggctttcacaggcagaaggatgtaaaaattgtgacagtggagaagaaagtaaatgagatcctgaaccgattagaaaagaccaaagtcgagcggttcccagacctagcagcagagaaagaatgcagagatcgtgaagagaggaatgagaaaaaagcccaaattcaggaaatgaaaaagagagaaaaagaagaaatgaagaagaagagggaaatggatgaacttaggagctattcatcactaatgaaagttgaaaatatgtcttcaaatcaggatggcaatgattcagatgaattcatgtaaaaggagaaaaggagaaaaggacctttgaaagatgtgaatgtagagacaattgcagaccttttggtttcatctgtgttctgaagtataaaatacaaccaaaattctaccttcatcctacccagaaattattgattttcaagttttaaaaaaattgtaccttttttgctgacagaaaaggatcagatatgtataaaatagttgaacttgacagcatataacttaaagtgaaaatgtttttgccagaacatgtcttggtaccttgtgaaagcaggctgcccttgttcttgagatagactttaaaatgaaccagctctgaaaagtacttctgctgctctggtctatccctgaaaacagatgtcttgaaacacttttcatattcttaaaataatcttcacttctgttaagaagaacatgttggtgggtaattatgcgaatgtttccctgtccctgatttctcgattaggcgtatgggttttgaaaaagagatttttcagaagattgtcagcttcagtattcacgttccatcgtgtcatctgggtctgttagtgtagtgaccctcagtgcagtctgtcccagcgtttacgtccttgcttcctctgagcagaggcctccatcttagtatcaacatatttaaagaaattgatggtgttcatcaagctggggcctgtggcagttgttgcctgagcaccaagtaacccaagccacctatgtgacaacttctgggcccaggagtaatttctcagcattgagggtaaaataggatggagtgctctgttgatcatttgggagatgtaggttacctgatttgtgccttaggatgcagcgtgaagcagaagtccatattgcaattatgattttagaaggaactaagcattttactcacacccacagcagcaagaatgacctcctgcagcagatattccacctgtaatagcactttggaactgtgggcaaaaccaaaaggctagtgtttccatttattccatgttggtgtatggggttgaactggaaaattccctgaggcaaaactcactggccaaattttgagagggtatagaaaatgactttagagatgagtggttttgtgtatgtgtctgatgatattcagtctgatgttccgcaattttaaaagttataataaaataccatttttttaatctggaaggacattgatatatgaattcttagaatttgctattaaaaagggtagcccccattccacaagctggttttgagggtgatcttgctctaaaaaacctcattcatcataggctcagtctgacaggttctgtacggggctatcatctttctcctcctctgctaaatgcctctttcttccagctgctcactgggtcaaagggatgtcctttctcagatgtattcttgatacatctcagatgtattcgtagctgtgctccttccatacttccaaggagtccggcttctacagaattcctctgtacctcacactgcaacacatgtagatagcgcttttgaaaaatacatatatttttactatagtatgagaggtcctggggctcaaactttaaacatttcctaactcagcttacactggtttaaaatgtccaggtctctgctgaattctcttgttgaattcatagctctccaacctcctctgtgttgattcctatgcccctaaccctgcagcctctttgttttatttttttccccatctctgttggtcccagggaaagcaaggaaattttcttttgaggacttataggttgattgcccacaggtcaaactgttggcattgaactcctctcatttcttgccattggattgtttcctaaacgttggataggagaattcgaaattgttgctatttttatgagctgtgcccttgatcaaatctgtgctgtgggtctgagtcattttgccaatgtcgtcttcagtttcaacactctgatcagcatgcaggcgaggggcatgtttaatttacttcactaactgctatattctatagctttagacttcatatttcttatccacctttgtctaggctcacgatctttgggcaagggagctttgtcaccgtggttgggctagaacaaatattgagaagtttaccaacacagatgttgagaagtttattgaaaggcactgacattagcagaataagtgatggacattagttgaaccccttcagtgtctatgtgttttattgtattgtctttaactcgttcttgaagcacagatttcagcgagcctttcagctattcagtgccagcggttttccccactcaggaaagatggtgtgagccatacacacagcaggattagacggggagagtttcagctgcagcttctagtttaagaccaaagcccttcctcccgctgctgcatctgtctgagaggggaagctcttgttttccaagctggaaccgtttatgaggaaaactgagcagggtggcaaaatggaaaaggaacaattttctagtttttcctacgcgtgatattgacgcgtgctttttctttgatttgaggtacagcatgtaaataacaaatttccatattcaaaatgatcatattagagtgactgagtgaccttttgattttgaagcagactaaaatctgaccagaccacaatgaaaagtataaaattagaaacttaaattccaagctaaatttcagctttgacccacctaactccagtgaataggtggcagctcagaaacaaggacagcactgctgctgccagagcaagctcacatccagctggcacttcgtgagagctccttcctgccgggcacgtgtgagttcagcgtgggcaagagacttttatgcacattctgtcattcaaaagggaaatgatgccaaccccagatgcagcatgtcctgaatgaatgatctgtaaaatacaataataaaagcttatagtttgagtagaa

SEQ ID NO: 308166 - DNA, 1903 bp, Homo sapiens
aagtgcacggaggagttccgggggccaggcggccgccgcgagtctggtatcctgagcttcgtgagttgagcgctgctgctccgcggtggagtcaccgcaccgctcccgggatcatggtgttctacttcaccagcagcagcgttaattcatctgcctacactatttacatgggaaaagataaatatgaaaatgaagatctgatcaagcatggctggcctgaagatatctggtttcatgtggacaaactctcttcggctcatgtataccttcgattacataagggagagaatatagaagacatcccaaaggaagtgctgatggactgtgcccaccttgtgaaggccaatagcattcaaggctgcaagatgaacaacgttaatgtggtatatacgccgtggtctaacctgaagaaaacagctgacatggatgtggggcagataggctttcacaggcagaaggatgtaaaaattgtgacagtggagaagaaagtaaatgagatcctgaaccgattagaaaagaccaaagtcgagcggttcccagacctagcagcagagaaagaatgcagagatcgtgaagagaggaatgagaaaaaagcccaaattcaggaaatgaaaaagagagaaaaagaagaaatgaagaagaagagggaaatggatgaacttaggagctattcatcactaatgaaagttgaaaatatgtcttcaaatcaggatggcaatgattcagatgaattcatgtaaaaggagaaaaggagaaaaggacctttgaaagatgtgaatgtagagacaattgcagaccttttggtttcatctgtgttctgaagtataaaatacaaccaaaattctaccttcatcctacccagaaattattgattttcaagttttaaaaaaattgtaccttttttgctgacagaaaaggatcagatatgtataaaatagttgaacttgacagcatataacttaaagtgaaaatgtttttgccagaacatgtcttggtaccttgtgaaagcaggctgcccttgttcttgagatagactttaaaatgaaccagctctgaaaagtacttctgctgctctggtctatccctgaaaacagatgtcttgaaacacttttcatattcttaaaataatcttcacttctgttaagaagaacatgttggtgggtaattatgcgaatgtttccctgtccctgatttctcgattaggcgtatgggttttgaaaaagagatttttcagaagattgtcagcttcagtattcacgttccatcgtgtcatctgggtctgttagtgtagtgaccctcagtgcagtctgtcccagcgtttacgtccttgcttcctctgagcagaggcctccatcttagtatcaacatatttaaagaaattgatggtgttcatcaagctggggcctgtggcagttgttgcctgagcaccaagtaacccaagccacctatgtgacaacttctgggcccaggagtaatttctcagcattgagggtaaaataggatggagtgctctgttgatcatttgggagatgtaggttacctgatttgtgccttaggatgcagcgtgaagcagaagtccatattgcaattatgattttagaaggaactaagcattttactcacacccacagcagcaagaatgacctcctgcagcagatattccacctgtaatagcactttggaactgtgggcaaaaccaaaaggctagtgtttccatttattccatgttggtgtatggggttgaactggaaaattccctgaggcaaaactcactggccaaattttgagagggtatagaaaatgactttagagatgagtggttttgtgtatgtgtctgatgatattcagtctgatgttccgcaattttaaaagttataataaaataccatttttttaatctgga

SEQ ID NO: 308167 - DNA, 825 bp, Homo sapiens
aagtgcacggaggagttccgggggccaggcggccgccgcgagtctggtatcctgagcttcgtgagttgagcgctgctgctccgcggtggagtcaccgcaccgctcccgggatcatggtgttctacttcaccagcagcagcgttaattcatctgcctacactatttacatgggaaaagataaatatgaaaatgaagatctgatcaagcatggctggcctgaagatatctgggagagaatatagaagacatcccaaaggaagtgctgatggactgtgcccaccttgtgaaggccaatagcattcaaggtaaaaattgtgacagtggagaagaaagtaaatgagatcctgaaccgattagaaaagaccaaagtcgagcggttcccagacctagcagcagagaaagaatgcagagatcgtgaagagaggaatgagaaaaaagcccaaattcaggaaatgaaaaagagagaaaaagaagaaatgaagaagaagagggaaatggatgaacttaggagctattcatcactaatgaaagttgaaaatatgtcttcaaatcaggatggcaatgattcagatgaattcatgtaaaaggagaaaaggagaaaaggacctttgaaagatgtgaatgtagagacaattgcagaccttttggtttcatctgtgttctgaagtataaaatacaaccaaaattctaccttcatcctacccagaaattattgattttcaagttttaaaaaaattgtaccttttttgctgacagaaagaacaaattttttaaattgacctgccgcattacttaaaggaatagtttcccaacatgttgtgcctt

SEQ ID NO: 308168 - DNA, 3652 bp, Homo sapiens
aagtgcacggaggagttccgggggccaggcggccgccgcgagtctggtatcctgagcttcgtgagttgagcgctgctgctccgcggtggagtcaccgcaccgctcccgggatcatggtgttctacttcaccagcagcagcgttaattcatctgcctacactatttacatgggaaaagataaatatgaaaatgaagatctgatcaagcatggctggcctgaagatatctggtttcatgtggacaaactctcttcggctcatgtataccttcgattacataagggagagaatatagaagacatcccaaaggaagtgctgatggactgtgcccaccttgtgaaggccaatagcattcaaggctgcaagatgaacaacgttaatgtggtatatacgccgtggtctaacctgaagaaaacagctgacatggatgtggggcagataggctttcacaggcagaaggatgtaaaaattgtgacagtggagaagaaagtaaatgagatcctgaaccgattagaaaagaccaaagtcgagcggttcccagacctagcagcagagaaagaatgcagagatcgtgaagagaggaatgagaaaaaagcccaaattcaggaaatgaaaaagagagaaaaagaagaaatgaagaagaagagggaaatggatgaacttaggagctattcatcactaatgaaagttgaaaatatgtcttcaaatcaggatggcaatgattcagatgaattcatgtaaaaggagaaaaggagaaaaggacctttgaaagatgtgaatgtagagacaattgcagaccttttggtttcatctgtgttctgaagtataaaatacaaccaaaattctaccttcatcctacccagaaattattgattttcaagttttaaaaaaattgtaccttttttgctgacagaaaaggatcagatatgtataaaatagttgaacttgacagcatataacttaaagtgaaaatgtttttgccagaacatgtcttggtaccttgtgaaagcaggctgcccttgttcttgagatagactttaaaatgaaccagctctgaaaagtacttctgctgctctggtctatccctgaaaacagatgtcttgaaacacttttcatattcttaaaataatcttcacttctgttaagaagaacatgttggtgggtaattatgcgaatgtttccctgtccctgatttctcgattaggcgtatgggttttgaaaaagagatttttcagaagattgtcagcttcagtattcacgttccatcgtgtcatctgggtctgttagtgtagtgaccctcagtgcagtctgtcccagcgtttacgtccttgcttcctctgagcagaggcctccatcttagtatcaacatatttaaagaaattgatggtgttcatcaagctggggcctgtggcagttgttgcctgagcaccaagtaacccaagccacctatgtgacaacttctgggcccaggagtaatttctcagcattgagggtaaaataggatggagtgctctgttgatcatttgggagatgtaggttacctgatttgtgccttaggatgcagcgtgaagcagaagtccatattgcaattatgattttagaaggaactaagcattttactcacacccacagcagcaagaatgacctcctgcagcagatattccacctgtaatagcactttggaactgtgggcaaaaccaaaaggctagtgtttccatttattccatgttggtgtatggggttgaactggaaaattccctgaggcaaaactcactggccaaattttgagagggtatagaaaatgactttagagatgagtggttttgtgtatgtgtctgatgatattcagtctgatgttccgcaattttaaaagttataataaaataccatttttttaatctggaaggacattgatatatgaattcttagaatttgctattaaaaagggtagcccccattccacaagctggttttgagggtgatcttgctctaaaaaacctcattcatcataggctcagtctgacaggttctgtacggggctatcatctttctcctcctctgctaaatgcctctttcttccagctgctcactgggtcaaagggatgtcctttctcagatgtattcttgatacatctcagatgtattcgtagctgtgctccttccatacttccaaggagtccggcttctacagaattcctctgtacctcacactgcaacacatgtagatagcgcttttgaaaaatacatatatttttactatagtatgagaggtcctggggctcaaactttaaacatttcctaactcagcttacactggtttaaaatgtccaggtctctgctgaattctcttgttgaattcatagctctccaacctcctctgtgttgattcctatgcccctaaccctgcagcctctttgttttatttttttccccatctctgttggtcccagggaaagcaaggaaattttcttttgaggacttataggttgattgcccacaggtcaaactgttggcattgaactcctctcatttcttgccattggattgtttcctaaacgttggataggagaattcgaaattgttgctatttttatgagctgtgcccttgatcaaatctgtgctgtgggtctgagtcattttgccaatgtcgtcttcagtttcaacactctgatcagcatgcaggcgaggggcatgtttaatttacttcactaactgctatattctatagctttagacttcatatttcttatccacctttgtctaggctcacgatctttgggcaagggagctttgtcaccgtggttgggctagaacaaatattgagaagtttaccaacacagatgttgagaagtttattgaaaggcactgacattagcagaataagtgatggacattagttgaaccccttcagtgtctatgtgttttattgtattgtctttaactcgttcttgaagcacagatttcagcgagcctttcagctattcagtgccagcggttttccccactcaggaaagatggtgtgagccatacacacagcaggattagacggggagagtttcagctgcagcttctagtttaagaccaaagcccttcctcccgctgctgcatctgtctgagaggggaagctcttgttttccaagctggaaccgtttatgaggaaaactgagcagggtggcaaaatggaaaaggaacaattttctagtttttcctacgcgtgatattgacgcgtgctttttctttgatttgaggtacagcatgtaaataacaaatttccatattcaaaatgatcatattagagtgactgagtgaccttttgattttgaagcagactaaaatctgaccagaccacaatgaaaagtataaaattagaaacttaaattccaagctaaatttcagctttgacccacctaactccagtgaataggtggcagctcagaaacaaggacagcactgctgctgccagagcaagctcacatccagctggcacttcgtgagagctccttcctgccgggcacgtgtgagttcagcgtgggcaagagacttttatgcacattctgtcattcaaaagggaaatgatgccaaccccagatgcagcatgtcctgaatgaatgatctgtaaaatacaataataaaagcttatagtttgagtagaa

SEQ ID NO: 308169 - DNA, 3900 bp, Homo sapiens
aagtgcacggaggagttccgggggccaggcggccgccgcgagtctggtatcctgagcttcgtgagttgagcgctgctgctccgcggtggagtcaccgcaccgctcccgggatcatggtgttctacttcaccagcagcagcgttaattcatctgcctacactatttacatgggaaaagataaatatgaaagctgaggcgagaggatcacttgagcccaggagttcgagacctgcctgagcaacatagggagaccctgtctctacaaaaaacaacaataaaagaaaatattagctgggcatagtgacacacacctgttgtccttgctactctggaggctgaggcaggaagatcgcttgagcctgggaggtaggctgcagtgagctgtgatcatgccactgcattccagcttaagagacagcgagaatctgttgtctgaaatgaagatctgatcaagcatggctggcctgaagatatctggtttcatgtggacaaactctcttcggctcatgtataccttcgattacataagggagagaatatagaagacatcccaaaggaagtgctgatggactgtgcccaccttgtgaaggccaatagcattcaaggctgcaagatgaacaacgttaatgtggtatatacgccgtggtctaacctgaagaaaacagctgacatggatgtggggcagataggctttcacaggcagaaggatgtaaaaattgtgacagtggagaagaaagtaaatgagatcctgaaccgattagaaaagaccaaagtcgagcggttcccagacctagcagcagagaaagaatgcagagatcgtgaagagaggaatgagaaaaaagcccaaattcaggaaatgaaaaagagagaaaaagaagaaatgaagaagaagagggaaatggatgaacttaggagctattcatcactaatgaaagttgaaaatatgtcttcaaatcaggatggcaatgattcagatgaattcatgtaaaaggagaaaaggagaaaaggacctttgaaagatgtgaatgtagagacaattgcagaccttttggtttcatctgtgttctgaagtataaaatacaaccaaaattctaccttcatcctacccagaaattattgattttcaagttttaaaaaaattgtaccttttttgctgacagaaaaggatcagatatgtataaaatagttgaacttgacagcatataacttaaagtgaaaatgtttttgccagaacatgtcttggtaccttgtgaaagcaggctgcccttgttcttgagatagactttaaaatgaaccagctctgaaaagtacttctgctgctctggtctatccctgaaaacagatgtcttgaaacacttttcatattcttaaaataatcttcacttctgttaagaagaacatgttggtgggtaattatgcgaatgtttccctgtccctgatttctcgattaggcgtatgggttttgaaaaagagatttttcagaagattgtcagcttcagtattcacgttccatcgtgtcatctgggtctgttagtgtagtgaccctcagtgcagtctgtcccagcgtttacgtccttgcttcctctgagcagaggcctccatcttagtatcaacatatttaaagaaattgatggtgttcatcaagctggggcctgtggcagttgttgcctgagcaccaagtaacccaagccacctatgtgacaacttctgggcccaggagtaatttctcagcattgagggtaaaataggatggagtgctctgttgatcatttgggagatgtaggttacctgatttgtgccttaggatgcagcgtgaagcagaagtccatattgcaattatgattttagaaggaactaagcattttactcacacccacagcagcaagaatgacctcctgcagcagatattccacctgtaatagcactttggaactgtgggcaaaaccaaaaggctagtgtttccatttattccatgttggtgtatggggttgaactggaaaattccctgaggcaaaactcactggccaaattttgagagggtatagaaaatgactttagagatgagtggttttgtgtatgtgtctgatgatattcagtctgatgttccgcaattttaaaagttataataaaataccatttttttaatctggaaggacattgatatatgaattcttagaatttgctattaaaaagggtagcccccattccacaagctggttttgagggtgatcttgctctaaaaaacctcattcatcataggctcagtctgacaggttctgtacggggctatcatctttctcctcctctgctaaatgcctctttcttccagctgctcactgggtcaaagggatgtcctttctcagatgtattcttgatacatctcagatgtattcgtagctgtgctccttccatacttccaaggagtccggcttctacagaattcctctgtacctcacactgcaacacatgtagatagcgcttttgaaaaatacatatatttttactatagtatgagaggtcctggggctcaaactttaaacatttcctaactcagcttacactggtttaaaatgtccaggtctctgctgaattctcttgttgaattcatagctctccaacctcctctgtgttgattcctatgcccctaaccctgcagcctctttgttttatttttttccccatctctgttggtcccagggaaagcaaggaaattttcttttgaggacttataggttgattgcccacaggtcaaactgttggcattgaactcctctcatttcttgccattggattgtttcctaaacgttggataggagaattcgaaattgttgctatttttatgagctgtgcccttgatcaaatctgtgctgtgggtctgagtcattttgccaatgtcgtcttcagtttcaacactctgatcagcatgcaggcgaggggcatgtttaatttacttcactaactgctatattctatagctttagacttcatatttcttatccacctttgtctaggctcacgatctttgggcaagggagctttgtcaccgtggttgggctagaacaaatattgagaagtttaccaacacagatgttgagaagtttattgaaaggcactgacattagcagaataagtgatggacattagttgaaccccttcagtgtctatgtgttttattgtattgtctttaactcgttcttgaagcacagatttcagcgagcctttcagctattcagtgccagcggttttccccactcaggaaagatggtgtgagccatacacacagcaggattagacggggagagtttcagctgcagcttctagtttaagaccaaagcccttcctcccgctgctgcatctgtctgagaggggaagctcttgttttccaagctggaaccgtttatgaggaaaactgagcagggtggcaaaatggaaaaggaacaattttctagtttttcctacgcgtgatattgacgcgtgctttttctttgatttgaggtacagcatgtaaataacaaatttccatattcaaaatgatcatattagagtgactgagtgaccttttgattttgaagcagactaaaatctgaccagaccacaatgaaaagtataaaattagaaacttaaattccaagctaaatttcagctttgacccacctaactccagtgaataggtggcagctcagaaacaaggacagcactgctgctgccagagcaagctcacatccagctggcacttcgtgagagctccttcctgccgggcacgtgtgagttcagcgtgggcaagagacttttatgcacattctgtcattcaaaagggaaatgatgccaaccccagatgcagcatgtcctgaatgaatgatctgtaaaatacaataataaaagcttatagtttgagtagaa

SEQ ID NO: 308170 - DNA, 3496 bp, Homo sapiens
aagtgcacggaggagttccgggggccaggcggccgccgcgagtctggtatcctgagcttcgtgagttgagcgctgctgctccgcggtggagtcaccgcaccgctcccgggatcatggtgttctacttcaccagcagcagcgttaattcatctgcctacactatttacatgggaaaagataaatatgaaaatgaagatctgatcaagcatggctggcctgaagatatctgggagagaatatagaagacatcccaaaggaagtgctgatggactgtgcccaccttgtgaaggccaatagcattcaaggtaaaaattgtgacagtggagaagaaagtaaatgagatcctgaaccgattagaaaagaccaaagtcgagcggttcccagacctagcagcagagaaagaatgcagagatcgtgaagagaggaatgagaaaaaagcccaaattcaggaaatgaaaaagagagaaaaagaagaaatgaagaagaagagggaaatggatgaacttaggagctattcatcactaatgaaagttgaaaatatgtcttcaaatcaggatggcaatgattcagatgaattcatgtaaaaggagaaaaggagaaaaggacctttgaaagatgtgaatgtagagacaattgcagaccttttggtttcatctgtgttctgaagtataaaatacaaccaaaattctaccttcatcctacccagaaattattgattttcaagttttaaaaaaattgtaccttttttgctgacagaaaaggatcagatatgtataaaatagttgaacttgacagcatataacttaaagtgaaaatgtttttgccagaacatgtcttggtaccttgtgaaagcaggctgcccttgttcttgagatagactttaaaatgaaccagctctgaaaagtacttctgctgctctggtctatccctgaaaacagatgtcttgaaacacttttcatattcttaaaataatcttcacttctgttaagaagaacatgttggtgggtaattatgcgaatgtttccctgtccctgatttctcgattaggcgtatgggttttgaaaaagagatttttcagaagattgtcagcttcagtattcacgttccatcgtgtcatctgggtctgttagtgtagtgaccctcagtgcagtctgtcccagcgtttacgtccttgcttcctctgagcagaggcctccatcttagtatcaacatatttaaagaaattgatggtgttcatcaagctggggcctgtggcagttgttgcctgagcaccaagtaacccaagccacctatgtgacaacttctgggcccaggagtaatttctcagcattgagggtaaaataggatggagtgctctgttgatcatttgggagatgtaggttacctgatttgtgccttaggatgcagcgtgaagcagaagtccatattgcaattatgattttagaaggaactaagcattttactcacacccacagcagcaagaatgacctcctgcagcagatattccacctgtaatagcactttggaactgtgggcaaaaccaaaaggctagtgtttccatttattccatgttggtgtatggggttgaactggaaaattccctgaggcaaaactcactggccaaattttgagagggtatagaaaatgactttagagatgagtggttttgtgtatgtgtctgatgatattcagtctgatgttccgcaattttaaaagttataataaaataccatttttttaatctggaaggacattgatatatgaattcttagaatttgctattaaaaagggtagcccccattccacaagctggttttgagggtgatcttgctctaaaaaacctcattcatcataggctcagtctgacaggttctgtacggggctatcatctttctcctcctctgctaaatgcctctttcttccagctgctcactgggtcaaagggatgtcctttctcagatgtattcttgatacatctcagatgtattcgtagctgtgctccttccatacttccaaggagtccggcttctacagaattcctctgtacctcacactgcaacacatgtagatagcgcttttgaaaaatacatatatttttactatagtatgagaggtcctggggctcaaactttaaacatttcctaactcagcttacactggtttaaaatgtccaggtctctgctgaattctcttgttgaattcatagctctccaacctcctctgtgttgattcctatgcccctaaccctgcagcctctttgttttatttttttccccatctctgttggtcccagggaaagcaaggaaattttcttttgaggacttataggttgattgcccacaggtcaaactgttggcattgaactcctctcatttcttgccattggattgtttcctaaacgttggataggagaattcgaaattgttgctatttttatgagctgtgcccttgatcaaatctgtgctgtgggtctgagtcattttgccaatgtcgtcttcagtttcaacactctgatcagcatgcaggcgaggggcatgtttaatttacttcactaactgctatattctatagctttagacttcatatttcttatccacctttgtctaggctcacgatctttgggcaagggagctttgtcaccgtggttgggctagaacaaatattgagaagtttaccaacacagatgttgagaagtttattgaaaggcactgacattagcagaataagtgatggacattagttgaaccccttcagtgtctatgtgttttattgtattgtctttaactcgttcttgaagcacagatttcagcgagcctttcagctattcagtgccagcggttttccccactcaggaaagatggtgtgagccatacacacagcaggattagacggggagagtttcagctgcagcttctagtttaagaccaaagcccttcctcccgctgctgcatctgtctgagaggggaagctcttgttttccaagctggaaccgtttatgaggaaaactgagcagggtggcaaaatggaaaaggaacaattttctagtttttcctacgcgtgatattgacgcgtgctttttctttgatttgaggtacagcatgtaaataacaaatttccatattcaaaatgatcatattagagtgactgagtgaccttttgattttgaagcagactaaaatctgaccagaccacaatgaaaagtataaaattagaaacttaaattccaagctaaatttcagctttgacccacctaactccagtgaataggtggcagctcagaaacaaggacagcactgctgctgccagagcaagctcacatccagctggcacttcgtgagagctccttcctgccgggcacgtgtgagttcagcgtgggcaagagacttttatgcacattctgtcattcaaaagggaaatgatgccaaccccagatgcagcatgtcctgaatgaatgatctgtaaaatacaataataaaagcttatagtttgagtagaa

SEQ ID NO: 308171 - DNA, 3606 bp, Homo sapiens
aagtgcacggaggagttccgggggccaggcggccgccgcgagtctggtatcctgagcttcgtgagttgagcgctgctgctccgcggtggagtcaccgcaccgctcccgggatcatggtgttctacttcaccagcagcagcgttaattcatctgcctacactatttacatgggaaaagataaatatgaaaatgaagatctgatcaagcatggctggcctgaagatatctggtttcatgtggacaaactctcttcggctcatgtataccttcgattacataagggagagaatatagaagacatcccaaaggaagtgctgatggactgtgcccaccttgtgaaggccaatagcattcaaggctgcaagatgaacaacgttaatgtggtatatacgccgtggtctaacctgaagaaaacagctgacatggatgtggggcagataggctttcacaggcagaaggatgtaaaaattgtgacagtggagaagaaagtaaatgagatcctgaaccgattagaaaagaccaaagtcgagcggttcccagacctagcagcagagaaagaatgcagagatcgtgaagagaggaatgagaaaaaagcccaaattcaggaaatgaaaaagagagaaaaagaagaaatgaagaagaagagggaaatggatgaacttaggatggcaatgattcagatgaattcatgtaaaaggagaaaaggagaaaaggacctttgaaagatgtgaatgtagagacaattgcagaccttttggtttcatctgtgttctgaagtataaaatacaaccaaaattctaccttcatcctacccagaaattattgattttcaagttttaaaaaaattgtaccttttttgctgacagaaaaggatcagatatgtataaaatagttgaacttgacagcatataacttaaagtgaaaatgtttttgccagaacatgtcttggtaccttgtgaaagcaggctgcccttgttcttgagatagactttaaaatgaaccagctctgaaaagtacttctgctgctctggtctatccctgaaaacagatgtcttgaaacacttttcatattcttaaaataatcttcacttctgttaagaagaacatgttggtgggtaattatgcgaatgtttccctgtccctgatttctcgattaggcgtatgggttttgaaaaagagatttttcagaagattgtcagcttcagtattcacgttccatcgtgtcatctgggtctgttagtgtagtgaccctcagtgcagtctgtcccagcgtttacgtccttgcttcctctgagcagaggcctccatcttagtatcaacatatttaaagaaattgatggtgttcatcaagctggggcctgtggcagttgttgcctgagcaccaagtaacccaagccacctatgtgacaacttctgggcccaggagtaatttctcagcattgagggtaaaataggatggagtgctctgttgatcatttgggagatgtaggttacctgatttgtgccttaggatgcagcgtgaagcagaagtccatattgcaattatgattttagaaggaactaagcattttactcacacccacagcagcaagaatgacctcctgcagcagatattccacctgtaatagcactttggaactgtgggcaaaaccaaaaggctagtgtttccatttattccatgttggtgtatggggttgaactggaaaattccctgaggcaaaactcactggccaaattttgagagggtatagaaaatgactttagagatgagtggttttgtgtatgtgtctgatgatattcagtctgatgttccgcaattttaaaagttataataaaataccatttttttaatctggaaggacattgatatatgaattcttagaatttgctattaaaaagggtagcccccattccacaagctggttttgagggtgatcttgctctaaaaaacctcattcatcataggctcagtctgacaggttctgtacggggctatcatctttctcctcctctgctaaatgcctctttcttccagctgctcactgggtcaaagggatgtcctttctcagatgtattcttgatacatctcagatgtattcgtagctgtgctccttccatacttccaaggagtccggcttctacagaattcctctgtacctcacactgcaacacatgtagatagcgcttttgaaaaatacatatatttttactatagtatgagaggtcctggggctcaaactttaaacatttcctaactcagcttacactggtttaaaatgtccaggtctctgctgaattctcttgttgaattcatagctctccaacctcctctgtgttgattcctatgcccctaaccctgcagcctctttgttttatttttttccccatctctgttggtcccagggaaagcaaggaaattttcttttgaggacttataggttgattgcccacaggtcaaactgttggcattgaactcctctcatttcttgccattggattgtttcctaaacgttggataggagaattcgaaattgttgctatttttatgagctgtgcccttgatcaaatctgtgctgtgggtctgagtcattttgccaatgtcgtcttcagtttcaacactctgatcagcatgcaggcgaggggcatgtttaatttacttcactaactgctatattctatagctttagacttcatatttcttatccacctttgtctaggctcacgatctttgggcaagggagctttgtcaccgtggttgggctagaacaaatattgagaagtttaccaacacagatgttgagaagtttattgaaaggcactgacattagcagaataagtgatggacattagttgaaccccttcagtgtctatgtgttttattgtattgtctttaactcgttcttgaagcacagatttcagcgagcctttcagctattcagtgccagcggttttccccactcaggaaagatggtgtgagccatacacacagcaggattagacggggagagtttcagctgcagcttctagtttaagaccaaagcccttcctcccgctgctgcatctgtctgagaggggaagctcttgttttccaagctggaaccgtttatgaggaaaactgagcagggtggcaaaatggaaaaggaacaattttctagtttttcctacgcgtgatattgacgcgtgctttttctttgatttgaggtacagcatgtaaataacaaatttccatattcaaaatgatcatattagagtgactgagtgaccttttgattttgaagcagactaaaatctgaccagaccacaatgaaaagtataaaattagaaacttaaattccaagctaaatttcagctttgacccacctaactccagtgaataggtggcagctcagaaacaaggacagcactgctgctgccagagcaagctcacatccagctggcacttcgtgagagctccttcctgccgggcacgtgtgagttcagcgtgggcaagagacttttatgcacattctgtcattcaaaagggaaatgatgccaaccccagatgcagcatgtcctgaatgaatgatctgtaaaatacaataataaaagcttatagtttgagtagaa

SEQ ID NO: 308172 - DNA, 3548 bp, Homo sapiens
aagtgcacggaggagttccgggggccaggcggccgccgcgagtctggtatcctgagcttcgtgagttgagcgctgctgctccgcggtggagtcaccgcaccgctcccgggatcatggtgttctacttcaccagcagcagcgttaattcatctgcctacactatttacatgggaaaagataaatatgaaaatgaagatctgatcaagcatggctggcctgaagatatctggtttcatgtggacaaactctcttcggctcatgtataccttcgattacataagggagagaatatagaagacatcccaaaggaagtgctgatggactgtgcccaccttgtgaaggccaatagcattcaaggtaaaaattgtgacagtggagaagaaagtaaatgagatcctgaaccgattagaaaagaccaaagtcgagcggttcccagacctagcagcagagaaagaatgcagagatcgtgaagagaggaatgagaaaaaagcccaaattcaggaaatgaaaaagagagaaaaagaagaaatgaagaagaagagggaaatggatgaacttaggagctattcatcactaatgaaagttgaaaatatgtcttcaaatcaggatggcaatgattcagatgaattcatgtaaaaggagaaaaggagaaaaggacctttgaaagatgtgaatgtagagacaattgcagaccttttggtttcatctgtgttctgaagtataaaatacaaccaaaattctaccttcatcctacccagaaattattgattttcaagttttaaaaaaattgtaccttttttgctgacagaaaaggatcagatatgtataaaatagttgaacttgacagcatataacttaaagtgaaaatgtttttgccagaacatgtcttggtaccttgtgaaagcaggctgcccttgttcttgagatagactttaaaatgaaccagctctgaaaagtacttctgctgctctggtctatccctgaaaacagatgtcttgaaacacttttcatattcttaaaataatcttcacttctgttaagaagaacatgttggtgggtaattatgcgaatgtttccctgtccctgatttctcgattaggcgtatgggttttgaaaaagagatttttcagaagattgtcagcttcagtattcacgttccatcgtgtcatctgggtctgttagtgtagtgaccctcagtgcagtctgtcccagcgtttacgtccttgcttcctctgagcagaggcctccatcttagtatcaacatatttaaagaaattgatggtgttcatcaagctggggcctgtggcagttgttgcctgagcaccaagtaacccaagccacctatgtgacaacttctgggcccaggagtaatttctcagcattgagggtaaaataggatggagtgctctgttgatcatttgggagatgtaggttacctgatttgtgccttaggatgcagcgtgaagcagaagtccatattgcaattatgattttagaaggaactaagcattttactcacacccacagcagcaagaatgacctcctgcagcagatattccacctgtaatagcactttggaactgtgggcaaaaccaaaaggctagtgtttccatttattccatgttggtgtatggggttgaactggaaaattccctgaggcaaaactcactggccaaattttgagagggtatagaaaatgactttagagatgagtggttttgtgtatgtgtctgatgatattcagtctgatgttccgcaattttaaaagttataataaaataccatttttttaatctggaaggacattgatatatgaattcttagaatttgctattaaaaagggtagcccccattccacaagctggttttgagggtgatcttgctctaaaaaacctcattcatcataggctcagtctgacaggttctgtacggggctatcatctttctcctcctctgctaaatgcctctttcttccagctgctcactgggtcaaagggatgtcctttctcagatgtattcttgatacatctcagatgtattcgtagctgtgctccttccatacttccaaggagtccggcttctacagaattcctctgtacctcacactgcaacacatgtagatagcgcttttgaaaaatacatatatttttactatagtatgagaggtcctggggctcaaactttaaacatttcctaactcagcttacactggtttaaaatgtccaggtctctgctgaattctcttgttgaattcatagctctccaacctcctctgtgttgattcctatgcccctaaccctgcagcctctttgttttatttttttccccatctctgttggtcccagggaaagcaaggaaattttcttttgaggacttataggttgattgcccacaggtcaaactgttggcattgaactcctctcatttcttgccattggattgtttcctaaacgttggataggagaattcgaaattgttgctatttttatgagctgtgcccttgatcaaatctgtgctgtgggtctgagtcattttgccaatgtcgtcttcagtttcaacactctgatcagcatgcaggcgaggggcatgtttaatttacttcactaactgctatattctatagctttagacttcatatttcttatccacctttgtctaggctcacgatctttgggcaagggagctttgtcaccgtggttgggctagaacaaatattgagaagtttaccaacacagatgttgagaagtttattgaaaggcactgacattagcagaataagtgatggacattagttgaaccccttcagtgtctatgtgttttattgtattgtctttaactcgttcttgaagcacagatttcagcgagcctttcagctattcagtgccagcggttttccccactcaggaaagatggtgtgagccatacacacagcaggattagacggggagagtttcagctgcagcttctagtttaagaccaaagcccttcctcccgctgctgcatctgtctgagaggggaagctcttgttttccaagctggaaccgtttatgaggaaaactgagcagggtggcaaaatggaaaaggaacaattttctagtttttcctacgcgtgatattgacgcgtgctttttctttgatttgaggtacagcatgtaaataacaaatttccatattcaaaatgatcatattagagtgactgagtgaccttttgattttgaagcagactaaaatctgaccagaccacaatgaaaagtataaaattagaaacttaaattccaagctaaatttcagctttgacccacctaactccagtgaataggtggcagctcagaaacaaggacagcactgctgctgccagagcaagctcacatccagctggcacttcgtgagagctccttcctgccgggcacgtgtgagttcagcgtgggcaagagacttttatgcacattctgtcattcaaaagggaaatgatgccaaccccagatgcagcatgtcctgaatgaatgatctgtaaaatacaataataaaagcttatagtttgagtagaa

SEQ ID NO: 308173 - DNA, 3848 bp, Homo sapiens
aagtgcacggaggagttccgggggccaggcggccgccgcgagtctggtatcctgagcttcgtgagttgagcgctgctgctccgcggtggagtcaccgcaccgctcccgggatcatggtgttctacttcaccagcagcagcgttaattcatctgcctacactatttacatgggaaaagataaatatgaaagctgaggcgagaggatcacttgagcccaggagttcgagacctgcctgagcaacatagggagaccctgtctctacaaaaaacaacaataaaagaaaatattagctgggcatagtgacacacacctgttgtccttgctactctggaggctgaggcaggaagatcgcttgagcctgggaggtaggctgcagtgagctgtgatcatgccactgcattccagcttaagagacagcgagaatctgttgtctgaaatgaagatctgatcaagcatggctggcctgaagatatctgggagagaatatagaagacatcccaaaggaagtgctgatggactgtgcccaccttgtgaaggccaatagcattcaaggctgcaagatgaacaacgttaatgtggtatatacgccgtggtctaacctgaagaaaacagctgacatggatgtggggcagataggctttcacaggcagaaggatgtaaaaattgtgacagtggagaagaaagtaaatgagatcctgaaccgattagaaaagaccaaagtcgagcggttcccagacctagcagcagagaaagaatgcagagatcgtgaagagaggaatgagaaaaaagcccaaattcaggaaatgaaaaagagagaaaaagaagaaatgaagaagaagagggaaatggatgaacttaggagctattcatcactaatgaaagttgaaaatatgtcttcaaatcaggatggcaatgattcagatgaattcatgtaaaaggagaaaaggagaaaaggacctttgaaagatgtgaatgtagagacaattgcagaccttttggtttcatctgtgttctgaagtataaaatacaaccaaaattctaccttcatcctacccagaaattattgattttcaagttttaaaaaaattgtaccttttttgctgacagaaaaggatcagatatgtataaaatagttgaacttgacagcatataacttaaagtgaaaatgtttttgccagaacatgtcttggtaccttgtgaaagcaggctgcccttgttcttgagatagactttaaaatgaaccagctctgaaaagtacttctgctgctctggtctatccctgaaaacagatgtcttgaaacacttttcatattcttaaaataatcttcacttctgttaagaagaacatgttggtgggtaattatgcgaatgtttccctgtccctgatttctcgattaggcgtatgggttttgaaaaagagatttttcagaagattgtcagcttcagtattcacgttccatcgtgtcatctgggtctgttagtgtagtgaccctcagtgcagtctgtcccagcgtttacgtccttgcttcctctgagcagaggcctccatcttagtatcaacatatttaaagaaattgatggtgttcatcaagctggggcctgtggcagttgttgcctgagcaccaagtaacccaagccacctatgtgacaacttctgggcccaggagtaatttctcagcattgagggtaaaataggatggagtgctctgttgatcatttgggagatgtaggttacctgatttgtgccttaggatgcagcgtgaagcagaagtccatattgcaattatgattttagaaggaactaagcattttactcacacccacagcagcaagaatgacctcctgcagcagatattccacctgtaatagcactttggaactgtgggcaaaaccaaaaggctagtgtttccatttattccatgttggtgtatggggttgaactggaaaattccctgaggcaaaactcactggccaaattttgagagggtatagaaaatgactttagagatgagtggttttgtgtatgtgtctgatgatattcagtctgatgttccgcaattttaaaagttataataaaataccatttttttaatctggaaggacattgatatatgaattcttagaatttgctattaaaaagggtagcccccattccacaagctggttttgagggtgatcttgctctaaaaaacctcattcatcataggctcagtctgacaggttctgtacggggctatcatctttctcctcctctgctaaatgcctctttcttccagctgctcactgggtcaaagggatgtcctttctcagatgtattcttgatacatctcagatgtattcgtagctgtgctccttccatacttccaaggagtccggcttctacagaattcctctgtacctcacactgcaacacatgtagatagcgcttttgaaaaatacatatatttttactatagtatgagaggtcctggggctcaaactttaaacatttcctaactcagcttacactggtttaaaatgtccaggtctctgctgaattctcttgttgaattcatagctctccaacctcctctgtgttgattcctatgcccctaaccctgcagcctctttgttttatttttttccccatctctgttggtcccagggaaagcaaggaaattttcttttgaggacttataggttgattgcccacaggtcaaactgttggcattgaactcctctcatttcttgccattggattgtttcctaaacgttggataggagaattcgaaattgttgctatttttatgagctgtgcccttgatcaaatctgtgctgtgggtctgagtcattttgccaatgtcgtcttcagtttcaacactctgatcagcatgcaggcgaggggcatgtttaatttacttcactaactgctatattctatagctttagacttcatatttcttatccacctttgtctaggctcacgatctttgggcaagggagctttgtcaccgtggttgggctagaacaaatattgagaagtttaccaacacagatgttgagaagtttattgaaaggcactgacattagcagaataagtgatggacattagttgaaccccttcagtgtctatgtgttttattgtattgtctttaactcgttcttgaagcacagatttcagcgagcctttcagctattcagtgccagcggttttccccactcaggaaagatggtgtgagccatacacacagcaggattagacggggagagtttcagctgcagcttctagtttaagaccaaagcccttcctcccgctgctgcatctgtctgagaggggaagctcttgttttccaagctggaaccgtttatgaggaaaactgagcagggtggcaaaatggaaaaggaacaattttctagtttttcctacgcgtgatattgacgcgtgctttttctttgatttgaggtacagcatgtaaataacaaatttccatattcaaaatgatcatattagagtgactgagtgaccttttgattttgaagcagactaaaatctgaccagaccacaatgaaaagtataaaattagaaacttaaattccaagctaaatttcagctttgacccacctaactccagtgaataggtggcagctcagaaacaaggacagcactgctgctgccagagcaagctcacatccagctggcacttcgtgagagctccttcctgccgggcacgtgtgagttcagcgtgggcaagagacttttatgcacattctgtcattcaaaagggaaatgatgccaaccccagatgcagcatgtcctgaatgaatgatctgtaaaatacaataataaaagcttatagtttgagtagaa

SEQ ID NO: 308174 - DNA, 3554 bp, Homo sapiens
aagtgcacggaggagttccgggggccaggcggccgccgcgagtctggtatcctgagcttcgtgagttgagcgctgctgctccgcggtggagtcaccgcaccgctcccgggatcatggtgttctacttcaccagcagcagcgttaattcatctgcctacactatttacatgggaaaagataaatatgaaaatgaagatctgatcaagcatggctggcctgaagatatctgggagagaatatagaagacatcccaaaggaagtgctgatggactgtgcccaccttgtgaaggccaatagcattcaaggctgcaagatgaacaacgttaatgtggtatatacgccgtggtctaacctgaagaaaacagctgacatggatgtggggcagataggctttcacaggcagaaggatgtaaaaattgtgacagtggagaagaaagtaaatgagatcctgaaccgattagaaaagaccaaagtcgagcggttcccagacctagcagcagagaaagaatgcagagatcgtgaagagaggaatgagaaaaaagcccaaattcaggaaatgaaaaagagagaaaaagaagaaatgaagaagaagagggaaatggatgaacttaggatggcaatgattcagatgaattcatgtaaaaggagaaaaggagaaaaggacctttgaaagatgtgaatgtagagacaattgcagaccttttggtttcatctgtgttctgaagtataaaatacaaccaaaattctaccttcatcctacccagaaattattgattttcaagttttaaaaaaattgtaccttttttgctgacagaaaaggatcagatatgtataaaatagttgaacttgacagcatataacttaaagtgaaaatgtttttgccagaacatgtcttggtaccttgtgaaagcaggctgcccttgttcttgagatagactttaaaatgaaccagctctgaaaagtacttctgctgctctggtctatccctgaaaacagatgtcttgaaacacttttcatattcttaaaataatcttcacttctgttaagaagaacatgttggtgggtaattatgcgaatgtttccctgtccctgatttctcgattaggcgtatgggttttgaaaaagagatttttcagaagattgtcagcttcagtattcacgttccatcgtgtcatctgggtctgttagtgtagtgaccctcagtgcagtctgtcccagcgtttacgtccttgcttcctctgagcagaggcctccatcttagtatcaacatatttaaagaaattgatggtgttcatcaagctggggcctgtggcagttgttgcctgagcaccaagtaacccaagccacctatgtgacaacttctgggcccaggagtaatttctcagcattgagggtaaaataggatggagtgctctgttgatcatttgggagatgtaggttacctgatttgtgccttaggatgcagcgtgaagcagaagtccatattgcaattatgattttagaaggaactaagcattttactcacacccacagcagcaagaatgacctcctgcagcagatattccacctgtaatagcactttggaactgtgggcaaaaccaaaaggctagtgtttccatttattccatgttggtgtatggggttgaactggaaaattccctgaggcaaaactcactggccaaattttgagagggtatagaaaatgactttagagatgagtggttttgtgtatgtgtctgatgatattcagtctgatgttccgcaattttaaaagttataataaaataccatttttttaatctggaaggacattgatatatgaattcttagaatttgctattaaaaagggtagcccccattccacaagctggttttgagggtgatcttgctctaaaaaacctcattcatcataggctcagtctgacaggttctgtacggggctatcatctttctcctcctctgctaaatgcctctttcttccagctgctcactgggtcaaagggatgtcctttctcagatgtattcttgatacatctcagatgtattcgtagctgtgctccttccatacttccaaggagtccggcttctacagaattcctctgtacctcacactgcaacacatgtagatagcgcttttgaaaaatacatatatttttactatagtatgagaggtcctggggctcaaactttaaacatttcctaactcagcttacactggtttaaaatgtccaggtctctgctgaattctcttgttgaattcatagctctccaacctcctctgtgttgattcctatgcccctaaccctgcagcctctttgttttatttttttccccatctctgttggtcccagggaaagcaaggaaattttcttttgaggacttataggttgattgcccacaggtcaaactgttggcattgaactcctctcatttcttgccattggattgtttcctaaacgttggataggagaattcgaaattgttgctatttttatgagctgtgcccttgatcaaatctgtgctgtgggtctgagtcattttgccaatgtcgtcttcagtttcaacactctgatcagcatgcaggcgaggggcatgtttaatttacttcactaactgctatattctatagctttagacttcatatttcttatccacctttgtctaggctcacgatctttgggcaagggagctttgtcaccgtggttgggctagaacaaatattgagaagtttaccaacacagatgttgagaagtttattgaaaggcactgacattagcagaataagtgatggacattagttgaaccccttcagtgtctatgtgttttattgtattgtctttaactcgttcttgaagcacagatttcagcgagcctttcagctattcagtgccagcggttttccccactcaggaaagatggtgtgagccatacacacagcaggattagacggggagagtttcagctgcagcttctagtttaagaccaaagcccttcctcccgctgctgcatctgtctgagaggggaagctcttgttttccaagctggaaccgtttatgaggaaaactgagcagggtggcaaaatggaaaaggaacaattttctagtttttcctacgcgtgatattgacgcgtgctttttctttgatttgaggtacagcatgtaaataacaaatttccatattcaaaatgatcatattagagtgactgagtgaccttttgattttgaagcagactaaaatctgaccagaccacaatgaaaagtataaaattagaaacttaaattccaagctaaatttcagctttgacccacctaactccagtgaataggtggcagctcagaaacaaggacagcactgctgctgccagagcaagctcacatccagctggcacttcgtgagagctccttcctgccgggcacgtgtgagttcagcgtgggcaagagacttttatgcacattctgtcattcaaaagggaaatgatgccaaccccagatgcagcatgtcctgaatgaatgatctgtaaaatacaataataaaagcttatagtttgagtagaa

SEQ ID NO: 308175 - DNA, 3345 bp, Homo sapiens
aagtgcacggaggagttccgggggccaggcggccgccgcgagtctggtatcctgagcttcgtgagttgagcgctgctgctccgcggtggagtcaccgcaccgctcccgggatcatggtgttctacttcaccagcagcagcgttaattcatctgcctacactatttacatgggaaaagataaatatgaaaatgaagatctgatcaagcatggctggcctgaagatatctggtttcatgtggacaaactctcttcggctcatgtataccttcgattacataagggagagaatatagaagacatcccaaaggaagtgctgatggactgtgcccaccttgtgaaggccaatagcattcaaggagctattcatcactaatgaaagttgaaaatatgtcttcaaatcaggatggcaatgattcagatgaattcatgtaaaaggagaaaaggagaaaaggacctttgaaagatgtgaatgtagagacaattgcagaccttttggtttcatctgtgttctgaagtataaaatacaaccaaaattctaccttcatcctacccagaaattattgattttcaagttttaaaaaaattgtaccttttttgctgacagaaaaggatcagatatgtataaaatagttgaacttgacagcatataacttaaagtgaaaatgtttttgccagaacatgtcttggtaccttgtgaaagcaggctgcccttgttcttgagatagactttaaaatgaaccagctctgaaaagtacttctgctgctctggtctatccctgaaaacagatgtcttgaaacacttttcatattcttaaaataatcttcacttctgttaagaagaacatgttggtgggtaattatgcgaatgtttccctgtccctgatttctcgattaggcgtatgggttttgaaaaagagatttttcagaagattgtcagcttcagtattcacgttccatcgtgtcatctgggtctgttagtgtagtgaccctcagtgcagtctgtcccagcgtttacgtccttgcttcctctgagcagaggcctccatcttagtatcaacatatttaaagaaattgatggtgttcatcaagctggggcctgtggcagttgttgcctgagcaccaagtaacccaagccacctatgtgacaacttctgggcccaggagtaatttctcagcattgagggtaaaataggatggagtgctctgttgatcatttgggagatgtaggttacctgatttgtgccttaggatgcagcgtgaagcagaagtccatattgcaattatgattttagaaggaactaagcattttactcacacccacagcagcaagaatgacctcctgcagcagatattccacctgtaatagcactttggaactgtgggcaaaaccaaaaggctagtgtttccatttattccatgttggtgtatggggttgaactggaaaattccctgaggcaaaactcactggccaaattttgagagggtatagaaaatgactttagagatgagtggttttgtgtatgtgtctgatgatattcagtctgatgttccgcaattttaaaagttataataaaataccatttttttaatctggaaggacattgatatatgaattcttagaatttgctattaaaaagggtagcccccattccacaagctggttttgagggtgatcttgctctaaaaaacctcattcatcataggctcagtctgacaggttctgtacggggctatcatctttctcctcctctgctaaatgcctctttcttccagctgctcactgggtcaaagggatgtcctttctcagatgtattcttgatacatctcagatgtattcgtagctgtgctccttccatacttccaaggagtccggcttctacagaattcctctgtacctcacactgcaacacatgtagatagcgcttttgaaaaatacatatatttttactatagtatgagaggtcctggggctcaaactttaaacatttcctaactcagcttacactggtttaaaatgtccaggtctctgctgaattctcttgttgaattcatagctctccaacctcctctgtgttgattcctatgcccctaaccctgcagcctctttgttttatttttttccccatctctgttggtcccagggaaagcaaggaaattttcttttgaggacttataggttgattgcccacaggtcaaactgttggcattgaactcctctcatttcttgccattggattgtttcctaaacgttggataggagaattcgaaattgttgctatttttatgagctgtgcccttgatcaaatctgtgctgtgggtctgagtcattttgccaatgtcgtcttcagtttcaacactctgatcagcatgcaggcgaggggcatgtttaatttacttcactaactgctatattctatagctttagacttcatatttcttatccacctttgtctaggctcacgatctttgggcaagggagctttgtcaccgtggttgggctagaacaaatattgagaagtttaccaacacagatgttgagaagtttattgaaaggcactgacattagcagaataagtgatggacattagttgaaccccttcagtgtctatgtgttttattgtattgtctttaactcgttcttgaagcacagatttcagcgagcctttcagctattcagtgccagcggttttccccactcaggaaagatggtgtgagccatacacacagcaggattagacggggagagtttcagctgcagcttctagtttaagaccaaagcccttcctcccgctgctgcatctgtctgagaggggaagctcttgttttccaagctggaaccgtttatgaggaaaactgagcagggtggcaaaatggaaaaggaacaattttctagtttttcctacgcgtgatattgacgcgtgctttttctttgatttgaggtacagcatgtaaataacaaatttccatattcaaaatgatcatattagagtgactgagtgaccttttgattttgaagcagactaaaatctgaccagaccacaatgaaaagtataaaattagaaacttaaattccaagctaaatttcagctttgacccacctaactccagtgaataggtggcagctcagaaacaaggacagcactgctgctgccagagcaagctcacatccagctggcacttcgtgagagctccttcctgccgggcacgtgtgagttcagcgtgggcaagagacttttatgcacattctgtcattcaaaagggaaatgatgccaaccccagatgcagcatgtcctgaatgaatgatctgtaaaatacaataataaaagcttatagtttgagtagaa

SEQ ID NO: 308176 - DNA, 3024 bp, Homo sapiens
cttggggtggagagaagtggattattgtttttctaggagctattcatcactaatgaaagttgaaaatatgtcttcaaatcaggatggcaatgattcagatgaattcatgtaaaaggagaaaaggagaaaaggacctttgaaagatgtgaatgtagagacaattgcagaccttttggtttcatctgtgttctgaagtataaaatacaaccaaaattctaccttcatcctacccagaaattattgattttcaagttttaaaaaaattgtaccttttttgctgacagaaaaggatcagatatgtataaaatagttgaacttgacagcatataacttaaagtgaaaatgtttttgccagaacatgtcttggtaccttgtgaaagcaggctgcccttgttcttgagatagactttaaaatgaaccagctctgaaaagtacttctgctgctctggtctatccctgaaaacagatgtcttgaaacacttttcatattcttaaaataatcttcacttctgttaagaagaacatgttggtgggtaattatgcgaatgtttccctgtccctgatttctcgattaggcgtatgggttttgaaaaagagatttttcagaagattgtcagcttcagtattcacgttccatcgtgtcatctgggtctgttagtgtagtgaccctcagtgcagtctgtcccagcgtttacgtccttgcttcctctgagcagaggcctccatcttagtatcaacatatttaaagaaattgatggtgttcatcaagctggggcctgtggcagttgttgcctgagcaccaagtaacccaagccacctatgtgacaacttctgggcccaggagtaatttctcagcattgagggtaaaataggatggagtgctctgttgatcatttgggagatgtaggttacctgatttgtgccttaggatgcagcgtgaagcagaagtccatattgcaattatgattttagaaggaactaagcattttactcacacccacagcagcaagaatgacctcctgcagcagatattccacctgtaatagcactttggaactgtgggcaaaaccaaaaggctagtgtttccatttattccatgttggtgtatggggttgaactggaaaattccctgaggcaaaactcactggccaaattttgagagggtatagaaaatgactttagagatgagtggttttgtgtatgtgtctgatgatattcagtctgatgttccgcaattttaaaagttataataaaataccatttttttaatctggaaggacattgatatatgaattcttagaatttgctattaaaaagggtagcccccattccacaagctggttttgagggtgatcttgctctaaaaaacctcattcatcataggctcagtctgacaggttctgtacggggctatcatctttctcctcctctgctaaatgcctctttcttccagctgctcactgggtcaaagggatgtcctttctcagatgtattcttgatacatctcagatgtattcgtagctgtgctccttccatacttccaaggagtccggcttctacagaattcctctgtacctcacactgcaacacatgtagatagcgcttttgaaaaatacatatatttttactatagtatgagaggtcctggggctcaaactttaaacatttcctaactcagcttacactggtttaaaatgtccaggtctctgctgaattctcttgttgaattcatagctctccaacctcctctgtgttgattcctatgcccctaaccctgcagcctctttgttttatttttttccccatctctgttggtcccagggaaagcaaggaaattttcttttgaggacttataggttgattgcccacaggtcaaactgttggcattgaactcctctcatttcttgccattggattgtttcctaaacgttggataggagaattcgaaattgttgctatttttatgagctgtgcccttgatcaaatctgtgctgtgggtctgagtcattttgccaatgtcgtcttcagtttcaacactctgatcagcatgcaggcgaggggcatgtttaatttacttcactaactgctatattctatagctttagacttcatatttcttatccacctttgtctaggctcacgatctttgggcaagggagctttgtcaccgtggttgggctagaacaaatattgagaagtttaccaacacagatgttgagaagtttattgaaaggcactgacattagcagaataagtgatggacattagttgaaccccttcagtgtctatgtgttttattgtattgtctttaactcgttcttgaagcacagatttcagcgagcctttcagctattcagtgccagcggttttccccactcaggaaagatggtgtgagccatacacacagcaggattagacggggagagtttcagctgcagcttctagtttaagaccaaagcccttcctcccgctgctgcatctgtctgagaggggaagctcttgttttccaagctggaaccgtttatgaggaaaactgagcagggtggcaaaatggaaaaggaacaattttctagtttttcctacgcgtgatattgacgcgtgctttttctttgatttgaggtacagcatgtaaataacaaatttccatattcaaaatgatcatattagagtgactgagtgaccttttgattttgaagcagactaaaatctgaccagaccacaatgaaaagtataaaattagaaacttaaattccaagctaaatttcagctttgacccacctaactccagtgaataggtggcagctcagaaacaaggacagcactgctgctgccagagcaagctcacatccagctggcacttcgtgagagctccttcctgccgggcacgtgtgagttcagcgtgggcaagagacttttatgcacattctgtcattcaaaagggaaatgatgccaaccccagatgcagcatgtcctgaatgaatgatctgtaaaatacaataataaaagcttatagtttgagtagaa

SEQ ID NO: 308177 - DNA, 3598 bp, Homo sapiens
aagtgcacggaggagttccgggggccaggcggccgccgcgagtctggtatcctgagcttcgtgagttgagcgctgctgctccgcggtggagtcaccgcaccgctcccgggatcatggtgttctacttcaccagcagcagcgttaattcatctgcctacactatttacatgggaaaagataaatatgaaaatgaagatctgatcaagcatggctggcctgaagatatctggtttcatgtggacaaactctcttcggctcatgtataccttcgattacataagggagagaatatagaagacatcccaaaggaagtgctgatggactgtgcccaccttgtgaaggccaatagcattcaaggctgcaagatgaacaacgttaatgtggtatatacgccgtggtctaacctgaagaaaacagctgacatggatgtggggcagataggctttcacaggcagaaggatgtaaaaattgtgacagtggagaagaaagtaaatgagatcctgaaccgattagaaaagaccaaagtcgagcggttcccagacctagcagcagagaaagaatgcagagatcgtgaagagaggaatgagaaaaaagcccaaattcaggaaatgaaaaagagagaaaaagaagaaatgaagaagaagagggaaatggatgaacttaggagctattcatcactaatgaaagttgaaaatatgtcttcaaatcaggatggcaatgattcagatgaattcatgtaaaaggagaaaaggagaaaaggacctttgaaagatgtgaatgtagagacaattgcagaccttttggtttcatctgtgttctgaagtataaaatacaaccaaaattctaccttcatcctacccagaaattattgattttcaagttttaaaaaaattgtaccttttttgctgacagaaaaggatcagatatgtataaaatagttgaacttgacagcatataacttaaagtgaaaatgtttttgccagaacatgtcttggtaccttgtgaaagcaggctgcccttgttcttgagatagactttaaaatgaaccagctctgaaaagtacttctgctgctctggtctatccctgaaaacagatgtcttgaaacacttttcatattcttaaaataatcttcacttctgttaagaagaacatgttggtgggtaattatgcgaatgtttccctgtccctgatttctcgattaggcgtatgggttttgaaaaagagatttttcagaagattgtcagcttcagtattcacgttccatcgtgtcatctgggtctgttagtgtagtgaccctcagtgcagtctgtcccagcgtttacgtccttgcttcctctgagcagaggcctccatcttagtatcaacatatttaaagaaattgatggtgttcatcaagctggggcctgtggcagttgttgcctgagcaccaagtaacccaagccacctatgtgacaacttctgggcccaggagtaatttctcagcattgaggttgtgccttaggatgcagcgtgaagcagaagtccatattgcaattatgattttagaaggaactaagcattttactcacacccacagcagcaagaatgacctcctgcagcagatattccacctgtaatagcactttggaactgtgggcaaaaccaaaaggctagtgtttccatttattccatgttggtgtatggggttgaactggaaaattccctgaggcaaaactcactggccaaattttgagagggtatagaaaatgactttagagatgagtggttttgtgtatgtgtctgatgatattcagtctgatgttccgcaattttaaaagttataataaaataccatttttttaatctggaaggacattgatatatgaattcttagaatttgctattaaaaagggtagcccccattccacaagctggttttgagggtgatcttgctctaaaaaacctcattcatcataggctcagtctgacaggttctgtacggggctatcatctttctcctcctctgctaaatgcctctttcttccagctgctcactgggtcaaagggatgtcctttctcagatgtattcttgatacatctcagatgtattcgtagctgtgctccttccatacttccaaggagtccggcttctacagaattcctctgtacctcacactgcaacacatgtagatagcgcttttgaaaaatacatatatttttactatagtatgagaggtcctggggctcaaactttaaacatttcctaactcagcttacactggtttaaaatgtccaggtctctgctgaattctcttgttgaattcatagctctccaacctcctctgtgttgattcctatgcccctaaccctgcagcctctttgttttatttttttccccatctctgttggtcccagggaaagcaaggaaattttcttttgaggacttataggttgattgcccacaggtcaaactgttggcattgaactcctctcatttcttgccattggattgtttcctaaacgttggataggagaattcgaaattgttgctatttttatgagctgtgcccttgatcaaatctgtgctgtgggtctgagtcattttgccaatgtcgtcttcagtttcaacactctgatcagcatgcaggcgaggggcatgtttaatttacttcactaactgctatattctatagctttagacttcatatttcttatccacctttgtctaggctcacgatctttgggcaagggagctttgtcaccgtggttgggctagaacaaatattgagaagtttaccaacacagatgttgagaagtttattgaaaggcactgacattagcagaataagtgatggacattagttgaaccccttcagtgtctatgtgttttattgtattgtctttaactcgttcttgaagcacagatttcagcgagcctttcagctattcagtgccagcggttttccccactcaggaaagatggtgtgagccatacacacagcaggattagacggggagagtttcagctgcagcttctagtttaagaccaaagcccttcctcccgctgctgcatctgtctgagaggggaagctcttgttttccaagctggaaccgtttatgaggaaaactgagcagggtggcaaaatggaaaaggaacaattttctagtttttcctacgcgtgatattgacgcgtgctttttctttgatttgaggtacagcatgtaaataacaaatttccatattcaaaatgatcatattagagtgactgagtgaccttttgattttgaagcagactaaaatctgaccagaccacaatgaaaagtataaaattagaaacttaaattccaagctaaatttcagctttgacccacctaactccagtgaataggtggcagctcagaaacaaggacagcactgctgctgccagagcaagctcacatccagctggcacttcgtgagagctccttcctgccgggcacgtgtgagttcagcgtgggcaagagacttttatgcacattctgtcattcaaaagggaaatgatgccaaccccagatgcagcatgtcctgaatgaatgatctgtaaaatacaataataaaagcttatagtttgagtagaa

SEQ ID NO: 308178 - DNA, 1987 bp, Homo sapiens
gcggccgcctactactactactactgctcgaattcaagcttctaacgatgtacggggacatgttggtgtatggggttgaactggaaaattccctgaggcaaaactcactggccaaattttgagagggtatagaaaatgactttagagatgagtggttttgtgtatgtgtctgatgatattcagtctgatgttccgcaattttaaaagttataataaaataccatttttttaatctggaaggacattgatatatgaattcttagaatttgctattaaaaagggtagcccccattccacaagctggttttgagggtgatcttgctctaaaaaacctcattcatcataggctcagtctgacaggttctgtacggggctatcatctttctcctcctctgctaaatgcctctttcttccagctgctcactgggtcaaagggatgtcctttctcagatgtattcttgatacatctcagatgtattcgtagctgtgctccttccatacttccaaggagtccggcttctacagaattcctctgtacctcacactgcaacacatgtagatagcgcttttgaaaaatacatatatttttactatagtatgagaggtcctggggctcaaactttaaacatttcctaactcagcttacactggtttaaaatgtccaggtctctgctgaattctcttgttgaattcatagctctccaacctcctctgtgttgattcctatgcccctaaccctgcagcctctttgttttatttttttccccatctctgttggtcccagggaaagcaaggaaattttcttttgaggacttataggttgattgcccacaggtcaaactgttggcattgaactcctctcatttcttgccattggattgtttcctaaacgttggataggagaattcgaaattgttgctatttttatgagctgtgcccttgatcaaatctgtgctgtgggtctgagtcattttgccaatgtcgtcttcagtttcaacactctgatcagcatgcaggcgaggggcatgtttaatttacttcactaactgctatattctatagctttagacttcatatttcttatccacctttgtctaggctcacgatctttgggcaagggagctttgtcaccgtggttgggctagaacaaatattgagaagtttaccaacacagatgttgagaagtttattgaaaggcactgacattagcagaataagtgatggacattagttgaaccccttcagtgtctatgtgttttattgtattgtctttaactcgttcttgaagcacagatttcagcgagcctttcagctattcagtgccagcggttttccccactcaggaaagatggtgtgagccatacacacagcaggattagacggggagagtttcagctgcagcttctagtttaagaccaaagcccttcctcccgctgctgcatctgtctgagaggggaagctcttgttttccaagctggaaccgtttatgaggaaaactgagcagggtggcaaaatggaaaaggaacaattttctagtttttcctacgcgtgatattgacgcgtgctttttctttgatttgaggtacagcatgtaaataacaaatttccatattcaaaatgatcatattagagtgactgagtgaccttttgattttgaagcagactaaaatctgaccagaccacaatgaaaagtataaaattagaaacttaaattccaagctaaatttcagctttgacccacctaactccagtgaataggtggcagctcagaaacaaggacagcactgctgctgccagagcaagctcacatccagctggcacttcgtgagagctccttcctgccgggcacgtgtgagttcagcgtgggcaagagacttttatgcacattctgtcattcaaaagggaaatgatgccaaccccagatgcagcatgtcctgaatgaatgatctgtaaaatacaataataaaagcttatagtttgagtagaa

SEQ ID NO: 308179 - DNA, 806 bp, Homo sapiens
aagtgcacggaggagttccgggggccaggcggccgccgcgagtctggtatcctgagcttcgtgagttgagcgctgctgctccgcggtggagtcaccgcaccgctcccgggatcatggtgttctacttcaccagcagcagcgttaattcatctgcctacactatttacatgggaaaagataaatatgaaaatgaagatctgatcaagcatggctggcctgaagatatctggtttcatgtggacaaactctcttcggctcatgtataccttcgattacataagggagagaatatagaagacatcccaaaggaagtgctgatggactgtgcccaccttgtgaaggccaatagcattcaaggtaaaaattgtgacagtggagaagaaagtaaatgagatcctgaaccgattagaaaagaccaaagtcgagcggttcccagacctagcagcagagaaagaatgcagagatcgtgaagagaggaatgagaaaaaagcccaaattcaggaaatgaaaaagagagaaaaagaagaaatgaagaagaagagggaaatggatgaacttaggtatgtcggagctgtggcattgagactgacctcaaagattattccctgatgattttaatcatgtattagccattaagaacgatatattggtggaaggagggacatgtaacaagctcagcttaagctcaaccttaaatcagttttttaaaaaaaaggcatttatattaatgtggttgggttaaaagaattgcttgtttatggcagcagggatatgaaagtggatgaaataaaataactaattttatt

SEQ ID NO: 308180 - DNA, 198 bp, Homo sapiens
catggctggcctgaagatatctggtaagtaacaattttggttctgccctctgtagatcatcatttcctttcttagacttggccaagcattcaaactagaatcatgctttgtactgtggtttatgggtcttcagggttaaacagctgactgccagttccttcatttctaattaccttgcaagttggaaatgatgttttt

SEQ ID NO: 308181 - DNA, 519 bp, Homo sapiens
acttattaagtgtcaatattttcatattacagccttctcttattttaaacaaacattcccgtaatgcacacagtaaatttacttttcagtgttctgtaacagttgaagaacctctgcttttagtaaaatcatgcctagtaggtaaggcagcaaatgccctttgagtgctccagtgtcaatggataatgaggtagtggaccaattggtttatttttgtgtttcagggagagaatatagaagacatcccaaaggaagtgctgatggactgtgcccaccttgtgaaggccaatagcattcaaggtcagttttcctagaggtgtttttagaattagcacggactttctctgtgtctgaaatggattacattttagtgagcatgctgttgactttggcctccatcaaagaataacatgtgctgtgcctttgccatgttttgttctttaagatggatggcaattttggtacctgtcaaagaactaaaaactgatctccccacccttgtcattttgaccgtcctgt

SEQ ID NO: 308182 - DNA, 2581 bp, Homo sapiens
caggggcggaggcggcggccagggaggaagcggaggaggcggaggcggccgcggcgttcgcccgcccgctcgctcgctcggtttccccgcccccgccgggcttaacgccgctgaaggtatccgggtgcgcgctgtcgcaacctgccctcatcctggcccgcgactgtaagaccggacccacatccagaccaatcttcctgtccgggctgctgcgacgcgggctccgcaggttgcaggcgggcggccggggcgcctgaaggttaccgagtgcatgagcgcctagcgcttcccgcgctgccccgcccgctggcccgccgacccgcccgccggctcgcccgccagcccctcggcgcccggcggcggcggcggcggtggcggcgacggtcgcaggaggtgccgtctgcctcccaggtgcgcgcttcgctcccggagccgcggaactcggcggccgccatggcgtccaacatggaccgggagatgatcctggcggattttcaggcatgtactggcattgaaaacattgacgaagctattacattgcttgaacaaaataattgggacttagtggcagctatcaatggtgtaataccacaggaaaatggcattctacaaagtgaatatggaggtgagaccataccaggacctgcatttaatccagcaagtcatccagcttcagctcctacttcctcttcttcttcagcgtttcgacctgtaatgccatccaggcagattgtagaaaggcaacctcggatgctggacttcagggttgaatacagagacagaaatgttgatgtggtacttgaagacacctgtactgttggagagattaaacagattctagaaaatgaacttcagatacctgtgtccaaaatgctgttaaaaggctggaagacgggagatgtggaagacagtacggtcctaaaatctctacacttgccaaaaaacaacagtctttatgtccttacaccagatttgccaccaccttcatcatctagtcatgctggtgccctgcaggagtcattaaatcaaaacttcatgctgatcatcacccaccgagaagtccagcgggagtacaacctgaacttctcaggaagcagtactattcaagaggtaaagagaaatgtgtatgaccttacaagtatccccgttcgccaccaattatgggagggctggccaacttctgctacagacgactcaatgtgtcttgctgaatcagggctctcttatccctgccatcgacttacagtgggaagaagatcttcacctgcacagacccgggaacagtcggaagaacaaatcaccgatgttcatatggttagtgatagcgatggagatgactttgaagatgctacagaatttggggtggatgatggagaagtatttggcatggcgtcatctgccttgagaaaatctccaatgatgccagaaaacgcagaaaatgaaggagatgccttattacaatttacagcagagttttcttcaagatatggtgattgccatcctgtattttttattggctcattagaagctgcttttcaagaggccttctatgtgaaagcccgagatagaaagcttcttgctatctacctccaccatgatgaaagtgtgttaaccaacgtgttctgctcacaaatgctttgtgctgaatccattgtttcttatctgagtcaaaattttataacctgggcttgggatctgacaaaggactccaacagagcaagatttctcactatgtgcaatagacactttggcagtgttgtggcacaaaccattcggactcaaaaaacggatcagtttccgcttttcctgattattatgggaaagcgatcatctaatgaagtgttgaatgtgatacaagggaacacaacagtagatgagttaatgatgagactcatggctgcaatggagatcttcacagcccaacaacaggaagatataaaggacgaggatgaacgtgaagccagagaaaatgtgaagagagagcaagatgaggcctatcgcctttcacttgaggctgacagagcaaagagggaagctcacgagagagagatggcagaacagtttcgtttggagcagattcgcaaagaacaagaagaggaacgtgaggccatccggctgtccttagagcaagccctgcctcctgagccaaaggaagaaaatgctgagcctgtgagcaaactgcggatccggacccccagtggcgagttcttggagcggcgtttcctggccagcaacaagctccagattgtctttgattttgtagcttccaaaggatttccatgggatgagtacaagttactgagcacctttcctaggagagacgtaactcaactggacccaaataaatcattattggaggtaaagttgttccctcaagaaacccttttccttgaagcaaaagagtaaacacggcccagcggtggaaccagccattccttgacaagccagcagcctgcgtcaggagaagggctcctcgccaacccacccacacgctcgtctcactcaattcaatgtcacacttctgcctcttgcaaaattgctggaaaaagtaataataaatatagctacttaagatttccca

SEQ ID NO: 308183 - DNA, 906 bp, Homo sapiens
  misc_feature (11)..(11): n is a, c, g, or t
  misc_feature (18)..(19): n is a, c, g, or t
  misc_feature (22)..(22): n is a, c, g, or t
  misc_feature (32)..(32): n is a, c, g, or t
ttttttggccntaaaaannccnccggaagggntccaacagagcaagatttctcactatgtgcaatagacactttggcagtgttgtggcacaaaccattcggactcaaaaaacggatcagtttccgcttttcctgattattatgggaaagcgatcatctaatgaagtgttgaatgtgatacaagggaacacaacagtagatgagttaatgatgagactcatggctgcaatggagatcttcacagcccaacaacaggaagatataaaggacgaggatgaacgtgaagccagagaaaatgtgaagagagagcaagatgaggcctatcgcctttcacttgaggctgacagagcaaagagggaagctcacgagagagagatggcagaacagtttcgtttggagcagattcgcaaagaacaagaagaggaacgtgaggccatccggctgtccttagagcaagccctgcctcctgagccaaaggaagaaaatgctgagcctgtgagcaaactgcggatccggacccccagtggcgagttcttggagcggcgtttcctggccagcaacaagctccagattgtctttgattttgtagcttccaaaggatttccatgggatgagtacaagttactgagcacctttcctaggagagacgtaactcaactggacccaaataaatcattattggaggtaaagttgttccctcaagaaacccttttccttgaagcaaaagagtaaacacggcccagcggtggaaccagccattccttgacaagccagcagcctgcgtcaggagaagggctcctcgccaacccacccacacgctcgtctcactcaattcaatgtcacacttctgcctcttgcaaaattgctggaaaaagtaataataaatatagctacttaagatttccca

SEQ ID NO: 308184 - DNA, 526 bp, Homo sapiens
ttttctttatctccaccgccattattatctccaaatacacaacatgatctagccatccggctgtccttagagcaagccctgcctcctgagccaaaggaagaaaatgctgagcctgtgagcaaactgcggatccggacccccagtggcgagttcttggagcggcgtttcctggccagcaacaagctccagattgtctttgattttgtagcttccaaaggatttccatgggatgagtacaagttactgagcacctttcctaggagagacgtaactcaactggacccaaataaatcattattggaggtaaagttgttccctcaagaaacccttttccttgaagcaaaagagtaaacacggcccagcggtggaaccagccattccttgacaagccagcagcctgcgtcaggagaagggctcctcgccaacccacccacacgctcgtctcactcaattcaatgtcacacttctgcctcttgcaaaattgctggaaaaagtaataataaatatagctacttaagatttccca

SEQ ID NO: 308185 - DNA, 568 bp, Homo sapiens
cagtcagttgttaaccagcacctttcccaagggccccctgttctgccagccaggctgagctgtgcaagaaaggtacctccaccaaacttgactatgagatttgattttcctgagccctggtttcctcatttataaaatgagaataacaacacctgccttgcaggttattttgaagatcaactaagatactgcgagactcttcgtgccagtgcatagtttcagaatcagtgtgcatagataaaatgaaggccatgtagagaatatagtgcttgtttcagtcttttgaatatgtgttcttcatctttttaggtaactcaactggacccaaataaatcattattggaggtaaagttgttccctcaagaaacccttttccttgaagcaaaagagtaaacacggcccagcggtggaaccagccattccttgacaagccagcagcctgcgtcaggagaagggctcctcgccaacccacccacacgctcgtctcactcaattcaatgtcacacttctgcctcttgcaaaattgctggaaaaagtaataataaatatagctacttaagatttccca

SEQ ID NO: 308186 - DNA, 334 bp, Homo sapiens
  misc_feature (11)..(12): n is a, c, g, or t
  misc_feature (17)..(17): n is a, c, g, or t
taagtggaganngtganaggtgataaagggaaaagaattaatgaggaattgtatatttaaaggagagagaccttggtaactcaactggacccaaataaatcattattggaggtaaagttgttccctcaagaaacccttttccttgaagcaaaagagtaaacacggcccagcggtggaaccagccattccttgacaagccagcagcctgcgtcaggagaagggctcctcgccaacccacccacacgctcgtctcactcaattcaatgtcacacttctgcctcttgcaaaattgctggaaaaagtaataataaatatagctacttaagatttccca

SEQ ID NO: 308187 - DNA, 316 bp, Homo sapiens
  misc_feature (10)..(10): n is a, c, g, or t
  misc_feature (35)..(35): n is a, c, g, or t
cccccgcccnagtaaaaaaactcatcgaaacacancaagcacgctaattaaagtcaggtaactcaactggacccaaataaatcattattggaggtaaagttgttccctcaagaaacccttttccttgaagcaaaagagtaaacacggcccagcggtggaaccagccattccttgacaagccagcagcctgcgtcaggagaagggctcctcgccaacccacccacacgctcgtctcactcaattcaatgtcacacttctgcctcttgcaaaattgctggaaaaagtaataataaatatagctacttaagatttccca

SEQ ID NO: 308188 - DNA, 319 bp, Homo sapiens
  misc_feature (46)..(47): n is a, c, g, or t
aaaagacgaatccaggcgcgtgtggcggtacatgggcgggcgcgcnnccagaccccttaggtaactcaactggacccaaataaatcattattggaggtaaagttgttccctcaagaaacccttttccttgaagcaaaagagtaaacacggcccagcggtggaaccagccattccttgacaagccagcagcctgcgtcaggagaagggctcctcgccaacccacccacacgctcgtctcactcaattcaatgtcacacttctgcctcttgcaaaattgctggaaaaagtaataataaatatagctacttaagatttccca

SEQ ID NO: 308189 - DNA, 314 bp, Homo sapiens
  misc_feature (43)..(45): n is a, c, g, or t
tgtaaggcgaaattttttttttgtgttatattatttattttgnnnatattattcggtaactcaactggacccaaataaatcattattggaggtaaagttgttccctcaagaaacccttttccttgaagcaaaagagtaaacacggcccagcggtggaaccagccattccttgacaagccagcagcctgcgtcaggagaagggctcctcgccaacccacccacacgctcgtctcactcaattcaatgtcacacttctgcctcttgcaaaattgctggaaaaagtaataataaatatagctacttaagatttccca

SEQ ID NO: 308190 - DNA, 874 bp, Homo sapiens
tcaattcattcttagctaccacttgccatagcgattgacacccctggccaagcgcaaggatgccctgcaggagtcattaaatcaaaacttcatgctgatcatcacccaccgagaagtccagcgggagtacaacctgaacttctcaggaagcagtactattcaagaggtaaagagaaatgtgtatgaccttacaagtatccccgttcgccaccaattatgggagggctggccaacttctgctacagacgactcaatgtgtcttgctgaatcagggctctcttatccctgccatcgacttacagtgggaagaagatcttcacctgcacagacccgggaacagtcggaagaacaaatcaccgatgttcatatggttagtgatagcgatggagatgactttgaagatgctacagaatttggggtggatgatggagaagtatttggcatggcgtcatctgccttgagaaaatctccaatgaatgatgcagaaaagcaagacaatgaaaggagatgcctataaaattacagcagagttactacaaagatatgagagaagacatcctgtattaaaatggcttcatagaagcggcaacaagaggccgtctaagtgaacagcccgagatagaacgcactagcgcaactagctcaacaagatgaagtgtgtaacaaaggtacgtcacaaatgctggctgaatccatggtcctcaattgagtcaacaattactaaccggcctgggaatcgacaacggacacaaccgagcagagctcactacgtgccaagacacttggcagagtggagcacaaccaaggacgaagcaaggatcaggaccgcagagcagagaaaagggaagggacacaaagaaggtgaaggaaagag

SEQ ID NO: 308191 - DNA, 382 bp, Homo sapiens
  misc_feature (22)..(22): n is a, c, g, or t
  misc_feature (50)..(50): n is a, c, g, or t
  misc_feature (53)..(53): n is a, c, g, or t
  misc_feature (57)..(57): n is a, c, g, or t
agaaaggataaaaggggagggnttgtttggaattgtatttaaattaatanatntatntttcgtaactcaactggacccaaataaatcattattggaggtaaagttgttccctcaagaaacccttttccttgaagcaaaagagtaaacacggcccagcggtggaaccagccattccttgacaagccagcagcctgcgtcaggagaagggctcctcgccaacccacccacacgctcgtctcactcaattcaatgtcacacttctgcctcttgcaaaattgctggaaaaagtaataataaatatagctacttaagatttcccacccatccatgagtatatattcccaacccttattacagagaattacaactctgccaccctccc

SEQ ID NO: 308192 - DNA, 902 bp, Homo sapiens
cattttgaggccacttttgaaatagaaccaatatttttgccatttcagaaaaattgtcgtctgtgtgccaaagacagagagcatgcagtaaaagtgcaccatagcatggatgttggactcaagcagggctcacttactaggcaggtgacttgttcctgaaaaccagtctggctgtgaacatcatccagatcctcacctcagcaaaatcacagtctgtcattaactgaagcaaatgaaaattctaaactttatgagggcataatactcagcaaagaacacaaatcctaacagtatagtttgaatttgcacaacatgaacacatccatataaacaactctttggttaaaagaacagaatatgtaacgagtagaaaaaagaaaaagaggagattagggcacatagagacacaaggaagaacaatgtgaacacagggaggagacagccatcaacaagccaagaagagaggccccagaagacacgcaaactgctgacaccttgatattggatttctagtctcagaattgcatgtactggcattgaaaacattgacgaagctattacattgcttgaacaaaataattgggacttagtggcagctatcaatggtgtaataccacaggaaaatggcattctacaaagtgaatatggaggtgagaccataccaggacctgcatttaatccagcaagtcatccagcttcagctcctacttcctcttcttcttcagcgtttcgacctgtaatgccatccaggcagattgtagaaaggcaacctcggatgctggacttcagggttgaatacagagacagaaatgttgatgtggtacttgaagacacctgtactgttggtaaggtttttcctgccataaagccttcacaaataaataattaggtaaacattcagg

SEQ ID NO: 308193 - DNA, 184 bp, Homo sapiens
ggccctcttcccctcccacttccaacctcgtgggtttccggtgccacaagggagtcttcttcccagcgtttgaacgctgcagtggtgtgtcatttaggcttttatacggtgcgtggcgtgtgtgtgtgtgtgtggcgagctatggagaagcgtataatttatatgctatcatgagtgtgtagaa

SEQ ID NO: 308194 - DNA, 2527 bp, Homo sapiens
caggggcggaggcggcggccagggaggaagcggaggaggcggaggcggccgcggcgttcgcccgcccgctcgctcgctcggtttccccgcccccgccgggcttaacgccgctgaaggtatccgggtgcgcgctgtcgcaacctgccctcatcctggcccgcgactgtaagaccggacccacatccagaccaatcttcctgtccgggctgctgcgacgcgggctccgcaggttgcaggcgggcggccggggcgcctgaaggttaccgagtgcatgagcgcctagcgcttcccgcgctgccccgccggcggcggcggcggtggcggcgacggtcgcaggaggtgccgtctgcctcccaggtgcgcgcttcgctcccggagccgcggaactcggcggccgccatggcgtccaacatggaccgggagatgatcctggcggattttcaggcatgtactggcattgaaaacattgacgaagctattacattgcttgaacaaaataattgggacttagtggcagctatcaatggtgtaataccacaggaaaatggcattctacaaagtgaatatggaggtgagaccataccaggacctgcatttaatccagcaagtcatccagcttcagctcctacttcctcttcttcttcagcgtttcgacctgtaatgccatccaggcagattgtagaaaggcaacctcggatgctggacttcagggttgaatacagagacagaaatgttgatgtggtacttgaagacacctgtactgttggagagattaaacagattctagaaaatgaacttcagatacctgtgtccaaaatgctgttaaaaggctggaagacgggagatgtggaagacagtacggtcctaaaatctctacacttgccaaaaaacaacagtctttatgtccttacaccagatttgccaccaccttcatcatctagtcatgctggtgccctgcaggagtcattaaatcaaaacttcatgctgatcatcacccaccgagaagtccagcgggagtacaacctgaacttctcaggaagcagtactattcaagaggtaaagagaaatgtgtatgaccttacaagtatccccgttcgccaccaattatgggagggctggccaacttctgctacagacgactcaatgtgtcttgctgaatcagggctctcttatccctgccatcgacttacagtgggaagaagatcttcacctgcacagacccgggaacagtcggaagaacaaatcaccgatgttcatatggttagtgatagcgatggagatgactttgaagatgctacagaatttggggtggatgatggagaagtatttggcatggcgtcatctgccttgagaaaatctccaatgatgccagaaaacgcagaaaatgaaggagatgccttattacaatttacagcagagttttcttcaagatatggtgattgccatcctgtattttttattggctcattagaagctgcttttcaagaggccttctatgtgaaagcccgagatagaaagcttcttgctatctacctccaccatgatgaaagtgtgttaaccaacgtgttctgctcacaaatgctttgtgctgaatccattgtttcttatctgagtcaaaattttataacctgggcttgggatctgacaaaggactccaacagagcaagatttctcactatgtgcaatagacactttggcagtgttgtggcacaaaccattcggactcaaaaaacggatcagtttccgcttttcctgattattatgggaaagcgatcatctaatgaagtgttgaatgtgatacaagggaacacaacagtagatgagttaatgatgagactcatggctgcaatggagatcttcacagcccaacaacaggaagatataaaggacgaggatgaacgtgaagccagagaaaatgtgaagagagagcaagatgaggcctatcgcctttcacttgaggctgacagagcaaagagggaagctcacgagagagagatggcagaacagtttcgtttggagcagattcgcaaagaacaagaagaggaacgtgaggccatccggctgtccttagagcaagccctgcctcctgagccaaaggaagaaaatgctgagcctgtgagcaaactgcggatccggacccccagtggcgagttcttggagcggcgtttcctggccagcaacaagctccagattgtctttgattttgtagcttccaaaggatttccatgggatgagtacaagttactgagcacctttcctaggagagacgtaactcaactggacccaaataaatcattattggaggtaaagttgttccctcaagaaacccttttccttgaagcaaaagagtaaacacggcccagcggtggaaccagccattccttgacaagccagcagcctgcgtcaggagaagggctcctcgccaacccacccacacgctcgtctcactcaattcaatgtcacacttctgcctcttgcaaaattgctggaaaaagtaataataaatatagctacttaagatttccca

SEQ ID NO: 308195 - DNA, 2167 bp, Homo sapiens
ggccctcttcccctcccacttccaacctcgtgggtttccggtgccacaagggagtcttcttcccagcgtttgaacgctgcagtggcatgtactggcattgaaaacattgacgaagctattacattgcttgaacaaaataattgggacttagtggcagctatcaatggtgtaataccacaggaaaatggcattctacaaagtgaatatggaggtgagaccataccaggacctgcatttaatccagcaagtcatccagcttcagctcctacttcctcttcttcttcagcgtttcgacctgtaatgccatccaggcagattgtagaaaggcaacctcggatgctggacttcagggttgaatacagagacagaaatgttgatgtggtacttgaagacacctgtactgttggagagattaaacagattctagaaaatgaacttcagatacctgtgtccaaaatgctgttaaaaggctggaagacgggagatgtggaagacagtacggtcctaaaatctctacacttgccaaaaaacaacagtctttatgtccttacaccagatttgccaccaccttcatcatctagtcatgctggtgccctgcaggagtcattaaatcaaaacttcatgctgatcatcacccaccgagaagtccagcgggagtacaacctgaacttctcaggaagcagtactattcaagaggtaaagagaaatgtgtatgaccttacaagtatccccgttcgccaccaattatgggagggctggccaacttctgctacagacgactcaatgtgtcttgctgaatcagggctctcttatccctgccatcgacttacagtgggaagaagatcttcacctgcacagacccgggaacagtcggaagaacaaatcaccgatgttcatatggttagtgatagcgatggagatgactttgaagatgctacagaatttggggtggatgatggagaagtatttggcatggcgtcatctgccttgagaaaatctccaatgatgccagaaaacgcagaaaatgaaggagatgccttattacaatttacagcagagttttcttcaagatatggtgattgccatcctgtattttttattggctcattagaagctgcttttcaagaggccttctatgtgaaagcccgagatagaaagcttcttgctatctacctccaccatgatgaaagtgtgttaaccaacgtgttctgctcacaaatgctttgtgctgaatccattgtttcttatctgagtcaaaattttataacctgggcttgggatctgacaaaggactccaacagagcaagatttctcactatgtgcaatagacactttggcagtgttgtggcacaaaccattcggactcaaaaaacggatcagtttccgcttttcctgattattatgggaaagcgatcatctaatgaagtgttgaatgtgatacaagggaacacaacagtagatgagttaatgatgagactcatggctgcaatggagatcttcacagcccaacaacaggaagatataaaggacgaggatgaacgtgaagccagagaaaatgtgaagagagagcaagatgaggcctatcgcctttcacttgaggctgacagagcaaagagggaagctcacgagagagagatggcagaacagtttcgtttggagcagattcgcaaagaacaagaagaggaacgtgaggccatccggctgtccttagagcaagccctgcctcctgagccaaaggaagaaaatgctgagcctgtgagcaaactgcggatccggacccccagtggcgagttcttggagcggcgtttcctggccagcaacaagctccagattgtctttgattttgtagcttccaaaggatttccatgggatgagtacaagttactgagcacctttcctaggagagacgtaactcaactggacccaaataaatcattattggaggtaaagttgttccctcaagaaacccttttccttgaagcaaaagagtaaacacggcccagcggtggaaccagccattccttgacaagccagcagcctgcgtcaggagaagggctcctcgccaacccacccacacgctcgtctcactcaattcaatgtcacacttctgcctcttgcaaaattgctggaaaaagtaataataaatatagctacttaagatttccca

SEQ ID NO: 308196 - DNA, 2606 bp, Homo sapiens
cattttgaggccacttttgaaatagaaccaatatttttgccatttcagaaaaattgtcgtctgtgtgccaaagacagagagcatgcagtaaaagtgcaccatagcatggatgttggactcaagcagggctcacttactaggcaggtgacttgttcctgaaaaccagtctggctgtgaacatcatccagatcctcacctcagcaaaatcacagtctgtcattaactgaagcaaatgaaaattctaaactttatgagggcataatactcagcaaagaacacaaatcctaacagtatagtttgaatttgcacaacatgaacacatccatataaacaactctttggttaaaagaacagaatatgtaacgagtagaaaaaagaaaaagaggagattagggcacatagagacacaaggaagaacaatgtgaacacagggaggagacagccatcaacaagccaagaagagaggccccagaagacacgcaaactgctgacaccttgatattggatttctagtctcagaattgcatgtactggcattgaaaacattgacgaagctattacattgcttgaacaaaataattgggacttagtggcagctatcaatggtgtaataccacaggaaaatggcattctacaaagtgaatatggaggtgagaccataccaggacctgcatttaatccagcaagtcatccagcttcagctcctacttcctcttcttcttcagcgtttcgacctgtaatgccatccaggcagattgtagaaaggcaacctcggatgctggacttcagggttgaatacagagacagaaatgttgatgtggtacttgaagacacctgtactgttggagagattaaacagattctagaaaatgaacttcagatacctgtgtccaaaatgctgttaaaaggctggaagacgggagatgtggaagacagtacggtcctaaaatctctacacttgccaaaaaacaacagtctttatgtccttacaccagatttgccaccaccttcatcatctagtcatgctggtgccctgcaggagtcattaaatcaaaacttcatgctgatcatcacccaccgagaagtccagcgggagtacaacctgaacttctcaggaagcagtactattcaagaggtaaagagaaatgtgtatgaccttacaagtatccccgttcgccaccaattatgggagggctggccaacttctgctacagacgactcaatgtgtcttgctgaatcagggctctcttatccctgccatcgacttacagtgggaagaagatcttcacctgcacagacccgggaacagtcggaagaacaaatcaccgatgttcatatggttagtgatagcgatggagatgactttgaagatgctacagaatttggggtggatgatggagaagtatttggcatggcgtcatctgccttgagaaaatctccaatgatgccagaaaacgcagaaaatgaaggagatgccttattacaatttacagcagagttttcttcaagatatggtgattgccatcctgtattttttattggctcattagaagctgcttttcaagaggccttctatgtgaaagcccgagatagaaagcttcttgctatctacctccaccatgatgaaagtgtgttaaccaacgtgttctgctcacaaatgctttgtgctgaatccattgtttcttatctgagtcaaaattttataacctgggcttgggatctgacaaaggactccaacagagcaagatttctcactatgtgcaatagacactttggcagtgttgtggcacaaaccattcggactcaaaaaacggatcagtttccgcttttcctgattattatgggaaagcgatcatctaatgaagtgttgaatgtgatacaagggaacacaacagtagatgagttaatgatgagactcatggctgcaatggagatcttcacagcccaacaacaggaagatataaaggacgaggatgaacgtgaagccagagaaaatgtgaagagagagcaagatgaggcctatcgcctttcacttgaggctgacagagcaaagagggaagctcacgagagagagatggcagaacagtttcgtttggagcagattcgcaaagaacaagaagaggaacgtgaggccatccggctgtccttagagcaagccctgcctcctgagccaaaggaagaaaatgctgagcctgtgagcaaactgcggatccggacccccagtggcgagttcttggagcggcgtttcctggccagcaacaagctccagattgtctttgattttgtagcttccaaaggatttccatgggatgagtacaagttactgagcacctttcctaggagagacgtaactcaactggacccaaataaatcattattggaggtaaagttgttccctcaagaaacccttttccttgaagcaaaagagtaaacacggcccagcggtggaaccagccattccttgacaagccagcagcctgcgtcaggagaagggctcctcgccaacccacccacacgctcgtctcactcaattcaatgtcacacttctgcctcttgcaaaattgctggaaaaagtaataataaatatagctacttaagatttccca

SEQ ID NO: 308197 - DNA, 2530 bp, Homo sapiens
caggggcggaggcggcggccagggaggaagcggaggaggcggaggcggccgcggcgttcgcccgcccgctcgctcgctcggtttccccgcccccgccgggcttaacgccgctgaaggtatccgggtgcgcgctgtcgcaacctgccctcatcctggcccgcgactgtaagaccggacccacatccagaccaatcttcctgtccgggctgctgcgacgcgggctccgcaggttgcaggcgggcggccggggcgcctgaaggttaccgagtgcatgagcgcctagcgcttcccgcgctgccccgcccgctggcccgccgacccgcccgccggctcgcccgccagcccctcggcgcccggcggcggcggcggcggtggcggcgacggtcgcaggaggtgccgtctgcctcccaggtgcgcgcttcgctcccggagccgcggaactcggcggccgccatggcgtccaacatggaccgggagatgatcctggcggattttcaggcatgtactggcattgaaaacattgacgaagctattacattgcttgaacaaaataattgggacttagtggcagctatcaatggtgtaataccacaggaaaatggcattctacaaagtgaatatggaggtgagaccataccaggacctgcatttaatccagcaagtcatccagcttcagctcctacttcctcttcttcttcagcgtttcgacctgtaatgccatccaggcagattgtagaaaggcaacctcggatgctggacttcagggttgaatacagagacagaaatgttgatgtggtacttgaagacacctgtactgttggagagattaaacagattctagaaaatgaacttcagatacctgtgtccaaaatgctgttaaaaggctggaagacgggagatgtggaagacagtacggtcctaaaatctctacacttgccaaaaaacaacagtctttatgtccttacaccagatttgccaccaccttcatcatctagtcatgctggtgccctgcaggagtcattaaatcaaaacttcatgctgatcatcacccaccgagaagtaaagagaaatgtgtatgaccttacaagtatccccgttcgccaccaattatgggagggctggccaacttctgctacagacgactcaatgtgtcttgctgaatcagggctctcttatccctgccatcgacttacagtgggaagaagatcttcacctgcacagacccgggaacagtcggaagaacaaatcaccgatgttcatatggttagtgatagcgatggagatgactttgaagatgctacagaatttggggtggatgatggagaagtatttggcatggcgtcatctgccttgagaaaatctccaatgatgccagaaaacgcagaaaatgaaggagatgccttattacaatttacagcagagttttcttcaagatatggtgattgccatcctgtattttttattggctcattagaagctgcttttcaagaggccttctatgtgaaagcccgagatagaaagcttcttgctatctacctccaccatgatgaaagtgtgttaaccaacgtgttctgctcacaaatgctttgtgctgaatccattgtttcttatctgagtcaaaattttataacctgggcttgggatctgacaaaggactccaacagagcaagatttctcactatgtgcaatagacactttggcagtgttgtggcacaaaccattcggactcaaaaaacggatcagtttccgcttttcctgattattatgggaaagcgatcatctaatgaagtgttgaatgtgatacaagggaacacaacagtagatgagttaatgatgagactcatggctgcaatggagatcttcacagcccaacaacaggaagatataaaggacgaggatgaacgtgaagccagagaaaatgtgaagagagagcaagatgaggcctatcgcctttcacttgaggctgacagagcaaagagggaagctcacgagagagagatggcagaacagtttcgtttggagcagattcgcaaagaacaagaagaggaacgtgaggccatccggctgtccttagagcaagccctgcctcctgagccaaaggaagaaaatgctgagcctgtgagcaaactgcggatccggacccccagtggcgagttcttggagcggcgtttcctggccagcaacaagctccagattgtctttgattttgtagcttccaaaggatttccatgggatgagtacaagttactgagcacctttcctaggagagacgtaactcaactggacccaaataaatcattattggaggtaaagttgttccctcaagaaacccttttccttgaagcaaaagagtaaacacggcccagcggtggaaccagccattccttgacaagccagcagcctgcgtcaggagaagggctcctcgccaacccacccacacgctcgtctcactcaattcaatgtcacacttctgcctcttgcaaaattgctggaaaaagtaataataaatatagctacttaagatttccca

SEQ ID NO: 308198 - DNA, 2119 bp, Homo sapiens
  misc_feature (1005)..(1005): n is a, c, g, or t
  misc_feature (1010)..(1011): n is a, c, g, or t
  misc_feature (1017)..(1017): n is a, c, g, or t
  misc_feature (1019)..(1020): n is a, c, g, or t
caggggcggaggcggcggccagggaggaagcggaggaggcggaggcggccgcggcgttcgcccgcccgctcgctcgctcggtttccccgcccccgccgggcttaacgccgctgaaggtatccgggtgcgcgctgtcgcaacctgccctcatcctggcccgcgactgtaagaccggacccacatccagaccaatcttcctgtccgggctgctgcgacgcgggctccgcaggttgcaggcgggcggccggggcgcctgaaggttaccgagtgcatgagcgcctagcgcttcccgcgctgccccgcccgctggcccgccgacccgcccgccggctcgcccgccagcccctcggcgcccggcggcggcggcggcggtggcggcgacggtcgcaggaggtgccgtctgcctcccaggtgcgcgcttcgctcccggagccgcggaactcggcggccgccatggcgtccaacatggaccgggagatgatcctggcggattttcaggcatgtactggcattgaaaacattgacgaagctattacattgcttgaacaaaataattgggacttagtggcagctatcaatggtgtaataccacaggaaaatggcattctacaaagtgaatatggaggtgagaccataccaggacctgcatttaatccagcaagtcatccagcttcagctcctacttcctcttcttcttcagcgtttcgacctgtaatgccatccaggcagattgtagaaaggcaacctcggatgctggacttcagggttgaatacagagacagaaatgttgatgtggtacttgaagacacctgtactgttggagagattaaacagattctagaaaatgaacttcagatacctgtgtccaaaatgctgttaaaaggctggaagacgggagatgtggaagacagtacggtcctaaaatctctacacttgccaaaaaacaacagtctttatgtccttacaccagatttgccaccaccttcatcatctagtcatgctggnctcannttttcntnnagatatggtgattgccatcctgtattttttattggctcattagaagctgcttttcaagaggccttctatgtgaaagcccgagatagaaagcttcttgctatctacctccaccatgatgaaagtgtgttaaccaacgtgttctgctcacaaatgctttgtgctgaatccattgtttcttatctgagtcaaaattttataacctgggcttgggatctgacaaaggactccaacagagcaagatttctcactatgtgcaatagacactttggcagtgttgtggcacaaaccattcggactcaaaaaacggatcagtttccgcttttcctgattattatgggaaagcgatcatctaatgaagtgttgaatgtgatacaagggaacacaacagtagatgagttaatgatgagactcatggctgcaatggagatcttcacagcccaacaacaggaagatataaaggacgaggatgaacgtgaagccagagaaaatgtgaagagagagcaagatgaggcctatcgcctttcacttgaggctgacagagcaaagagggaagctcacgagagagagatggcagaacagtttcgtttggagcagattcgcaaagaacaagaagaggaacgtgaggccatccggctgtccttagagcaagccctgcctcctgagccaaaggaagaaaatgctgagcctgtgagcaaactgcggatccggacccccagtggcgagttcttggagcggcgtttcctggccagcaacaagctccagattgtctttgattttgtagcttccaaaggatttccatgggatgagtacaagttactgagcacctttcctaggagagacgtaactcaactggacccaaataaatcattattggaggtaaagttgttccctcaagaaacccttttccttgaagcaaaagagtaaacacggcccagcggtggaaccagccattccttgacaagccagcagcctgcgtcaggagaagggctcctcgccaacccacccacacgctcgtctcactcaattcaatgtcacacttctgcctcttgcaaaattgctggaaaaagtaataataaatatagctacttaagatttccca

SEQ ID NO: 308199 - DNA, 2745 bp, Homo sapiens
caggggcggaggcggcggccagggaggaagcggaggaggcggaggcggccgcggcgttcgcccgcccgctcgctcgctcggtttccccgcccccgccgggcttaacgccgctgaaggtatccgggtgcgcgctgtcgcaacctgccctcatcctggcccgcgactgtaagaccggacccacatccagaccaatcttcctgtccgggctgctgcgacgcgggctccgcaggttgcaggcgggcggccggggcgcctgaaggttaccgagtgcatgagcgcctagcgcttcccgcgctgccccgcccgctggcccgccgacccgcccgccggctcgcccgccagcccctcggcgcccggcggcggcggcggcggtggcggcgacggtcgcaggaggtgccgtctgcctcccaggtgcgcgcttcgctcccggagccgcggaactcggcggccgccatggcgtccaacatggaccgggagatgatcctggcggattttcaggcatgtactggcattgaaaacattgacgaagctattacattgcttgaacaaaataattgggacttagtggcagctatcaatggtgtaataccacaggaaaatggcattctacaaagtgaatatggaggtgagaccataccaggacctgcatttaatccagcaagtcatccagcttcagctcctacttcctcttcttcttcagcgtttcgacctgtaatgccatccaggcagattgtagaaaggcaacctcggatgctggacttcagggttgaatacagagacagaaatgttgatgtggtacttgaagacacctgtactgttggagagattaaacagattctagaaaatgaacttcagatacctgtgtccaaaatgctgttaaaaggctggaagacgggagatgtggaagacagtacggtcctaaaatctctacacttgccaaaaaacaacagtctttatgtccttacaccagatttgccaccaccttcatcatctagtcatgctggtgccctgcaggagtcattaaatcaaaacttcatgctgatcatcacccaccgagaagtccagcgggagtacaacctgaacttctcaggaagcagtactattcaagaggtaaagagaaatgtgtatgaccttacaagtatccccgttcgccaccaattatgggagggctggccaacttctgctacagacgactcaatgtgtcttgctgaatcagggctctcttatccctgccatcgacttacagtgggaagaagatcttcacctgcacagacccgggaacagtcggaagaacaaatcaccgatgttcatatggttagtgatagcgatggagatgactttgaagatgctacagaatttggggtggatgatggagaagtatttggcatggcgtcatctgccttgagaaaatctccaatgatgccagaaaacgcagaaaatgaaggagatgccttattacaatttacagcagagttttcttcaagatatggtgattgccatcctgtattttttattggctcattagaagctgcttttcaagaggccttctatgtgaaagcccgagatagaaagcttcttgctatctacctccaccatgatgaaagtgtgttaaccaacgtgttctgctcacaaatgctttgtgctgaatccattgtttcttatctgagtcaaaattttataacctgggcttgggatctgacaaaggactccaacagagcaagatttctcactatgtgcaatagacactttggcagtgttgtggcacaaaccattcggactcaaaaaacggatcagtttccgcttttcctgattattatgggaaagcgatcatctaatgaagtgttgaatgtgatacaagggaacacaacagtagatgagttaatgatgagactcatggctgcaatggagatcttcacagcccaacaacaggaagatataaaggacgaggatgaacgtgaagccagagaaaatgtgaagagagagcaagatgaggcctatcgcctttcacttgaggctgacagagcaaagagggaagctcacgagagagagatggcagaacagtttcgtttggagcagattcgcaaagaacaagaagaggaacgtgaggccatccggctgtccttagagcaagccctgcctcctgagccaaaggaagaaaatgctgagcctgtgagcaaactgcggatccggacccccagtggcgagttcttggagcggcgtttcctggccagcaacaagctccagattgtctttgattttgtagcttccaaaggatttccatgggatgagtacaagttactgagcacctttcctaggagagacgtaactcaactggacccaaataaatcattattggaggtaaagttgttccctcaagaaacccttttccttgaagcaaaagagtaaacacggcccagcggtggaaccagccattccttgacaagccagcagcctgcgtcaggagaagggctcctcgccaacccacccacacgctcgtctcactcaattcaatgtcacacttctgcctcttgcaaaattgctggaaaaagtaataataaatatagctacttaagatttcccaaaaaaaaaaaaaaacaacaaaaaacaaaaaaacccggggggtttaattgggggggggggaaaaagggcgtaggaaggtgccaggggccaaagcggttccggtgaacccagtcttctggtcacaagggggaaaacggcgggaccccaaaaggggagccgaaaaag

SEQ ID NO: 308200 - DNA, 2643 bp, Homo sapiens
caggggcggaggcggcggccagggaggaagcggaggaggcggaggcggccgcggcgttcgcccgcccgctcgctcgctcggtttccccgcccccgccgggcttaacgccgctgaaggtatccgggtgcgcgctgtcgcaacctgccctcatcctggcccgcgactgtaagaccggacccacatccagaccaatcttcctgtccgggctgctgcgacgcgggctccgcaggttgcaggcgggcggccggggcgcctgaaggttaccgagtgcatgagcgcctagcgcttcccgcgctgccccgcccgctggcccgccgacccgcccgccggctcgcccgccagcccctcggcgcccggcggcggcggcggcggtggcggcgacggtcgcaggaggtgccgtctgcctcccaggtgcgcgcttcgctcccggagccgcggaactcggcggccgccatggcgtccaacatggaccgggagatgatcctggcggattttcaggcatgtactggcattgaaaacattgacgaagctattacattgcttgaacaaaataattgggacttagtggcagctatcaatggtgtaataccacaggaaaatggcattctacaaagtgaatatggaggtgagaccataccaggacctgcatttaatccagcaagtcatccagcttcagctcctacttcctcttcttcttcagcgtttcgacctgtaatgccatccaggcagattgtagaaaggcaacctcggatgctggacttcagggttgaatacagagacagaaatgttgatgtggtacttgaagacacctgtactgttggagagattaaacagattctagaaaatgaacttcagatacctgtgtccaaaatgctgttaaaaggctggaagacgggagatgtggaagacagtacggtcctaaaatctctacacttgccaaaaaacaacagtctttatgtccttacaccagatttgccaccaccttcatcatctagtcatgctggtgccctgcaggagtcattaaatcaaaacttcatgctgatcatcacccaccgagaagtccagcgggagtacaacctgaacttctcaggaagcagtactattcaagaggtaaagagaaatgtgtatgaccttacaagtatccccgttcgccaccaattatgggagggctggccaacttctgctacagacgactcaatgtgtcttgctgaatcagggctctcttatccctgccatcgacttacagtgggaagaagatcttcacctgcacagacccgggaacagtcggaagaacaaatcaccgatgttcatatggttagtgatagcgatggagatgactttgaagatgctacagaatttggggtggatgatggagaagtatttggcatggcgtcatctgccttgagaaaatctccaatgatgccagaaaacgcagaaaatgaaggagatgccttattacaatttacagcagagttttcttcaagatatggtgattgccatcctgtattttttattggctcattagaagctgcttttcaagaggccttctatgtgaaagcccgagatagaaagcttcttgctatctacctccaccatgatgaaagtgtgttaaccaacgtgttctgctcacaaatgctttgtgctgaatccattgtttcttatctgagtcaaaattttataacctgggcttgggatctgacaaaggactccaacagagcaagatttctcactatgtgcaatagacactttggcagtgttgtggcacaaaccattcggactcaaaaaacggatcagtttccgcttttcctgattattatgggaaagcgatcatctaatgaagtgttgaatgtgatacaagggaacacaacagtagatgagttaatgatgagactcatggctgcaatggagatcttcacagcccaacaacaggaagatataaaggacgaggatgaacgtgaagccagagaaaatgtgaagagagagcaagatgaggcctatcgcctttcacttgaggctgacagagcaaagagggaagctcacgagagagagatggcagaacagtttcgtttggagcagattcgcaaagaacaagaagaggaacgtgaggccatccggctgtccttagagcaagccctgcctcctgagccaaaggaagaaaatgctgagcctgtgagcaaactgcggatccggacccccagtggcgagttcttggagcggcgtttcctggccagcaacaagctccagattgtctttgattttgtagcttccaaaggatttccatgggatgagtacaagttactgagcacctttcctaggagagacgtaactcaactggacccaaataaatcattattggaggtaaagttgttccctcaagaaacccttttccttgaagcaaaagagtaaacacggcccagcggtggaaccagccattccttgacaagccagcagcctgcgtcaggagaagggctcctcgccaacccacccacacgctcgtctcactcaattcaatgtcacacttctgcctcttgcaaaattgctggaaaaagtaataataaatatagctacttaagatttcccacccatccatgagtatatattcccaacccttattacagagaattacaactctgccaccctccc

SEQ ID NO: 308201 - DNA, 2601 bp, Homo sapiens
caggggcggaggcggcggccagggaggaagcggaggaggcggaggcggccgcggcgttcgcccgcccgctcgctcgctcggtttccccgcccccgccgggcttaacgccgctgaaggtatccgggtgcgcgctgtcgcaacctgccctcatcctggcccgcgactgtaagaccggacccacatccagaccaatcttcctgtccgggctgctgcgacgcgggctccgcaggttgcaggcgggcggccggggcgcctgaaggttaccgagtgcatgagcgcctagcgcttcccgcgctgccccgcccgctggcccgccgacccgcccgccggctcgcccgccagcccctcggcgcccggcggcggcggcggcggtggcggcgacggtcgcaggaggtgccgtctgcctcccaggtgcgcgcttcgctcccggagccgcggaactcggcggccgccatggcgtccaacatggaccgggagatgatcctggcggattttcaggcatgtactggcattgaaaacattgacgaagctattacattgcttgaacaaaataattgggacttagtggcagctatcaatggtgtaataccacaggaaaatggcattctacaaagtgaatatggaggtgagaccataccaggacctgcatttaatccagcaagtcatccagcttcagctcctacttcctcttcttcttcagcgtttcgacctgtaatgccatccaggcagattgtagaaaggcaacctcggatgctggacttcagggttgaatacagagacagaaatgttgatgtggtacttgaagacacctgtactgttggagagattaaacagattctagaaaatgaacttcagatacctgtgtccaaaatgctgttaaaaggctggaagacgggagatgtggaagacagtacggtcctaaaatctctacacttgccaaaaaacaacagtctttatgtccttacaccagatttgccaccaccttcatcatctagtcatgctggtgccctgcaggagtcattaaatcaaaacttcatgctgatcatcacccaccgagaagtccagcgggagtacaacctgaacttctcaggaagcagtactattcaagaggtaaagagaaatgtgtatgaccttacaagtatccccgttcgccaccaattatgggagggctggccaacttctgctacagacgactcaatgtgtcttgctgaatcagggctctcttatccctgccatcgacttacagtgggaagaagatcttcacctgcacagacccgggaacagtcggaagaacaaatcaccgatgttcatatggttagtgatagcgatggagatgactttgaagatgctacagaatttggggtggatgatggagaagtatttggcatggcgtcatctgccttgagaaaatctccaatgatgccagaaaacgcagaaaatgaaggagatgccttattacaatttacagcagagttttcttcaagatatggtgattgccatcctgtattttttattggctcattagaagctgcttttcaagaggccttctatgtgaaagcccgagatagaaagcttcttgctatctacctccaccatgatgaaagtgtgttaaccaacgtgttctgctcacaaatgctttgtgctgaatccattgtttcttatctgagtcaaaattttataacctgggcttgggatctgacaaaggactccaacagagcaagatttctcactatgtgcaatagacactttggcagtgttgtggcacaaaccattcggactcaaaaaacggatcagtttccgcttttcctgattattatgggaaagcgatcatctaatgaagtgttgaatgtgatacaagggaacacaacagtagatgagttaatgatgagactcatggctgcaatggagatcttcacagcccaacaacaggaagatataaaggacgaggatgaacgtgaagccagagaaaatgtgaagagagagcaagatgaggcctatcgcctttcacttgaggctgacagagcaaagagggaagctcacgagagagagatggcagaacagtttcgtttggagcagattcgcaaagaacaagaagaggaacgtgaggccatccggctgtccttagagcaagccctgcctcctgagccaaaggaagaaaatgctgagcctgtgagcaaactgcggatccggacccccagtggcgagttcttggagcggcgtttcctggccagcaacaagctccagattgtctttgattttgtagcttccaaaggatttccatgggatgagtacaagttactgagcacctttcctaggagagacgtaactcaactggacccaaataaatcattattggaggtaaagttgttccctcaagaaacccttttccttgaagcaaaagagtaaacacggcccagcggtggaaccagccattccttgacaagccagcagcctgcgtcaggagaagggctcctcgccaacccacccacacgctcgtctcactcaattcaatgtcacacttctgcctcttgcaaaatttcctcgctttagtgggtatagctacttatgaaaagattaaaaaattggcctggttggcctcat

SEQ ID NO: 308202 - DNA, 2509 bp, Homo sapiens
  misc_feature (2470)..(2471): n is a, c, g, or t
  misc_feature (2498)..(2498): n is a, c, g, or t
caggggcggaggcggcggccagggaggaagcggaggaggcggaggcggccgcggcgttcgcccgcccgctcgctcgctcggtttccccgcccccgccgggcttaacgccgctgaaggtatccgggtgcgcgctgtcgcaacctgccctcatcctggcccgcgactgtaagaccggacccacatccagaccaatcttcctgtccgggctgctgcgacgcgggctccgcaggttgcaggcgggcggccggggcgcctgaaggttaccgagtgcatgagcgcctagcgcttcccgcgctgccccgcccgctggcccgccgacccgcccgccggctcgcccgccagcccctcggcgcccggcggcggcggcggcggtggcggcgacggtcgcaggaggtgccgtctgcctcccaggtgcgcgcttcgctcccggagccgcggaactcggcggccgccatggcgtccaacatggaccgggagatgatcctggcggattttcaggcatgtactggcattgaaaacattgacgaagctattacattgcttgaacaaaataattgggacttagtggcagctatcaatggtgtaataccacaggaaaatggcattctacaaagtgaatatggaggtgagaccataccaggacctgcatttaatccagcaagtcatccagcttcagctcctacttcctcttcttcttcagcgtttcgacctgtaatgccatccaggcagattgtagaaaggcaacctcggatgctggacttcagggttgaatacagagacagaaatgttgatgtggtacttgaagacacctgtactgttggagagattaaacagattctagaaaatgaacttcagatacctgtgtccaaaatgctgttaaaaggctggaagacgggagatgtggaagacagtacggtcctaaaatctctacacttgccaaaaaacaacagtctttatgtccttacaccagatttgccaccaccttcatcatctagtcatgctggtgccctgcaggagtcattaaatcaaaacttcatgctgatcatcacccaccgagaagtccagcgggagtacaacctgaacttctcaggaagcagtactattcaagaggtaaagagaaatgtgtatgaccttacaagtatccccgttcgccaccaattatgggagggctggccaacttctgctacagacgactcaatgtgtcttgctgaatcagggctctcttatccctgccatcgacttacagtgggaagaagatcttcacctgcacagacccgggaacagtcggaagaacaaatcaccgatgttcatatggttagtgatagcgatggagatgactttgaagatgctacagaatttggggtggatgatggagaagtatttggcatggcgtcatctgccttgagaaaatctccaatgatgccagaaaacgcagaaaatgaaggagatgccttattacaatttacagcagagttttcttcaagatatggtgattgccatcctgtattttttattggctcattagaagctgcttttcaagaggccttctatgtgaaagcccgagatagaaagcttcttgctatctacctccaccatgatgaaagtgtgttaaccaacgtgttctgctcacaaatgctttgtgctgaatccattgtttcttatctgagtcaaaattttataacctgggcttgggatctgacaaaggactccaacagagcaagatttctcactatgtgcaatagacactttggcagtgttgtggcacaaaccattcggactcaaaaaacggatcagtttccgcttttcctgattattatgggaaagcgatcatctaatgaagtgttgaatgtgatacaagggaacacaacagtagatgagttaatgatgagactcatggctgcaatggagatcttcacagcccaacaacaggaagatataaaggacgaggatgaacgtgaagccagagaaaatgtgaagagagagcaagatgaggcctatcgcctttcacttgaggctgacagagcaaagagggaagctcacgagagagagatggcagaacagtttcgtttggagcagattcgcaaagaacaagaagaggaacgtgaggccatccggctgtccttagagcaagccctgcctcctgagccaaaggaagaaaatgctgagcctgtgagcaaactgcggatccggacccccagtggcgagttcttggagcggcgtttcctggccagcaacaagctccagattgtctttgattttgtagcttccaaaggatttccatgggatgagtacaagttactgagcacctttcctaggagagacgtaactcaactggacccaaataaatcattattggaggtaaagttgttccctcaagaaacccttttccttgaagcaaaagagtaaacacggcccagcggtggaaccagccattcccaaggcaaacgaacgacagcgaagacagacaagnnaagaggcgagaggaccaagcgcagcanacgaatggcta

SEQ ID NO: 308203 - DNA, 1654 bp, Homo sapiens
  misc_feature (11)..(11): n is a, c, g, or t
  misc_feature (18)..(19): n is a, c, g, or t
  misc_feature (22)..(22): n is a, c, g, or t
  misc_feature (32)..(32): n is a, c, g, or t
ttttttggccntaaaaannccnccggaagggntccaacagagcaagatttctcactatgtgcaatagacactttggcagtgttgtggcacaaaccattcggactcaaaaaacggatcagtttccgcttttcctgattattatgggaaagcgatcatctaatgaagtgttgaatgtgatacaagggaacacaacagtagatgagttaatgatgagactcatggctgcaatggagatcttcacagcccaacaacaggaagatataaaggacgaggatgaacgtgaagccagagaaaatgtgaagagagagcaagatgaggcctatcgcctttcacttgaggctgacagagcaaagagggaagctcacgagagagagatggcagaacagtttcgtttggagcagattcgcaaagaacaagaagaggaacgtgagccatccggctgtccttagagcaagccctgcctcctgagccaaaggaagaaaatctccaatgatgccagaaaacgcagaaaatgaaggagatgccttattacaatttacagcagagttttcttcaagatatggtgattgccatcctgtattttttattggctcattagaagctgcttttcaagaggccttctatgtgaaagcccgagatagaaagcttcttgctatctacctccaccatgatgaaagtgtgttaaccaacgtgttctgctcacaaatgctttgtgctgaatccattgtttcttatctgagtcaaaattttataacctgggcttgggatctgacaaaggactccaacagagcaagatttctcactatgtgcaatagacactttggcagtgttgtggcacaaaccattcggactcaaaaaacggatcagtttccgcttttcctgattattatgggaaagcgatcatctaatgaagtgttgaatgtgatacaagggaacacaacagtagatgagttaatgatgagactcatggctgcaatggagatcttcacagcccaacaacaggaagatataaaggacgaggatgaacgtgaagccagagaaaatgtgaagagagagcaagatgaggcctatcgcctttcacttgaggctgacagagcaaagagggaagctcacgagagagagatggcagaacagtttcgtttggagcagattcgcaaagaacaagaagaggaacgtgaggccatccggctgtccttagagcaagccctgcctcctgagccaaaggaagaaaatgctgagcctgtgagcaaactgcggatccggacccccagtggcgagttcttggagcggcgtttcctggccagcaacaagctccagattgtctttgattttgtagcttccaaaggatttccatgggatgagtacaagttactgagcacctttcctaggagagacgtaactcaactggacccaaataaatcattattggaggtaaagttgttccctcaagaaacccttttccttgaagcaaaagagtaaacacggcccagcggtggaaccagccattccttgacaagccagcagcctgcgtcaggagaagggctcctcgccaacccacccacacgctcgtctcactcaattcaatgtcacacttctgcctcttgcaaaattgctggaaaaagtaataataaatatagctacttaagatttccca

SEQ ID NO: 308204 - DNA, 1739 bp, Homo sapiens
ttctatatagtgctaaaagtccttctcattaagaaactgctccctcaaatataacttccgaaatttcaactgccagtatactactatttcttattgaacatatgaaacatttcaataaaaccacaaaagtattttaactgtaatttttttagactgattattcctttctggttaattctagaatgactttccagtttctaatactttaataatttgaagttatatataaaatgattataaaagtttggcaatctctatatgtttttagggaacacaacagtagatgagttaatgatgagactcatggctgcaatggagatcttcacagcccaacaacaggaagatataaaggacgaggatgaacgtgaagccagagaaaatgtgaagagagagcaagatgaggcctatcgcctttcacttgaggctgacagagcaaagagggaagctcacgagagagagatggcagaacagtttcgtttggagcagattcgcaaagaacaagaagaggaacgtgagccatccggctgtccttagagcaagccctgcctcctgagccaaaggaagaaaatctccaatgatgccagaaaacgcagaaaatgaaggagatgccttattacaatttacagcagagttttcttcaagatatggtgattgccatcctgtattttttattggctcattagaagctgcttttcaagaggccttctatgtgaaagcccgagatagaaagcttcttgctatctacctccaccatgatgaaagtgtgttaaccaacgtgttctgctcacaaatgctttgtgctgaatccattgtttcttatctgagtcaaaattttataacctgggcttgggatctgacaaaggactccaacagagcaagatttctcactatgtgcaatagacactttggcagtgttgtggcacaaaccattcggactcaaaaaacggatcagtttccgcttttcctgattattatgggaaagcgatcatctaatgaagtgttgaatgtgatacaagggaacacaacagtagatgagttaatgatgagactcatggctgcaatggagatcttcacagcccaacaacaggaagatataaaggacgaggatgaacgtgaagccagagaaaatgtgaagagagagcaagatgaggcctatcgcctttcacttgaggctgacagagcaaagagggaagctcacgagagagagatggcagaacagtttcgtttggagcagattcgcaaagaacaagaagaggaacgtgaggccatccggctgtccttagagcaagccctgcctcctgagccaaaggaagaaaatgctgagcctgtgagcaaactgcggatccggacccccagtggcgagttcttggagcggcgtttcctggccagcaacaagctccagattgtctttgattttgtagcttccaaaggatttccatgggatgagtacaagttactgagcacctttcctaggagagacgtaactcaactggacccaaataaatcattattggaggtaaagttgttccctcaagaaacccttttccttgaagcaaaagagtaaacacggcccagcggtggaaccagccattccttgacaagccagcagcctgcgtcaggagaagggctcctcgccaacccacccacacgctcgtctcactcaattcaatgtcacacttctgcctcttgcaaaattgctggaaaaagtaataataaatatagctacttaagatttccca

SEQ ID NO: 308205 - DNA, 2376 bp, Homo sapiens
caggggcggaggcggcggccagggaggaagcggaggaggcggaggcggccgcggcgttcgcccgcccgctcgctcgctcggtttccccgcccccgccgggcttaacgccgctgaaggtatccgggtgcgcgctgtcgcaacctgccctcatcctggcccgcgactgtaagaccggacccacatccagaccaatcttcctgtccgggctgctgcgacgcgggctccgcaggttgcaggcgggcggccggggcgcctgaaggttaccgagtgcatgagcgcctagcgcttcccgcgctgccccgcccgctggcccgccgacccgcccgccggctcgcccgccagcccctcggcgcccggcggcggcggcggcggtggcggcgacggtcgcaggaggtgccgtctgcctcccaggtgcgcgcttcgctcccggagccgcggaactcggcggccgccatggcgtccaacatggaccgggagatgatcctggcggattttcaggcatgtactggcattgaaaacattgacgaagctattacattgcttgaacaaaataattgggacttagtggcagctatcaatggtgtaataccacaggaaaatggcattctacaaagtgaatatggaggtgagaccataccaggacctgcatttaatccagcaagtcatccagcttcagctcctacttcctcttcttcttcagcgtttcgacctgtaatgccatccaggcagattgtagaaaggcaacctcggatgctggacttcagggttgaatacagagacagaaatgttgatgtggtacttgaagacacctgtactgttggagagattaaacagattctagaaaatgaacttcagatacctgtgtccaaaatgctgttaaaaggctggaagacgggagatgtggaagacagtacggtcctaaaatctctacacttgccaaaaaacaacagtctttatgtccttacaccagatttgccaccaccttcatcatctagtcatgctggtgccctgcaggagtcattaaatcaaaacttcatgctgatcatcacccaccgagaagtccagcgggagtacaacctgaacttctcaggaagcagtactattcaagaggtaaagagaaatgtgtatgaccttacaagtatccccgttcgccaccaattatgggagggctggccaacttctgctacagacgactcaatgtgtcttgctgaatcagggctctcttatccctgccatcgacttacagtgggaagaagatcttcacctgcacagacccgggaacagtcggaagaacaaatcaccgatgttcatatggttagtgatagcgatggagatgactttgaagatgctacagaatttggggtggatgatggagaagtatttggcatggcgtcatctgccttgagaaaatctccaatgatgccagaaaacgcagaaaatgaaggagatgccttattacaatttacagcagagttttcttcaagatatggtgattgccatcctgtattttttattggctcattagaagctgcttttcaagaggccttctatgtgaaagcccgagatagaaagcttcttgctatctacctccaccatgatgaaagtgtgttaaccaacgtgttctgctcacaaatgctttgtgctgaatccattgtttcttatctgagtcaaaattttataacctgggcttgggatctgacaaaggactccaacagagcaagatttctcactatgtgcaatagacactttggcagtgttgtggcacaaaccattcggactcaaaaaacggatcagtttccgcttttcctgattattatgggaaagcgatcatctaatgaagtgttgaatgtgatacaagggaacacaacagtagatgagttaatgatgagactcatggctgcaatggagatcttcacagcccaacaacaggaagatataaaggacgaggatgaacgtgaagccagagaaaatgtgaagagagagcaagatgaggcctatcgcctttcacttgaggctgacagagcaaagagggaagctcacgagagagagatggcagaacagtttcgtttggagcagattcgcaaagaacaagaagaggaacgtgagacaatccggatgtacttaagagctcagccatgaactacctgcaaccacaggaaagaacaatgctgaagcctagagaagacaaaacgatgcgggagtccgagaaccaccaagaggacgaagtccatagaaagcagggcgttatccatgggaccaagaacgaacctcccagaaatggacataagaacaatcgaaacacacatcgccaaacaggaaacaccactgagaatgaagaccaagacaactggagcaacatatcctaaggaagaaaag

SEQ ID NO: 308206 - DNA, 2739 bp, Homo sapiens
caggggcggaggcggcggccagggaggaagcggaggaggcggaggcggccgcggcgttcgcccgcccgctcgctcgctcggtttccccgcccccgccgggcttaacgccgctgaaggtatccgggtgcgcgctgtcgcaacctgccctcatcctggcccgcgactgtaagaccggacccacatccagaccaatcttcctgtccgggctgctgcgacgcgggctccgcaggttgcaggcgggcggccggggcgcctgaaggttaccgagtgcatgagcgcctagcgcttcccgcgctgccccgcccgctggcccgccgacccgcccgccggctcgcccgccagcccctcggcgcccggcggcggcggcggcggtggcggcgacggtcgcaggaggtgccgtctgcctcccaggtgcgcgcttcgctcccggagccgcggaactcggcggccgccatggcgtccaacatggaccgggagatgatcctggcggattttcaggcatgtactggcattgaaaacattgacgaagctattacattgcttgaacaaaataattgggacttagtggcagctatcaatggtgtaataccacaggaaaatggcattctacaaagtgaatatggaggtgagaccataccaggacctgcatttaatccagcaagtcatccagcttcagctcctacttcctcttcttcttcagcgtttcgacctgtaatgccatccaggcagattgtagaaaggcaacctcggatgctggacttcagggttgaatacagagacagaaatgttgatgtggtacttgaagacacctgtactgttggagagattaaacagattctagaaaatgaacttcagatacctgtgtccaaaatgctgttaaaaggctggaagacgggagatgtggaagacagtacggtcctaaaatctctacacttgccaaaaaacaacagtctttatgtccttacaccagatttgccaccaccttcatcatctagtcatgctggtgccctgcaggagtcattaaatcaaaacttcatgctgatcatcacccaccgagaagtccagcgggagtacaacctgaacttctcaggaagcagtactattcaagaggtaaagagaaatgtgtatgaccttacaagtatccccgttcgccaccaattatgggagggctggccaacttctgctacagacgactcaatgtgtcttgctgaatcagggctctcttatccctgccatcgacttacagtgggaagaagatcttcacctgcacagacccgggaacagtcggaagaacaaatcaccgatgttcatatggttagtgatagcgatggagatgactttgaagatgctacagaatttggggtggatgatggagaagtatttggcatggcgtcatctgccttgagaaaatctccaatgatgccagaaaacgcagaaaatgaaggagatgccttattacaatttacagcagagttttcttcaagatatggtgattgccatcctgtattttttattggctcattagaagctgcttttcaagaggccttctatgtgaaagcccgagatagaaagcttcttgctatctacctccaccatgatgaaagtgtgttaaccaacgtgttctgctcacaaatgctttgtgctgaatccattgtttcttatctgagtcaaaattttataacctgggcttgggatctgacaaaggactccaacagagcaagatttctcactatgtgcaatagacactttggcagtgttgtggcacaaaccattcggactcaaaaaacggatcagtttccgcttttcctgattattatgggaaagcgatcatctaatgaagtgttgaatgtgatacaaggaacgggatagcgacgagacgacgctagcatgagctttacactgagtgatcactcgagtggtctgcgataatgggcccgtatctctcgaccaggcccaggcgacagcccgcgaaagaattactagagaggggacgcacagagttcaactgtgtatagcctaacagcaaaatgtcgaatgaagaagacgcaacgcatggaaggcacgtgatcggcgctcttcaacttggagggcatgacgaggaggcagggagagggcgcatgctctactgaggacgatgagattggcgagagactatgtttcgttttcgtgatccccgtagttccgccaaaggagaccacagaccgatggaagggtgacggccatccggctgtccttagagcaagccctgcctcctgagccaaaggaagaaaatgctgagcctgtgagcaaactgcggatccggacccccagtggcgagttcttggagcggcgtttcctggccagcaacaagctccagattgtctttgattttgtagcttccaaaggatttccatgggatgagtacaagttactgagcacctttcctaggagagacgtaactcaactggacccaaataaatcattattggaggtaaagttgttccctcaagaaacccttttccttgaagcaaaagagtaaacacggcccagcggtggaaccagccattccttgacaagccagcagcctgcgtcaggagaagggctcctcgccaacccacccacacgctcgtctcactcaattcaatgtcacacttctgcctcttgcaaaatttgtggaaagtatataatttgttcttaaaaaaaaaaaccggggctctttcggggggaagggtggtggctggcaggtctgcccttttcaag

SEQ ID NO: 308207 - DNA, 526 bp, Homo sapiens
tggtgtctctacttgttacgtgatatattttgtattgtattgtgattttcggccatccggctgtccttagagcaagccctgcctcctgagccaaaggaagaaaatgctgagcctgtgagcaaactgcggatccggacccccagtggcgagttcttggagcggcgtttcctggccagcaacaagctccagattgtctttgattttgtagcttccaaaggatttccatgggatgagtacaagttactgagcacctttcctaggagagacgtaactcaactggacccaaataaatcattattggaggtaaagttgttccctcaagaaacccttttccttgaagcaaaagagtaaacacggcccagcggtggaaccagccattccttgacaagccagcagcctgcgtcaggagaagggctcctcgccaacccacccacacgctcgtctcactcaattcaatgtcacacttctgcctcttgcaaaattgctggaaaaagtaataataaatatagctacttaagatttccca

SEQ ID NO: 308208 - DNA, 1070 bp, Homo sapiens
  misc_feature (11)..(11): n is a, c, g, or t
  misc_feature (18)..(19): n is a, c, g, or t
  misc_feature (22)..(22): n is a, c, g, or t
  misc_feature (32)..(32): n is a, c, g, or t
ttttttggccntaaaaannccnccggaagggntccaacagagcaagatttctcactatgtgcaatagacactttggcagtgttgtggcacaaaccattcggactcaaaaaacggatcagtttccgcttttcctgattattatgggaaagcgatcatctaatgaagtgttgaatgtgatacaagggaacacaacagtagatgagttaatgatgagactcatggctgcaatggagatcttcacagcccaacaacaggaagatataaaggacgaggatgaacgtgaagccagagaaaatgtgaagagagagcaagatgaggcctatcgcctttcacttgaggctgacagagcaaagagggaagctcacgagagagagatggcagaacagtttcgtttggagcagattcgcaaagaacaagaagaggaacgtgaggccatccggctgtccttagagcaagccctgcctcctgagccaaaggaagaaaatgctgagcctgtgagcaaactgcggatccggacccccagtggcgagttcttggagcggcgtttcctggccagcaacaagctccagattgtctttgattttgtagcttccaaaggatttccatgggatgagtacaagttactgagcacctttcctaggagagacgtaactcaactggacccaaataaatcattattggaggtaaagttgttccctcaagaaacccttttccttgaagcaaaagagtaaacacggcccagcggtggaaccagccattccttgacaagccagcagcctgcgtcaggagaagggctcctcgccaacccacccacacgctcgtctcactcaattcaatgtcacacttctgcctcttgcaaaattgctggaaaaagtaataataaatatagctacttaagatttcccaaaaaaaaaaaaaaacaacaaaaaacaaaaaaacccggggggtttaattgggggggggggaaaaagggcgtaggaaggtgccaggggccaaagcggttccggtgaacccagtcttctggtcacaagggggaaaacggcgggaccccaaaaggggagccgaaaaag

SEQ ID NO: 308209 - DNA, 877 bp, Homo sapiens
caggggcggaggcggcggccagggaggaagcggaggaggcggaggcggccgcggcgttcgcccgcccgctcgctcgctcggtttccccgcccccgccgggcttaacgccgctgaaggtatccgggtgcgcgctgtcgcaacctgccctcatcctggcccgcgactgtaagaccggacccacatccagaccaatcttcctgtccgggctgctgcgacgcgggctccgcaggttgcaggcgggcggccggggcgcctgaaggttaccgagtgcatgagcgcctagcgcttcccgcgctgccccgcccgctggcccgccgacccgcccgccggctcgcccgccagcccctcggcgcccggcggcggcggcggcggtggcggcgacggtcgcaggaggtgccgtctgcctcccaggtgcgcgcttcgctcccggagccgcggaactcggcggccgccatggcgtccaacatggaccgggagatgatcctggcggattttcaggcatgtactggcattgaaaacattgacgaagctattacattgcttgaacaaaataattgggacttagtggcagctatcaatggtgtaataccacaggaaaatggcattctacaaagtgaatatggaggtgagaccataccaggacctgcatttaatccagcaagtcatccagcttcagctcctacttcctcttcttcttcagcgtttcgacctgtaatgccatccaggcagattgtagaaaggcaacctcggatgctggacttcagggttgaatacagagacagaaatgttgatgtggtacttgaagacacctgtactgttggtaaggtttttcctgccataaagccttcacaaataaataattaggtaaacattcagg

SEQ ID NO: 308210 - DNA, 1566 bp, Homo sapiens
agagatccacccctccccatccccatcacaaggaaggtaggcattagtttgcaagagttcaagcccttagatctgcttttgaaggagaagaggctatttgtaagaaagctggtaagtttctattccaaggttcatgatctaataggaagactgcaggtgtggccgtcaggcccaagtcctaggtgagaatgcaggtctgcgagcccctaggaccggaccataacgaccttaacagccctaacggccgtaactgccataacggccggctgcgcgaggcccttccagcatttccactttcgtcaggtactggagagggctgccggccggatgccaggcagaggggcagggcggacggctaggagttcaagaaacatcctggtctgagggaaaggctgcagcctgcaccgccatgaataagcttttcagcttctggaagaggaagaatgagacccgcagccagggctacaaccttcgagaaaaggatttaaagaaacttcacagagctgcttcagtcggggatttgaagaagctgaaggaataccttcagatcaagaaatatgatgtaaatatgcaggacaaaaaatacagaacacctttgcacctagcctgtgctaatggacatacagatgttgtacttttcctaattgagcaacaatgcaaaataaatgtccgggatagtgaaaacaaatccccattgattaaggcagtacagtgtcaaaatgaggattgtgctactattcttctaaactttggtgcagacccagatctgagggatattcgttataatactgttcttcactatgctgtttgtggtcaaagtttgtcattagttgaaaaactgcttgaatacgaagctgatcttgaagcgaaaaataaggatgggtatactccactattagttgccgttattaacaataatccaaaaatggtaaaatttcttctggagaaaggggctgatgtgaatgcttcagataattatcaaagaacagcccttattcttgctgtcagtggtgaaccaccatgtttagtaaagcttcttcttcagcaaggtgtggaattatgttacgaaggtattgtggattcacagctgaggaatatgtttatttccatggttttactgcatagatacccacaattcactgcgagccatggaaagaagaaacatgctaaatagacaccttattcttggcactacatgtgactaaaggaagatatggaacccatttctacaatttctttgccgcttccttgaattggaaaaatgtactttgaaagaaccgttaagtgaactattataatatttttgctgactacccagttgaagaaaagtttgttaattggatgggattttttttttttcacgttagaagacatgaagaaattttaaaagataaacatctatattgtgaaccatcagctgaaaagataaatttgtgttcaatatataggcagaaaaaaatttgtgtcaaaatgttgaatggaataataatgaggaaactgtgttaggcatgtattaaaacatttaaataaaataaaaatacatttcagctacaaagtgaaggaaaa

SEQ ID NO: 308211 - DNA, 526 bp, Homo sapiens
cctaaggttttgatttgatacttatatgttaggaattaaatttctatgcatgctggcattcacacgtaatttcctttatagatagatacccacaattcactgcgagccatggaaagaagaaacatgctaaatagacaccttattcttggcactacatgtgactaaaggaagatatggaacccatttctacaatttctttgccgcttccttgaattggaaaaatgtactttgaaagaaccgttaagtgaactattataatatttttgctgactacccagttgaagaaaagtttgttaattggatgggattttttttttttcacgttagaagacatgaagaaattttaaaagataaacatctatattgtgaaccatcagctgaaaagataaatttgtgttcaatatataggcagaaaaaaatttgtgtcaaaatgttgaatggaataataatgaggaaactgtgttaggcatgtattaaaacatttaaataaaataaaaatacatttcagctacaaagtgaaggaaaa

SEQ ID NO: 308212 - DNA, 1594 bp, Homo sapiens
agagatccacccctccccatccccatcacaaggaaggtaggcattagtttgcaagagttcaagcccttagatctgcttttgaaggagaagaggctatttgtaagaaagctggtaagtttctattccaaggttcatgatctaataggaagactgcaggtgtggccgtcaggcccaagtcctaggtgagaatgcaggtctgcgagcccctaggaccggaccataacgaccttaacagccctaacggccgtaactgccataacggccggctgcgcgaggcccttccagcatttccactttcgtcaggtactggagagggctgccggccggatgccaggcagaggggcagggcggacggctaggagttcaagaaacatcctggtctgagggaaaggctgcagcctgcaccgccatgaataagcttttcagcttctggaagaggaagaatgagacccgcagccagggctacaaccttcgagaaaaggatttaaagaaacttcacagagctgcttcagtcggggatttgaagaagctgaaggaataccttcagatcaagaaatatgatgtaaatatgcaggacaaaaaatacagaacacctttgcacctagcctgtgctaatggacatacagatgttgtacttttcctaattgagcaacaatgcaaaataaatgtccgggatagtgaaaacaaatccccattgattaaggcagtacagtgtcaaaatgaggattgtgctactattcttctaaactttggtgcagacccagatctgagggatattcgttataatactgttcttcactatgctgtttgtggtcaaagtttgtcattagttgaaaaactgcttgaatacgaagctgatcttgaagcgaaaaataaggatgggtatactccactattagttgccgttattaacaataatccaaaaatggtaaaatttcttctggagaaaggggctgatgtgaatgcttcagataattatcaaagaacagcccttattcttgctgtcagtggtgaaccaccatgtttagtaaagcttcttcttcagcaaggtgtggaattatgttacgaaggtattgtggattcacagctgaggaatatgtttatttccatggttttactgcatagatacccacaattcactgcgagccatggaaagaagaaacatgctaaatagacaccttattcttggcactacatgtgactaaaggaagatatggaacccatttctacaatttctttgccgcttccttgaattggaaaaatgtactttgaaagaaccgttaagtgaactattataatatttttgctgactacccagttgaagaaaagtttgttaattggatgggattttttttttttcacgttagaagacatgaagaaattttaaaagataaacatctatattgtgaaccatcagctgaaaagataaatttgtgttcaatatataggcagaaaaaaatttgtgtcaaaatgttgaatggaataataatgaggaaactgtgttaggcatgtattaaaacatttaaataaaataaaaatacatttcagctacaaagtgaaggaaaacattataaataatcctgtataaatcaaa

SEQ ID NO: 308213 - DNA, 1769 bp, Homo sapiens
agagatccacccctccccatccccatcacaaggaaggtaggcattagtttgcaagagttcaagcccttagatctgcttttgaaggagaagaggctatttgtaagaaagctggtaagtttctattccaaggttcatgatctaataggaagactgcaggtgtggccgtcaggcccaagtcctaggtgagaatgcaggtctgcgagcccctaggaccggaccataacgaccttaacagccctaacggccgtaactgccataacggccggctgcgcgaggcccttccagcatttccactttcgtcaggtactggagagggctgccggccggatgccaggcagaggggcagggcggacggctaggagttcaagaaacatcctggtctgagggaaaggctgcagcctgcaccgccatgaataagcttttcagcttctggaagaggaagaatgagacccgcagccagggctacaaccttcgagaaaaggatttaaagaaacttcacagagctgcttcagtcggggatttgaagaagctgaaggaataccttcagatcaagaaatatgatgtaaatatgcaggacaaaaaatacagaacacctttgcacctagcctgtgctaatggacatacagatgttgtacttttcctaattgagcaacaatgcaaaataaatgtccgggatagtgaaaacaaatccccattgattaaggcagtacagtgtcaaaatgaggattgtgctactattcttctaaactttggtgcagacccagatctgagggatattcgttataatactgttcttcactatgctgtttgtggtcaaagtttgtcattagttgaaaaactgcttgaatacgaagctgatcttgaagcgaaaaataaggatgggtatactccactattagttgccgttattaacaataatccaaaaatggtaaaatttcttctggagaaaggggctgatgtgaatgcttcagataattatcaaagaacagcccttattcttgctgtcagtggtgaaccaccatgtttagtaaagcttcttcttcagcaaggtgtggaattatgttacgaaggtattgtggattcacagctgaggaatatgtttatttccatggttttactgcatagatacccacaattcactgcgagccatggaaagaagaaacatgctaaatagacaccttattcttggcactacatgtgactaaaggaagatatggaacccatttctacaatttctttgccgcttccttgaattggaaaaatgtactttgaaagaaccgttaagtgaactattataatatttttgctgactacccagttgaagaaaagtttgttaattggatgggattttttttttttcacgttagaagacatgaagaaattttaaaagataaacatctatattgtgaaccatcagctgaaaagataaatttgtgttcaatatataggcagaaaaaaatttgtgtcaaaatgttgaatggaataataatgaggaaactgtgttaggcatgtattaaaacatttaaataaaataaaaatacatttcagctacaaagtgaaggaaaaaaaaaaaaaaaaaaaaaaaaaaaaaaaaaaaaacaaaaaaaaaaaaaaaaaaaacaaaaaaaaacaaacaaaaaaaacaacccccgccgcccgcgcgcacgccaccagaaaggggcggcgcaccctcccgcgggagggggcggcccccacgccctcgtgcgccccccacagtgaggggggcattacagcgccgcggcgaacgt

SEQ ID NO: 308214 - DNA, 1540 bp, Homo sapiens
agagatccacccctccccatccccatcacaaggaaggtaggcattagtttgcaagagttcaagcccttagatctgcttttgaaggagaagaggctatttgtaagaaagctggtaagtttctattccaaggttcatgatctaataggaagactgcaggtgtggccgtcaggcccaagtcctaggtgagaatgcaggtctgcgagcccctaggaccggaccataacgaccttaacagccctaacggccgtaactgccataacggccggctgcgcgaggcccttccagcatttccactttcgtcaggtactggagagggctgccggccggatgccaggcagaggggcagggcggacggctaggagttcaagaaacatcctggtctgagggaaaggctgcagcctgcaccgccatgaataagcttttcagcttctggaagaggaagaatgagacccgcagccagggctacaaccttcgagaaaaggatttaaagaaacttcacagagctgcttcagtcggggatttgaagaagctgaaggaataccttcagatcaagaaatatgataacacctttgcacctagcctgtgctaatggacatacagatgttgtacttttcctaattgagcaacaatgcaaaataaatgtccgggatagtgaaaacaaatccccattgattaaggcagtacagtgtcaaaatgaggattgtgctactattcttctaaactttggtgcagacccagatctgagggatattcgttataatactgttcttcactatgctgtttgtggtcaaagtttgtcattagttgaaaaactgcttgaatacgaagctgatcttgaagcgaaaaataaggatgggtatactccactattagttgccgttattaacaataatccaaaaatggtaaaatttcttctggagaaaggggctgatgtgaatgcttcagataattatcaaagaacagcccttattcttgctgtcagtggtgaaccaccatgtttagtaaagcttcttcttcagcaaggtgtggaattatgttacgaaggtattgtggattcacagctgaggaatatgtttatttccatggttttactgcatagatacccacaattcactgcgagccatggaaagaagaaacatgctaaatagacaccttattcttggcactacatgtgactaaaggaagatatggaacccatttctacaatttctttgccgcttccttgaattggaaaaatgtactttgaaagaaccgttaagtgaactattataatatttttgctgactacccagttgaagaaaagtttgttaattggatgggattttttttttttcacgttagaagacatgaagaaattttaaaagataaacatctatattgtgaaccatcagctgaaaagataaatttgtgttcaatatataggcagaaaaaaatttgtgtcaaaatgttgaatggaataataatgaggaaactgtgttaggcatgtattaaaacatttaaataaaataaaaatacatttcagctacaaagtgaaggaaaa

SEQ ID NO: 308215 - DNA, 1626 bp, Homo sapiens
agagatccacccctccccatccccatcacaaggaaggtaggcattagtttgcaagagttcaagcccttagatctgcttttgaaggagaagaggctatttgtaagaaagctggtaagtttctattccaaggttcatgatctaataggaagactgcaggtgtggccgtcaggcccaagtcctaggtgagaatgcaggtctgcgagcccctaggaccggaccataacgaccttaacagccctaacggccgtaactgccataacggccggctgcgcgaggcccttccagcatttccactttcgtcaggtactggagagggctgccggccggatgccaggcagaggggcagggcggacggctaggagttcaagaaacatcctggtctgagggaaaggctgcagcctgcaccgccatgaataagcttttcagcttctggaagaggaagaatgagacccgcagccagggctacaaccttcgagaaaaggatttaaagaaacttcacagagctgcttcagtcggggatttgaagaagctgaaggaataccttcagatcaagaaatatgatgtaaatatgcaggacaaaaaatacagtgttgtccaatcttctagatggcttttatcctacaccactccgctgaatgactttataagaacacctttgcacctagcctgtgctaatggacatacagatgttgtacttttcctaattgagcaacaatgcaaaataaatgtccgggatagtgaaaacaaatccccattgattaaggcagtacagtgtcaaaatgaggattgtgctactattcttctaaactttggtgcagacccagatctgagggatattcgttataatactgttcttcactatgctgtttgtggtcaaagtttgtcattagttgaaaaactgcttgaatacgaagctgatcttgaagcgaaaaataaggatgggtatactccactattagttgccgttattaacaataatccaaaaatggtaaaatttcttctggagaaaggggctgatgtgaatgcttcagataattatcaaagaacagcccttattcttgctgtcagtggtgaaccaccatgtttagtaaagcttcttcttcagcaaggtgtggaattatgttacgaaggtattgtggattcacagctgaggaatatgtttatttccatggttttactgcatagatacccacaattcactgcgagccatggaaagaagaaacatgctaaatagacaccttattcttggcactacatgtgactaaaggaagatatggaacccatttctacaatttctttgccgcttccttgaattggaaaaatgtactttgaaagaaccgttaagtgaactattataatatttttgctgactacccagttgaagaaaagtttgttaattggatgggattttttttttttcacgttagaagacatgaagaaattttaaaagataaacatctatattgtgaaccatcagctgaaaagataaatttgtgttcaatatataggcagaaaaaaatttgtgtcaaaatgttgaatggaataataatgaggaaactgtgttaggcatgtattaaaacatttaaataaaataaaaatacatttcagctacaaagtgaaggaaaa

SEQ ID NO: 308216 - DNA, 1600 bp, Homo sapiens
agagatccacccctccccatccccatcacaaggaaggtaggcattagtttgcaagagttcaagcccttagatctgcttttgaaggagaagaggctatttgtaagaaagctggtaagtttctattccaaggttcatgatctaataggaagactgcaggtgtggccgtcaggcccaagtcctaggtgagaatgcaggtctgcgagcccctaggaccggaccataacgaccttaacagccctaacggccgtaactgccataacggccggctgcgcgaggcccttccagcatttccactttcgtcaggtactggagagggctgccggccggatgccaggcagaggggcagggcggacggctaggagttcaagaaacatcctggtctgagggaaaggctgcagcctgcaccgccatgaataagcttttcagcttctggaagaggaagaatgagacccgcagccagggctacaaccttcgagaaaaggatttaaagaaacttcacagagctgcttcagtcggggatttgaagaagctgaaggaataccttcagatcaagaaatatgattgttgtccaatcttctagatggcttttatcctacaccactccgctgaatgactttataagaacacctttgcacctagcctgtgctaatggacatacagatgttgtacttttcctaattgagcaacaatgcaaaataaatgtccgggatagtgaaaacaaatccccattgattaaggcagtacagtgtcaaaatgaggattgtgctactattcttctaaactttggtgcagacccagatctgagggatattcgttataatactgttcttcactatgctgtttgtggtcaaagtttgtcattagttgaaaaactgcttgaatacgaagctgatcttgaagcgaaaaataaggatgggtatactccactattagttgccgttattaacaataatccaaaaatggtaaaatttcttctggagaaaggggctgatgtgaatgcttcagataattatcaaagaacagcccttattcttgctgtcagtggtgaaccaccatgtttagtaaagcttcttcttcagcaaggtgtggaattatgttacgaaggtattgtggattcacagctgaggaatatgtttatttccatggttttactgcatagatacccacaattcactgcgagccatggaaagaagaaacatgctaaatagacaccttattcttggcactacatgtgactaaaggaagatatggaacccatttctacaatttctttgccgcttccttgaattggaaaaatgtactttgaaagaaccgttaagtgaactattataatatttttgctgactacccagttgaagaaaagtttgttaattggatgggattttttttttttcacgttagaagacatgaagaaattttaaaagataaacatctatattgtgaaccatcagctgaaaagataaatttgtgttcaatatataggcagaaaaaaatttgtgtcaaaatgttgaatggaataataatgaggaaactgtgttaggcatgtattaaaacatttaaataaaataaaaatacatttcagctacaaagtgaaggaaaa

SEQ ID NO: 308217 - DNA, 1121 bp, Homo sapiens
ctagcggtggtggtctttgctaggtctggaggtagagcagatgctgaggcgttcaaaggaaggcggtgcctgtggacaagcaggcttgcacaggatctggcccgtgccgaccagggcgccaggaccctgaaagtctcgtcccaaacacctttgcacctagcctgtgctaatggacatacagatgttgtacttttcctaattgagcaacaatgcaaaataaatgtccgggatagtgaaaacaaatccccattgattaaggcagtacagtgtcaaaatgaggattgtgctactattcttctaaactttggtgcagacccagatctgagggatattcgttataatactgttcttcactatgctgtttgtggtcaaagtttgtcattagttgaaaaactgcttgaatacgaagctgatcttgaagcgaaaaataaggatgggtatactccactattagttgccgttattaacaataatccaaaaatggtaaaatttcttctggagaaaggggctgatgtgaatgcttcagataattatcaaagaacagcccttattcttgctgtcagtggtgaaccaccatgtttagtaaagcttcttcttcagcaaggtgtggaattatgttacgaaggtattgtggattcacagctgaggaatatgtttatttccatggttttactgcatagatacccacaattcactgcgagccatggaaagaagaaacatgctaaatagacaccttattcttggcactacatgtgactaaaggaagatatggaacccatttctacaatttctttgccgcttccttgaattggaaaaatgtactttgaaagaaccgttaagtgaactattataatatttttgctgactacccagttgaagaaaagtttgttaattggatgggattttttttttttcacgttagaagacatgaagaaattttaaaagataaacatctatattgtgaaccatcagctgaaaagataaatttgtgttcaatatataggcagaaaaaaatttgtgtcaaaatgttgaatggaataataatgaggaaactgtgttaggcatgtattaaaacatttaaataaaataaaaatacatttcagctacaaagtgaaggaaaa

SEQ ID NO: 308218 - DNA, 1515 bp, Homo sapiens
agagatccacccctccccatccccatcacaaggaaggtaggcattagtttgcaagagttcaagcccttagatctgcttttgaaggagaagaggctatttgtaagaaagctggtaagtttctattccaaggttcatgatctaataggaagactgcaggtgtggccgtcaggcccaagtcctaggtgagaatgcaggtctgcgagcccctaggaccggaccataacgaccttaacagccctaacggccgtaactgccataacggccggctgcgcgaggcccttccagcatttccactttcgtcaggtactggagagggctgccggccggatgccaggcagaggggcagggcggacggctaggagttcaagaaacatcctggtctgagggaaaggctgcagcctgcaccgccatgaataagcttttcagcttctggaagaggaagaatgagacccgcagccagggctacaaccttcgagaaaaggatttaaagaaacttcacagagctgcttcagtcggggatttgaagaagctgaaggaataccttcagatcaagaaatatgatgtaaatatgcaggacaaaaaatacagaacacctttgcacctagcctgtgctaatggacatacagatgttgtacttttcctaattgagcaacaatgcaaaataaatgtccgggatagtgaaaacaaatccccattgattaaggcagtacagtgtcaaaatgaggattgtgctactattcttctaaactttggtgcagacccagatctgagggatattcgttataatactgttcttcactatgctgtttgtggtcaaagtttgtcattagttgaaaaactgcttgaatacgaagctgatcttgaagcgaaaaataaggatgggtatactccactattagttgccgttattaacaataatccaaaaatggtaaaatttcttctggagaaaggggctgatgtgaatgcttcagataattatcaaagaacagcccttattcttgctgtcagtggtgaaccaccatgtttagtaaagcttcttcttcagcaaggtgtggaattatgttacgaagatagatacccacaattcactgcgagccatggaaagaagaaacatgctaaatagacaccttattcttggcactacatgtgactaaaggaagatatggaacccatttctacaatttctttgccgcttccttgaattggaaaaatgtactttgaaagaaccgttaagtgaactattataatatttttgctgactacccagttgaagaaaagtttgttaattggatgggattttttttttttcacgttagaagacatgaagaaattttaaaagataaacatctatattgtgaaccatcagctgaaaagataaatttgtgttcaatatataggcagaaaaaaatttgtgtcaaaatgttgaatggaataataatgaggaaactgtgttaggcatgtattaaaacatttaaataaaataaaaatacatttcagctacaaagtgaaggaaaa

SEQ ID NO: 308219 - DNA, 779 bp, Homo sapiens
cggggggggggggggggcggggcgaagccgaggaagagcgttttggggacgggggctggtgaggctcacgttggagggcttcgcgtctgcttcggagaccgtaaggatattgatgaccatgagatccctgctcagaacccccttcctgtgtggcctgctctgggccttttgtgccccaggcgccagggctgaggagcctgcagccagcttctcccaacccggcagcatgggcctggataagaacacagtgcacgaccaagagcatatcatggagcatctagaaggtgtcatcaacaaaccagaggcggagatgtcgccacaagaattgcagctccattacttcaaaatgcatgattatgatggcaataatttgcttgatggcttagaactctccacagccatcactcatgtccataaggaggaagggagtgaacaggcaccactaatgagtgaagatgaactgattaacataatagatggtgttttgagagatgatgacaagaacaatgatggatacattgactatgctgaatttgcaaaatcactgcagtagatgttatttggccatctcctggttatatacaaatgtgacccgtgataatgtgattgaacactttagtaatgcaaaataactcatttccaactactgctgcagcattttggtaaaaacctgtagcgattcgttacactggggtgagaagagataagagaaatgaaagagaagagaaatgggacatctaatagtccctaagtgctattaaataccttattggacaagg

SEQ ID NO: 308220 - DNA, 1056 bp, Homo sapiens
cggggggggggggggggcggggcgaagccgaggaagagcgttttggggacgggggctggtgaggctcacgttggagggcttcgcgtctgcttcggagaccgtaagggcatatcatggagcatctagaaggtgtcatcaacaaaccagaggcggagatgtcgccacaagaattgcagctccattacttcaaaatgcatgattatgatggcaataatttgcttgatggcttagaactctccacagccatcactcatgtccataaggaggaagggagtgaacaggcaccactaatgagtgaagatgaactgattaacataatagatggtgttttgagagatgatgacaagaacaatgatggatacattgactatgctgaatttgcaaaatcactgcagtagatgttatttggccatctcctggttatatacaaatgtgacccgtgataatgtgattgaacactttagtaatgcaaaataactcatttccaactactgctgcagcattttggtaaaaacctgtagcgattcgttacactggggtgagaagagataagagaaatgaaagagaagagaaatgggacatctaatagtccctaagtgctattaaataccttattggacaagggcttgcttcaagcatctgtattagtctgtattaatgctgctgataaagacgtacccgagactgggaagaaaaagaggtttacttggacttacagttccacatggctggggaggcctcagaatcatggcgggaggtgaaaggcacttcttacatggcagcaagagaaaatgaggaagaagcaaaagtggaaacccctgataagccatcagatcttgtgaaacttattcactatcacaagaatagcatgggaaagactggcccccatgattcaattacctccccttgggtctctcccacaacacgtgggaattctggtagatacaatttcaagttgagatttgggtggggacatagccaaaccatatcattctacccctggcccctccaaatctcatgtcctcactattcaaaaccaatcatgccttcctaaca

SEQ ID NO: 308221 - DNA, 624 bp, Homo sapiens
cggggggggggggggggcggggcgaagccgaggaagagcgttttggggacgggggctggtgaggctcacgttggagggcttcgcgtctgcttcggagaccgtaagggcatatcatggagcatctagaaggtgtcatcaacaaaccagaggcggagatgtcgccacaagaattgcagctccattacttcaaaatgcatgattatgatggcaataatttgcttgatggcttagaactctccacagccatcactcatgtccataaggaggaagggagtgaacaggcaccactaatgagtgaagatgaactgattaacataatagatggtgttttgagagatgatgacaagaacaatgatggatacattgactatgctgaatttgcaaaatcactgcagtagatgttatttggccatctcctggttatatacaaatgtgacccgtgataatgtgattgaacactttagtaatgcaaaataactcatttccaactactgctgcagcattttggtaaaaacctgtagcgattcgttacactggggtgagaagagataagagaaatgaaagagaagagaaatgggacatctaatagtccctaagtgctattaaataccttattggacaagg

SEQ ID NO: 308222 - DNA, 896 bp, Homo sapiens
cggggggggggggggggcggggcgaagccgaggaagagcgttttggggacgggggctggtgaggctcacgttggagggcttcgcgtctgcttcggagaccgtaagggaagggagtgaacaggcaccactaatgagtgaagatgaactgattaacataatagatggtgttttgagagatgatgacaagaacaatgatggatacattgactatgctgaatttgcaaaatcactgcagtagatgttatttggccatctcctggttatatacaaatgtgacccgtgataatgtgattgaacactttagtaatgcaaaataactcatttccaactactgctgcagcattttggtaaaaacctgtagcgattcgttacactggggtgagaagagataagagaaatgaaagagaagagaaatgggacatctaatagtccctaagtgctattaaataccttattggacaagggcttgcttcaagcatctgtattagtctgtattaatgctgctgataaagacgtacccgagactgggaagaaaaagaggtttacttggacttacagttccacatggctggggaggcctcagaatcatggcgggaggtgaaaggcacttcttacatggcagcaagagaaaatgaggaagaagcaaaagtggaaacccctgataagccatcagatcttgtgaaacttattcactatcacaagaatagcatgggaaagactggcccccatgattcaattacctccccttgggtctctcccacaacacgtgggaattctggtagatacaatttcaagttgagatttgggtggggacatagccaaaccatatcattctacccctggcccctccaaatctcatgtcctcactattcaaaaccaatcatgccttcctaaca

SEQ ID NO: 308223 - DNA, 786 bp, Homo sapiens
cggggggggggggggggcggggcgaagccgaggaagagcgttttggggacgggggctggtgaggctcacgttggagggcttcgcgtctgcttcggagaccgtaagggcatatcatggagcatctagaaggtgtcatcaacaaaccagaggcggagatgtcgccacaagaattgcagctccattacttcaaaatgcatgattatgatggcaataatttgcttgatggcttagaactctccacagccatcactcatgtccataaggagcggaccgggagtgaacaggcaccactacatgagtgaacgactgaacctgacttaacatacctacgactggtgtatattgacgacgactgactgaccaacgacaccaactagactgcgactaccacttgaccctacttgctgacactttgccacacactcccctagaccacgtacgaactgttcctcaacgcgccctcctcccgtgggttccttatacacacagactggtgaacccccgtggactcacgtggtagcagtctgagcaaacgcacttatgtacggatatctactaggccacaaacacagttagaccagctcgcagtatatatcccgacaaccgttaccctcgaccagtggcaccagagcgacataaacatggggcgttccaaatcgacacccgttagactcacgcccgcacttgtaccagcataactagcaaacgatggatgggggcattgacacgccaacggcacgaaactaccaagtcacaggtaaaaacattggcaacaaggcacgacaa

SEQ ID NO: 308224 - DNA, 1722 bp, Homo sapiens
caacaagttcctcatcttcatctgaggccacctcagcctggactttgttgtccatattgctatcagcatttggggcaaagccattcaacaagtctgtaggaagttccaaactttcccacattttcctgttttcttctgagccctccaaactgttccagcctctgcctgttacccagttccaaagtcacttccacattttgggtatttcttcagcaggtcccaatctactggtaccaatttactgtattagtccgttttcacgctgctgataaagacatacccgagactgggaagaaaaagtggtttaattggacttaaagttccacatggctggggaggcctcagaatcatggtgggaggcaaaagacacttcttacattgtggcaagaaaaaatgaggaagaagcaaaagcagaaacccctgataaactgatcagatctcatgagacttattcactgtcacgagaatagcacgggaaagactggcccccatgattcaattacctccccctgggtctgtcccacaacacgtgggaattctgggagatacaattcaagttgagatttgtggggggacacaaccaaaccatatcagcatcctttcaagaatattagataattggagctgagtactcaggaacttgactgtagtagaatactgctagtttcttaattttaattcacatcacctgaaaagtaaaacaacaggctttgccaagtggatgcttttcagtaacagtgaagtggagtgaataccaaatgtttgccctggtggttcctatctcttcaggcaaacatggtcagtattctgtaaagttcccctggcctaaatgattacttgctctgggcaagtggatatttattaggctatttcaaagccacagcataagaatgtcagcctagccacagagtctgagattctgagttcagcctagccacagagtctaagattctgtatcctctgacattttggaaatgatacactactggcttaagtgatgactctttcagattttcagtattttatacaactactgccacatccttatactttattgcttttctgtcttcttcaacctgggagagaccctgaatttgagtgtgttctctaatcaatagtggtttagctttcttttctatttcactcgtttctagggttttttatttgcagtttaggaactattaggaatgtcaggactttatcagcaggggtaaaactaccacctggcctagcctaagtaggaagtgaaaagataattcaccaaacaatgattaatcagatagaagttctagtcaagagggatattgttgaagttacctcttttagcctagatacatggattcttttcaaatcaggaaagattagaaaaggaacccaaaaaaccctttaacagtgtgaatctttatagtatttgaaaatgagaagaagcagcagattgtaatttggtttattggatgtgatggacgttctgtaatagaaaacctgaaacgatgattgaatgggaaaaagagactacaaaatttgtcgtaggatgtatacagacttattttctttattacagtattataagaaaacatatgtatttgtaaaaatggtttcctgtgtcaagtatttgtgcagtcagagctgacttgtaaactattcttgtaatagctcattattttgaaagatttatatatgatgaattctggatatatgaccaataaaactgatgaagcaaaa

SEQ ID NO: 308225 - DNA, 1382 bp, Homo sapiens
cggggggggggggggggcggggcgaagccgaggaagagcgttttggggacgggggctggtgaggctcacgttggagggcttcgcgtctgcttcggagaccgtaaggacttattcactgtcacgagaatagcacgggaaagactggcccccatgattcaattacctccccctgggtctgtcccacaacacgtgggaattctgggagatacaattcaagttgagatttgtggggggacacaaccaaaccatatcagcatcctttcaagaatattagataattggagctgagtactcaggaacttgactgtagtagaatactgctagtttcttaattttaattcacatcacctgaaaagtaaaacaacaggctttgccaagtggatgcttttcagtaacagtgaagtggagtgaataccaaatgtttgccctggtggttcctatctcttcaggcaaacatggtcagtattctgtaaagttcccctggcctaaatgattacttgctctgggcaagtggatatttattaggctatttcaaagccacagcataagaatgtcagcctagccacagagtctgagattctgagttcagcctagccacagagtctaagattctgtatcctctgacattttggaaatgatacactactggcttaagtgatgactctttcagattttcagtattttatacaactactgccacatccttatactttattgcttttctgtcttcttcaacctgggagagaccctgaatttgagtgtgttctctaatcaatagtggtttagctttcttttctatttcactcgtttctagggttttttatttgcagtttaggaactattaggaatgtcaggactttatcagcaggggtaaaactaccacctggcctagcctaagtaggaagtgaaaagataattcaccaaacaatgattaatcagatagaagttctagtcaagagggatattgttgaagttacctcttttagcctagatacatggattcttttcaaatcaggaaagattagaaaaggaacccaaaaaaccctttaacagtgtgaatctttatagtatttgaaaatgagaagaagcagcagattgtaatttggtttattggatgtgatggacgttctgtaatagaaaacctgaaacgatgattgaatgggaaaaagagactacaaaatttgtcgtaggatgtatacagacttattttctttattacagtattataagaaaacatatgtatttgtaaaaatggtttcctgtgtcaagtatttgtgcagtcagagctgacttgtaaactattcttgtaatagctcattattttgaaagatttatatatgatgaattctggatatatgaccaataaaactgatgaagcaaaa

SEQ ID NO: 308226 - DNA, 1285 bp, Homo sapiens
ctgaggttaactagaggatccccatcgagatcaagtgggaaagactggcccccatgattcaattacctccccctgggtctgtcccacaacacgtgggaattctgggagatacaattcaagttgagatttgtggggggacacaaccaaaccatatcagcatcctttcaagaatattagataattggagctgagtactcaggaacttgactgtagtagaatactgctagtttcttaattttaattcacatcacctgaaaagtaaaacaacaggctttgccaagtggatgcttttcagtaacagtgaagtggagtgaataccaaatgtttgccctggtggttcctatctcttcaggcaaacatggtcagtattctgtaaagttcccctggcctaaatgattacttgctctgggcaagtggatatttattaggctatttcaaagccacagcataagaatgtcagcctagccacagagtctgagattctgagttcagcctagccacagagtctaagattctgtatcctctgacattttggaaatgatacactactggcttaagtgatgactctttcagattttcagtattttatacaactactgccacatccttatactttattgcttttctgtcttcttcaacctgggagagaccctgaatttgagtgtgttctctaatcaatagtggtttagctttcttttctatttcactcgtttctagggttttttatttgcagtttaggaactattaggaatgtcaggactttatcagcaggggtaaaactaccacctggcctagcctaagtaggaagtgaaaagataattcaccaaacaatgattaatcagatagaagttctagtcaagagggatattgttgaagttacctcttttagcctagatacatggattcttttcaaatcaggaaagattagaaaaggaacccaaaaaaccctttaacagtgtgaatctttatagtatttgaaaatgagaagaagcagcagattgtaatttggtttattggatgtgatggacgttctgtaatagaaaacctgaaacgatgattgaatgggaaaaagagactacaaaatttgtcgtaggatgtatacagacttattttctttattacagtattataagaaaacatatgtatttgtaaaaatggtttcctgtgtcaagtatttgtgcagtcagagctgacttgtaaactattcttgtaatagctcattattttgaaagatttatatatgatgaattctggatatatgaccaataaaactgatgaagcaaaa

SEQ ID NO: 308227 - DNA, 2129 bp, Homo sapiens
caacaagttcctcatcttcatctgaggccacctcagcctggactttgttgtccatattgctatcagcatttggggcaaagccattcaacaagtctgtaggaagttccaaactttcccacattttcctgttttcttctgagccctccaaactgttccagcctctgcctgttacccagttccaaagtcacttccacattttgggtatttcttcagcaggtcccaatctactggtaccaatttactgtattagtccgttttcacgctgctgataaagacatacccgagactgggaagaaaaagtggtttaattggacttaaagttccacatggctggggaggcctcagaatcatggtgggaggcaaaagacacttcttacattgtggcaagaaaaaatgaggaagaagcaaaagcagaaacccctgataaactgatcagatctcatgagacttattcactgtcacgagaatagcacgggaaagactggcccccatgattcaattacctccccctgggtctgtcccacaacacgtgggaattctgggagatacaattcaagttgagatttgtggggggacacaaccaaaccatatcagcatcctttcaagaatattagataattggagctgagtactcaggaacttgactgtagtagaatactgctagtttcttaattttaattcacatcacctgaaaagtaaaacaacaggctttgccaagtggatgcttttcagtaacagtgaagtggagtgaataccaaatgtttgccctggtggttcctatctcttcaggcaaacatggtcagtattctgtaaagttcccctggcctaaatgattacttgctctgggcaagtggatatttattaggctatttcaaagccacagcataagaatgtcagcctagccacagagtctgagattctgagttcagcctagccacagagtctaagattctgtatcctctgacattttggaaatgatacactactggcttaagtgatgactctttcagattttcagtattttatacaactactgccacatccttatactttattgcttttctgtcttcttcaacctgggagagaccctgaatttgagtgtgttctctaatcaatagtggtttagctttcttttctatttcactcgtttctagggttttttatttgcagtttaggaactattaggaatgtcaggactttatcagcaggggtaaaactaccacctggcctagcctaagtaggaagtgaaaagataattcaccaaacaatgattaatcagatagaagttctagtcaagagggatattgttgaagttacctcttttagcctagatacatggattcttttcaaatcaggaaagattagaaaaggaacccaaaaaaccctttaacagtgtgaatctttatagtatttgaaaatgagaagaagcagcagattgtaatttggtttattggatgtgatggacgttctgtaatagaaaacctgaaacgatgattgaatgggaaaaagagactacaaaatttgtcgtaggatgtatacagacttattttctttattacagtattataagaaaacatatgtatttgtaaaaatggtttcctgtgtcaagtatttgtgcagtcagagctgacttgtaaactattcttgtaatagctcattattttgaaagatttatatatgatgaattctggatatatgaccaataaaactgatgaagcaaaaaaaaaaaaaaaaaaaaaaaaaaaaaaaaaaaaaaaaaaaaaaaaaaaaaaaaaaaaaaaaaaaaaaaaaaaaaaaaaaaacgcgacaacaaaacaaaaaaaaacacaaaaaagaaaagaaaaaaaaaaaaaacaccaagggccaaaaaacgagcgcgcaaaccggactcaaaagggcaacgacagcacaaccaacgaccacagcatcgaataacgaaggcgaacgaccaaacgacgaccacgaccggacgacgaaaaccgacagaaacgcgaaacacgcgagcaagagagcgacaccacgaggcggagaaaaaaaacaaggggacgaacaagagcaacgcacggaccaactcgacggaacgaaaaaaaccagagcagcaatccgcgaggaacaaaagaaacgagaca

SEQ ID NO: 308228 - DNA, 2125 bp, Homo sapiens
caacaagttcctcatcttcatctgaggccacctcagcctggactttgttgtccatattgctatcagcatttggggcaaagccattcaacaagtctgtaggaagttccaaactttcccacattttcctgttttcttctgagccctccaaactgttccagcctctgcctgttacccagttccaaagtcacttccacattttgggtatttcttcagcaggtcccaatctactggtaccaatttactgtattagtccgttttcacgctgctgataaagacatacccgagactgggaagaaaaagtggtttaattggacttaaagttccacatggctggggaggcctcagaatcatggtgggaggcaaaagacacttcttacattgtggcaagaaaaaatgaggaagaagcaaaagcagaaacccctgataaactgatcagatctcatgagacttattcactgtcacgagaatagcacgggaaagactggcccccatgattcaattacctccccctgggtctgtcccacaacacgtgggaattctgggagatacaattcaagttgagatttgtggggggacacaaccaaaccatatcagcatcctttcaagaatattagataattggagctgagtactcaggaacttgactgtagtagaatactgctagtttcttaattttaattcacatcacctgaaaagtaaaacaacaggctttgccaagtggatgcttttcagtaacagtgaagtggagtgaataccaaatgtttgccctggtggttcctatctcttcaggcaaacatggtcagtattctgtaaagttcccctggcctaaatgattacttgctctgggcaagtggatatttattaggctatttcaaagccacagcataagaatgtcagcctagccacagagtctgagattctgagttcagcctagccacagagtctaagattctgtatcctctgacattttggaaatgatacactactggcttaagtgatgactctttcagattttcagtattttatacaactactgccacatccttatactttattgcttttctgtcttcttcaacctgggagagaccctgaatttgagtgtgttctctaatcaatagtggtttagctttcttttctatttcactcgtttctagggttttttatttgcagtttaggaactattaggaatgtcaggactttatcagcaggggtaaaactaccacctggcctagcctaagtaggaagtgaaaagataattcaccaaacaatgattaatcagatagaagttctagtcaagagggatattgttgaagttacctcttttagcctagatacatggattcttttcaaatcaggaaagattagaaaaggaacccaaaaaaccctttaacagtgtgaatctttatagtatttgaaaatgagaagaagcagcagattgtaatttggtttattggatgtgatggacgttctgtaatagaaaacctgaaacgatgattgaatgggaaaaagagactacaaaatttgtcgtaggatgtatacagacttattttctttattacagtattataagaaaacatatgtatttgtaaaaatggtttcctgtgtcaagtatttgtgcagtcagagctgacttgtaaactattcttgtaatagctcattattttgaaagatttatatatgatgaattctggatatatgaccaataaaactgatgaagcaaaaaaaaaaaaaaaaacaaattgtgggggggttgggccgaaaaaagtttttaaaaccactggtttggggggggggcccctgggtaggaaccgggggaagggggccaagggagaaacgggggcaagacacacgggcgtgggtttctccacccaataaaaaaccccgggcaccgggggctccgtaacaaccggaggagctggagaccacagactatccacgggggccagcagcgaattaaatgccggccgggagaaagacaaaaaacggaaaaagacaaaacaaaatgaagacagaaaccacacaacagataagacaaaaacacagcagcagcgaaacaagcaagacagagcaaacaagaacagcaaccgaaataaactgaaaaaagaacccataccatagtcttgca

SEQ ID NO: 308229 - DNA, 1665 bp, Homo sapiens
  misc_feature (1633)..(1633): n is a, c, g, or t
caacaagttcctcatcttcatctgaggccacctcagcctggactttgttgtccatattgctatcagcatttggggcaaagccattcaacaagtctgtaggaagttccaaactttcccacattttcctgttttcttctgagccctccaaactgttccagcctctgcctgttacccagttccaaagtcacttccacattttgggtatttcttcagcaggtcccaatctactggtaccaatttactgtattagtccgttttcacgctgctgataaagacatacccgagactgggaagaaaaagtggtttaattggacttaaagttccacatggctggggaggcctcagaatcatggtgggaggcaaaagacacttcttacattgtggcaagaaaaaatgaggaagaagcaaaagcagaaacccctgataaactgatcagatctcatgagacttattcactgtcacgagaatagcacgggaaagactggcccccatgattcaattacctccccctgggtctgtcccacaacacgtgggaattctgggagatacaattcaagttgagatttgtggggggacacaaccaaaccatatcagcatcctttcaagaatattagataattggagctgagtactcaggaacttgactgtagtagaatactgctagtttcttaattttaattcacatcacctgaaaagtaaaacaacaggctttgccaagtggatgcttttcagtaacagtgaagtggagtgaataccaaatgtttgccctggtggttcctatctcttcaggcaaacatggtcagtattctgtaaagttcccctggcctaaatgattacttgctctgggcaagtggatatttattaggctatttcaaagccacagcataagaatgtcagcctagccacagagtctgagattctgagttcagcctagccacagagtctaagattctgtatcctctgacattttggaaatgatacactactggcttaagtgatgactctttcagattttcagtattttatacaactactgccacatccttatactttattgcttttctgtcttcttcaacctgggagagaccctgaatttgagtgtgttctctaatcaatagtggtttagctttcttttctatttcactcgtttctagggttttttatttgcagtttaggaactattaggaatgtcaggactttatcagcaggggtaaaactaccacctggcctagcctaagtaggaagtgaaaagataattcaccaaacaatgattaatcagatagaagttctagtcaagagggatattgttgaagttacctcttttagcctagatacatggattcttttcaaatcaggaaagattagaaaaggaacccaaaaaaccctttaacagtgtgaatctttatagtatttgaaaatgagaagaagcagcagattgtaatttggtttattggatgtgatggacgttctgtaatagaaaacctgaaacgatgattgaatgggaaaaagagactacaaaatttgtcgtaggatgtatacagacttattttctttattacagtattataagaaaacatatgtatttgtatcttgtaatagctcattattttgaaagattctcgtgccgaattcngcacgaggtgacctatggtgtggctgctgctg

SEQ ID NO: 308230 - DNA, 1211 bp, Homo sapiens
cggggggggggggggggcggggcgaagccgaggaagagcgttttggggacgggggctggtgaggctcacgttggagggcttcgcgtctgcttcggagaccgtaaggatattgatgaccatgagatccctgctcagaacccccttcctgtgtggcctgctctgggccttttgtgccccaggcgccagggctgaggagcctgcagccagcttctcccaacccggcagcatgggcctggataagaacacagtgcacgaccaagagcatatcatggagcatctagaaggtgtcatcaacaaaccagaggcggagatgtcgccacaagaattgcagctccattacttcaaaatgcatgattatgatggcaataatttgcttgatggcttagaactctccacagccatcactcatgtccataaggaggaagggagtgaacaggcaccactaatgagtgaagatgaactgattaacataatagatggtgttttgagagatgatgacaagaacaatgatggatacattgactatgctgaatttgcaaaatcactgcagtagatgttatttggccatctcctggttatatacaaatgtgacccgtgataatgtgattgaacactttagtaatgcaaaataactcatttccaactactgctgcagcattttggtaaaaacctgtagcgattcgttacactggggtgagaagagataagagaaatgaaagagaagagaaatgggacatctaatagtccctaagtgctattaaataccttattggacaagggcttgcttcaagcatctgtattagtctgtattaatgctgctgataaagacgtacccgagactgggaagaaaaagaggtttacttggacttacagttccacatggctggggaggcctcagaatcatggcgggaggtgaaaggcacttcttacatggcagcaagagaaaatgaggaagaagcaaaagtggaaacccctgataagccatcagatcttgtgaaacttattcactatcacaagaatagcatgggaaagactggcccccatgattcaattacctccccttgggtctctcccacaacacgtgggaattctggtagatacaatttcaagttgagatttgggtggggacatagccaaaccatatcattctacccctggcccctccaaatctcatgtcctcactattcaaaaccaatcatgccttcctaaca

SEQ ID NO: 308231 - DNA, 1186 bp, Homo sapiens
cggggggggggggggggcggggcgaagccgaggaagagcgttttggggacgggggctggtgaggctcacgttggagggcttcgcgtctgcttcggagaccgtaaggatattgatgaccatgagatccctgctcagaacccccttcctgtgtggcctgctctgggccttttgtgccccaggcgccagggctgaggagcctgcagccagcttctcccaacccggcagcatgggcctggataagaacacagtgcacgaccaagagcatatcatggagcatctagaaggtgtcatcaacaaaccagaggcggagatgtcgccacaagaattgcagctccattacttcaaaatgcatgattatgatggcaataatttgcttgatggcttagaactctccacagccatcactcatgtccataaggaggaagggagtgaacaggcaccactaatgagtgaagatgaactgattaacataatagatggtgttttgagagatgatgacaagaacaatgatggatacattgactatgctgaatttgcaaaatcactgcagtagatgttatttggccatctcctggttatatacaaatgtgacccgtgataatgtgattgaacactttagtaatgcaaaataactcatttccaactactgctgcagcattttggtaaaaacctgtagcgattcgttacactggggtgagaagagataagagaaatgaaagagaagagaaatgggacatctaatagtccctaagtgctattaaataccttattggacaaggaaaaaaaaaaaaaaaaaaaaaaaaaaaaaaaaaaaaaaaaaaaaaaaaaaaaaaaaaaaaaaaaaaaaaaaaaaaaaaaacgcgacaacaaaacaaaaaaaaacacaaaaaagaaaagaaaaaaaaaaaaaacaccaagggccaaaaaacgagcgcgcaaaccggactcaaaagggcaacgacagcacaaccaacgaccacagcatcgaataacgaaggcgaacgaccaaacgacgaccacgaccggacgacgaaaaccgacagaaacgcgaaacacgcgagcaagagagcgacaccacgaggcggagaaaaaaaacaaggggacgaacaagagcaacgcacggaccaactcgacggaacgaaaaaaaccagagcagcaatccgcgaggaacaaaagaaacgagaca

SEQ ID NO: 308232 - DNA, 565 bp, Homo sapiens
cactttatgttggaagtagaaggagcaattgaggatgtaggataagttaactcctattaaagcacacattttagagatcacagttcataatagtggctacgggccttgctggatctggagatggggaagtagagctggactgggatattgttgaagttacctcttttagcctagatacatggattcttttcaaatcaggaaagattagaaaaggaacccaaaaaaccctttaacagtgtgaatctttatagtatttgaaaatgagaagaagcagcagattgtaatttggtttattggatgtgatggacgttctgtaatagaaaacctgaaacgatgattgaatgggaaaaagagactacaaaatttgtcgtaggatgtatacagacttattttctttattacagtattataagaaaacatatgtatttgtaaaaatggtttcctgtgtcaagtatttgtgcagtcagagctgacttgtaaactattcttgtaatagctcattattttgaaagatttatatatgatgaattctggatatatgaccaataaaactgatgaagcaaaa

SEQ ID NO: 308233 - DNA, 1157 bp, Homo sapiens
cggggggggggggggggcggggcgaagccgaggaagagcgttttggggacgggggctggtgaggctcacgttggagggcttcgcgtctgcttcggagaccgtaaggatattgatgaccatgagatccctgctcagaacccccttcctgtgtggcctgctctgggccttttgtgccccaggcgccagggctgaggagcctgcagccagcttctcccaacccggcagcatgggcctggataagaacacagtgcacgaccaagagcatatcatggagcatctagaaggtgtcatcaacaaaccagaggcggagatgtcgccacaagaattgcagctccattacttcaccatcactcatgtccataaggaggaagggagtgaacaggcaccactaatgagtgaagatgaactgattaacataatagatggtgttttgagagatgatgacaagaacaatgatggatacattgactatgctgaatttgcaaaatcactgcagtagatgttatttggccatctcctggttatatacaaatgtgacccgtgataatgtgattgaacactttagtaatgcaaaataactcatttccaactactgctgcagcattttggtaaaaacctgtagcgattcgttacactggggtgagaagagataagagaaatgaaagagaagagaaatgggacatctaatagtccctaagtgctattaaataccttattggacaagggcttgcttcaagcatctgtattagtctgtattaatgctgctgataaagacgtacccgagactgggaagaaaaagaggtttacttggacttacagttccacatggctggggaggcctcagaatcatggcgggaggtgaaaggcacttcttacatggcagcaagagaaaatgaggaagaagcaaaagtggaaacccctgataagccatcagatcttgtgaaacttattcactatcacaagaatagcatgggaaagactggcccccatgattcaattacctccccttgggtctctcccacaacacgtgggaattctggtagatacaatttcaagttgagatttgggtggggacatagccaaaccatatcattctacccctggcccctccaaatctcatgtcctcactattcaaaaccaatcatgccttcctaaca

SEQ ID NO: 308234 - DNA, 587 bp, Homo sapiens
cggggggggggggggggcggggcgaagccgaggaagagcgttttggggacgggggctggtgaggctcacgttggagggcttcgcgtctgcttcggagaccgtaaggatattgatgaccatgagatccctgctcagaacccccttcctgtgtggcctgctctgggccttttgtgccccaggcgccagggctgaggagcctgcagccagcttctcccaacccggcagcatgggcctggataagaacacagtgcacgaccaagagcatatcatggagcatctagaaggtgtcatcaacaaaccagaggcggagatgtcgccacaagaattgcagctccattacttcaaaatgcatgattatgatggcaataatttgcttgatggcttagaactctccacagccatcactcatgtccataaggaggcaaatttgtgcacagagctgaccctcaggaggactggcacttttccaattaaagaagaatgagccataatgaaacaaataagcaaaagcctattttgaagggccttcttttaactggcaaatgtaatttctaaactggattatgataaattgactcaataataca

SEQ ID NO: 308235 - DNA, 398 bp, Homo sapiens
cggggggggggggggggcggggcgaagccgaggaagagcgttttggggacgggggctggtgaggctcacgttggagggcttcgcgtctgcttcggagaccgtaaggatattgatgaccatgagatccctgctcagaacccccttcctgtgtggcctgctctgggccttttgtgccccaggcgccagggctgaggagcctgcagccagcttctcccaacccggcagcatgggcctggataagaacacagtgcacgaccaagagcatatcatggagcatctagaaggtgtcatcaacaaaccagaggcggagatgtcgccacaagaattgcagctccattacttcaaaatgcatgattaataaatcacctcttccgctgttttagctgaagaattaaaaa

SEQ ID NO: 308236 - DNA, 408 bp, Homo sapiens
ggtaggtctggcagtggcttgggggactgtatcacagaaaggcttccctttgttaatttggtccccagtcttgttgacttgtgttgtccttatgtgccaagagtgctgcttctccactgggcatgatggctcgcatctgtaatcccagcactttgggaggccaaagtggaaggatcacttgagccaggagttcaagaccagccttggcaatatagtgagaccctgtctctacaaaacaaacaaaacaaaaattaaaaaattagccaggcctggtagtgcatgcccgtagttctacgtactcaggaggctaaggtgggaggattgcttgagtccaggatgtcgaggctatagtgagccataatcatgccaccgcacttcagcctgggcaacagagtgaggccttgtctc

SEQ ID NO: 308237 - DNA, 359 bp, Homo sapiens
cttttgttttccggcggtgatgacctacgcacacgagaacatgcctctcgcaaaggatctccttcatccctctccagaagaggagaagaggaaacacaagaagaaacgcctggtgcagagccccaattcctacttcatggatgtgaaatgcccaggatgctataaaatcaccacggtctttagccatgcacaaacggtagttttgtgtgttggctgctccactgtcctctgccagcctacaggaaaagcaaggcttacagaaggatgttccttcaggaggaagcagcactaaaagcactctgagtcaagatgagtgggaaaccatctcaataaacacattttggataaaaaaaaaaaaa

SEQ ID NO: 308238 - DNA, 392 bp, Homo sapiens
  misc_feature (205)..(205): n is a, c, g, or t
  misc_feature (220)..(220): n is a, c, g, or t
  misc_feature (226)..(226): n is a, c, g, or t
  misc_feature (266)..(267): n is a, c, g, or t
  misc_feature (270)..(270): n is a, c, g, or t
tctgcgtgggggcctgctcccctccttcgttttcatgttgggcattttccccgttgaaattgtttaccgctagttcctatttggaacacataacttctgggcctatcctagcagtctcctcctcaggattcttgacgaaaggtgcgccgcctggacacttagccccgcagacctgcagactgctccccctccgcttcctaatttnggggccgcccctggnccacangtcctcagggccaccgggagcaggtaccaccgccgagaanntcntgccgaattcggcacgagtacagaaggatgttccttcaggaggaagcagcactaaaagcactctgagtcaagatgagtgggaaaccatctcaataaacacattttggataaaaaaaaaaaaa

SEQ ID NO: 308239 - DNA, 910 bp, Homo sapiens
cttttgttttccggcggtgatgacctacgcacacgagaacatgcctctcgcaaaggatctccttcatccctctccagaagaggagaagaggaaacacaagaagaaacgcctggtgcagagccccaattcctacttcatggatgtgaaatgcccaggatgctataaaatcaccacggtctttagccatgcacaaacggtagttttgtgtgttggctgctccactgtcctctgccagcctacaggaaaagcaaggcttacagaaggatgttccttcaggaggaagcagcactaaaagcactctgagtcaagatgagtgggaaaccatctcaataaacacattttggataaaaaaaaaaaaaaaaaaaaaaaaaaaaaaaaaaaaaaaaaaaaaaaaaaaaaaaaaaaaaaaaaaaaaaaaaaaaaaccatccggcccgcccaggccaatttaactttagaccaggctaagctaagccatcggacctaaattaaatttaactagtccaatttaccttaaggggagtcaaattaaattgaacggcccttaaattaacaaggccgggaaagccaaaaccttgcccaaaccaaattaaatggcttggaatccaatttcctttaggcgagttgatgaaaaagggaccggcccggaacggattgccttacaagtagcccaactggaaagggaaatggaaatggaacgcgttaatattaggttaaacttccagttaattttaggtaaagcaagttatttactaaacggacggactgaactgggccctttcctttataaataaatggatccgccccgggttggggttggagtgccgtcccagttcgaaacaggaattttatattaaaggaacgtgacacctaaaggggggccactctttatttcaggggccggccccctc

SEQ ID NO: 308240 - DNA, 2927 bp, Homo sapiens
tttaaacgagctgtattaccccgcacagtgcaggagaaaagataattggctcaggtctcggctctgccatctaccacctgtggagccttagataagtcagttcttatctctgtcactcaacggtctcggtcttgtcatcttttacatggaatgtcatgaaatatacagtacattgcaggaactgcctcaggtaaagacttctagggttcagtaggtctcagtcgatccctctgagaaaggccgcaccctaaatgcacagactctgactctaaggggatggggtcggggaatctgcattttagtagcttctcaggtgattcagatgctcagtcaggattgagaaaccaggactcttcccagccctcctgttctctgatccacttctctgcttcctccacgtcctaacgattctccagttcccgcacagcaggagcgaagggaagaggggagagaaggcaccgctaaggaccgctggccccgccaggcggccgacctccccattccaggggcgccagccggcggattacataacgggcctcggggcgcgttctcgcgaggtttccaccgccccctcctcgctccacgtcagagggaaccgggcggagcggccaacatggcggaacgcaggagacacaagaagcggatccaggaagttggtgaaccatctaaagaagagaaggctgtggccaagtatcttcgattcaactgtccaacaaagtccaccaatatgatgggtcaccgggttgattattttattgcttcaaaagcagtggactgtcttttggattcaaagtgggcaaaggccaagaaaggagaggaagctttatttacaaccagggagtctgtggttgactactgcaacaggcttttaaagaagcagttttttcaccgagccctaaaagtaatgaaaatgaaatatgataaagacataaagaaagaaaaagataaaggaaaagctgaaagtggaaaagaagaagataaaaagagcaagaaagaaaatataaaggatgagaagacaaaaaaagaaaaagagaaaaaaaaagatggtgaaaaggaagaatccaaaaaggaggaaactccaggaactcctaaaaagaaggaaactaagaaaaaattcaaacttgagccacatgatgatcaggtttttctggatggaaatgaggtgtatgtatggatctatgacccagttcactttaaaacatttgtcatgggattaattcttgtgattgcagtaatagcggccaccctcttccccctttggccagcagaaatgagagtaggtgtttattacctcagtgtgggtgcaggctgttttgtagccagtattcttctccttgctgttgctcgatgcattctatttctcatcatttggctcataactggaggaaggcaccacttttggttcttgccaaatctgactgctgatgtgggcttcattgactccttcaggcctctgtacacacatgaatacaaaggaccaaaagcagacttaaagaaagatgagaagtctgaaaccaaaaagcaacagaagtccgacagtgaggaaaagtcagacagtgagaaaaaggaagatgaggaggggaaagtaggaccaggaaatcatggaacagaaggctcggggggagaacggcattcagacacggacagtgacaggagggaagatgatcgatcccagcacagtagtggaaatggaaatgattttgaaatgataacaaaagaggaactggaacagcaaacagatggggattgtgaagaggatgaggaagaggaaaatgatggagaaacacctaaatcttcacatgaaaaatcataatctgactaattttgggactgaatgaataagtacaagaggttggattttctatgttggctgattaccatattgaacacatggcatttgtagcattctttaaatctatctactgaaatgtatttgacattcaagcagttatattcggtccttcattttatagaatattggcactattattggtacagtttaaagccattaatatgttttatccatttgataattttacagtaagtaggtctcattcattttgacagttatcaaagatgtactttccacagttaaatttacattaatggcaatttttgatagttttatggctttttactgttagactaatcaaaaataactttaaaaggaacaaagaaactccaacatttcacattatgcatagttatgtagccatttcacagtttctttaagatgtgtaaactcattgtccttgatagtttttatttttcattataaaattataccaggagatttcttttaagattctgagttagcagagttcaaaactattttgtggaaacaagccaactagtaacaatgcagcaacacttctggtttagctaaattatttttccaatgtaggaaatccacactgatttgtacgtctgactgagagaaagatggtcgtctccagcagagaaagtgaacagcatttgttggaaggtgatggctctccctcctccctccccatttcattggcgtaacgtaaagtgtattctgtacataatttacaaataaaacattttattttaattgttacttattatttagatatttctcaacacttaaattcataaaattaagaccatgtaagggtatgtttttagagaaatggaagtttgagtaacccacagaacatctgtgatctttctacagcagcttcagttttgtgccaacattccatgtattttgaatatgagcaaaaactgatcttaagagcagacttaaagtagctttgtacgccttaatgttcattttgatttattttaaatctttacattcagaaatgagatactgtattatcagaccaggaggcattgctgtgaaagataatttcctattctaaaatatcaaatttaaaataaagataatgaaagaaaacata

SEQ ID NO: 308241 - DNA, 2026 bp, Homo sapiens
tttaaacgagctgtattaccccgcacagtgcaggagaaaagataattggctcaggtctcggctctgccatctaccacctgtggagccttagataagtcagttcttatctctgtcactcaacggtctcggtcttgtcatcttttacatggaatgtcatgaaatatacagtacattgcaggaactgcctcaggtaaagacttctagggttcagtaggtctcagtcgatccctctgagaaaggccgcaccctaaatgcacagactctgactctaaggggatggggtcggggaatctgcattttagtagcttctcaggtgattcagatgctcagtcaggattgagaaaccaggactcttcccagccctcctgttctctgatccacttctctgcttcctccacgtcctaacgattctccagttcccgcacagcaggagcgaagggaagaggggagagaaggcaccgctaaggaccgctggccccgccaggcggccgacctccccattccaggggcgccagccggcggattacataacgggcctcggggcgcgttctcgcgaggtttccaccgccccctcctcgctccacgtcagagggaaccgggcggagcggccaacatggcggaacgcaggagacacaagaagcggatccaggaagttggtgaaccatctaaagaagagaaggctgtggccaagtatcttcgattcaactgtccaacaaagtccaccaatatgatgggtcaccgggttgattattttattgcttcaaaagcagtggactgtcttttggattcaaagtgggcaaaggccaagaaaggagaggaagctttatttacaaccagggagtctgtggttgactactgcaacaggcttttaaagaagcagttttttcaccgagccctaaaagtaatgaaaatgaaatatgataaagacataaagaaagaaaaagataaaggaaaagctgaaagtggaaaagaagaagataaaaagagcaagaaagaaaatataaaggatgagaagacaaaaaaagaaaaagagaaaaaaaaagatggtgaaaaggaagaatccaaaaaggaggaaactccaggaactcctaaaaagaaggaaactaagaaaaaattcaaacttgagccacatgatgatcaggtttttctggatggaaatgaggtgtatgtatggatctatgacccagttcactttaaaacatttgtcatgggattaattcttgtgattgcagtaatagcggccaccctcttccccctttggccagcagaaatgagagtaggtgtttattacctcagtgtgggtgcaggctgttttgtagccagtattcttctccttgctgttgctcgatgcattctatttctcatcatttggctcataactggaggaaggcaccacttttggttcttgccaaatctgactgctgatgtgggcttcattgactccttcaggcctctgtacacacatgaatacaaaggaccaaaagcagacttaaagaaagatgagaagtctgaaaccaaaaagcaacagaagtccgacagtgaggaaaagtcagacagtgagaaaaaggaagatgaggaggggaaagtaggaccaggaaatcatggaacagaaggctcggggggagaacggcattcagacacggacagtgacaggagggaagatgatcgatcccagcacagtagtggaaatggaaatgattttgaaatgataacaaaagaggaactggaacagcaaacagatggggattgtgaagaggatgaggaagaggaaaatgatggagaaacacctaaatcttcacatgaaaaatcataatctgactaattttgggactgaatgaataagtacaagagaaatccacactgatttgtacgtctgactgagagaaagatggtcgtctccagcagagaaagtgaacagcatttgttggaaggtgatggctctccctcctccctccccatttcattggcgtaacgtaaagtgtattctgtacataatttacaaataaaacattttattttaattgtt

SEQ ID NO: 308242 - DNA, 1230 bp, Homo sapiens
  misc_feature (1020)..(1020): n is a, c, g, or t
tttaaacgagctgtattaccccgcacagtgcaggagaaaagataattggctcaggtctcggctctgccatctaccacctgtggagccttagataagtcagttcttatctctgtcactcaacggtctcggtcttgtcatcttttacatggaatgtcatgaaatatacagtacattgcaggaactgcctcaggtaaagacttctagggttcagtaggtctcagtcgatccctctgagaaaggccgcaccctaaatgcacagactctgactctaaggggatggggtcggggaatctgcattttagtagcttctcaggtgattcagatgctcagtcaggattgagaaaccaggactcttcccagccctcctgttctctgatccacttctctgcttcctccacgtcctaacgattctccagttcccgcacagcaggagcgaagggaagaggggagagaaggcaccgctaaggaccgctggccccgccaggcggccgacctccccattccaggggcgccagccggcggattacataacgggcctcggggcgcgttctcgcgaggtttccaccgccccctcctcgctccacgtcagagggaaccgggcggagcggccaacatggcggaacgcaggagacacaagaagcggatccaggaagttggtgaaccatctaaagaagagaaggctgtggccaagtatcttcgattcaactgtccaacaaagtccaccaatatgatgggtcaccgggttgattattttattgcttcaaaagcagtggactgtcttttggattcaaagtgggcaaaggccaagaaaggagaggaagctttatttacaaccagggagtctgtggttgactactgcaacaggcttttaaagaagcagttttttcaccgagccctaaaagtaatgaaaatgaaatatgataaagacataaagaaagaaaaagataaaggaaaagctgaaagtggaaaagaagaagataaaaagagcaagaaagaaaatataaaggatgagatgattancggctcaactaagtagtcatgtcgaccgagggctttcaattgaagcgaaatatgagcggcattaacatgtcaaccccattggccgccatagtgcccgtcagccgggaaggcaccccttgcgtgattttcgtgatgcctggcaagatcctggtcacggatggtcatgtaagcctgtccttttttgacgcgggtagtcctgcttggattttt

SEQ ID NO: 308243 - DNA, 1118 bp, Homo sapiens
tttaaacgagctgtattaccccgcacagtgcaggagaaaagataattggctcaggtctcggctctgccatctaccacctgtggagccttagataagtcagttcttatctctgtcactcaacggtctcggtcttgtcatcttttacatggaatgtcatgaaatatacagtacattgcaggaactgcctcaggtaaagacttctagggttcagtaggtctcagtcgatccctctgagaaaggccgcaccctaaatgcacagactctgactctaaggggatggggtcggggaatctgcattttagtagcttctcaggtgattcagatgctcagtcaggattgagaaaccaggactcttcccagccctcctgttctctgatccacttctctgcttcctccacgtcctaacgattctccagttcccgcacagcaggagcgaagggaagaggggagagaaggcaccgctaaggaccgctggccccgccaggcggccgacctccccattccaggggcgccagccggcggattacataacgggcctcggggcgcgttctcgcgaggtttccaccgccccctcctcgctccacgtcagagggaaccgggcggagcggccaacatggcggaacgcaggagacacaagaagcggatccaggaagttggtgaaccatctaaagaagagaaggctgtggccaagtatcttcgattcaactgtccaacaaagtccaccaatatgatgggtcaccgggttgattattttattgcttcaaaagcagtggactgtcttttggattcaaagtgggcaaaggccaagaaaggagaggaagctttatttacaaccagggagtctgtggttgactactgcaacaggcttttaaagaagcagttttttcaccgagccctaaaagtaatgaaaatgaaatatgataaagacataaagaaagggacttgctggaccaaacataaggtttcctacaagggcctggttttaacaacccacacgcactggcagagacaggcagatcagtggggcaggagagagactcagggacatagtgggctaggagctggccattggtaagggggctccatcagcatggagatgagctgtgtagaaaatgacc

SEQ ID NO: 308244 - DNA, 1787 bp, Homo sapiens
tttaaacgagctgtattaccccgcacagtgcaggagaaaagataattggctcaggtctcggctctgccatctaccacctgtggagccttagataagtcagttcttatctctgtcactcaacggtctcggtcttgtcatcttttacatggaatgtcatgaaatatacagtacattgcaggaactgcctcaggtaaagacttctagggttcagtaggtctcagtcgatccctctgagaaaggccgcaccctaaatgcacagactctgactctaaggggatggggtcggggaatctgcattttagtagcttctcaggtgattcagatgctcagtcaggattgagaaaccaggactcttcccagccctcctgttctctgatccacttctctgcttcctccacgtcctaacgattctccagttcccgcacagcaggagcgaagggaagaggggagagaaggcaccgctaaggaccgctggccccgccaggcggccgacctccccattccaggggcgccagccggcggattacataacgggcctcggggcgcgttctcgcgaggtttccaccgccccctcctcgctccacgtcagagggaaccgggcggagcggccaacatggcggaacgcaggagacacaagaagcggatccaggtagcaaagccgagctctgggcagggggcttcggcgcgctggatagtggaaggggcggggaaagccccctaaaagggcgagcgaaagcaagggcgaggtggggtggggtggggtggggttccgccgcgaggcagctggctgcaggctgcgcgttgtgaggggcctgagggggggcggtgttggcgacggcggagacagagacggaggtggtggtggagcagcaggggaaggaaggaggcgccgcgctcagaatccggctgcggaggcgcggctgtgggcctggagttcctgtggtcgcgctgtcccgggcctgagctggaaggtcagcctcccctggggcgcagacgctgacccttcccggggctcctcccctcccttcaccccatcctctggccttagctggcctgaaattaaggccacggtaataggggtagcaggaggcggcggactgacctaaagcagctggttctttgtgcgcatagaccgtaagggggaatgatctggacttggtcagctgcctcggggcctaggcagggatctgctcatccagatgttcagttgcgttgcccttctttcccttcaatattattaacttaatagtccacttgaagcttgccggcttttttccgggcgacgtggtgtaaacaaccacaacctcgttggtgctgcaacgagctggtggagcccagaaacctttcacatgccagtgtgtcatcctcgtagtaacgtacataacatctccccctaattccacatgcgtgtcatttgtgcatttcttccttgcgattttccctggttcttgttctttgccaagaggattaattatgtagaacatcttggactcaggatatttattagtcgtctcatcagctgatgtgctgagaaaccttcataagccctcaaattgatcacatgtagtaaattgttactataatcataaattgttacattcatcattgcctttctgttccttactatttcattgcttagaatgattttttctttcttccattttatcccttctttttttttttaagtttatcgatttattggcgtacaatacagatgttttgagctatgcaagttaaaattcttctgtaaactttttaagtgctgtgaaaaagacacacatgatcag

SEQ ID NO: 308245 - DNA, 1115 bp, Homo sapiens
ggcaacttggcaagagcccatctctacacacctggctaatttttgtatttttagtagaggcagggtttcaccatgttggccaggcttgtcttgaacttctgacctcaagtgatctggccgccttggccttcaaagtgctgggattataggcgtgagccaccaagcccagtcaaacaaatttttaagtgtatgtaagaacatacaaatttacttaagtgctttatagaatttatagttatcctataatcattttctagcgccagaagaaccactactactgaaggaaagatctttggaatttatttaccttagaaattacttctcgtatgttaagaggttgatgactgctttaagggacctaaaatatagaattaagcattactttctaatgtgacattagaacttttaagcaccgaggtttcttgattcttctaggtgtatgtatggatctatgacccagttcactttaaaacatttgtcatgggattaattcttggtaagtagtgagatgttaatagctataaagtgcaatctaaaatttagaaaacaatatgcagatactgtaaaagaaaatgttcctaaatttaacataaaatagttgtcattttaaaaatactttaaataaagtcagaagataaataatacactaaggaaaatatttgaaacatattaaagatcttttaagagattaacaaactgatagaaaaatggtcaaggtagttaacagataaagaaatacaatgaccaatcatcatgagtgatacttaatcacactcatatacaaattaaagctgtagtgattaagagtcttgcaaaccttaacattaaaggtcttagaaggcagtttgtcagtatctttgaaattttatgtgtctgcagtgacccagcaattctaggctgttcccatacagttgcacaaagtgtgtgcattgacacattatctgtttttttccaaatcccttagactatacttgagtataatctagcaaatatctttcaaattcaaaatgcttataccatttgatctaataaattccactttaaggaatttaccctatgccataatcacagttgcacaaacgtacatgtgcaaggatattatacctagaatagat

SEQ ID NO: 308246 - DNA, 344 bp, Homo sapiens
  misc_feature (88)..(88): n is a, c, g, or t
tcatcagctcgcccgtatgctactgtgtggatcccttcttcttcctaactttcagttcttatctgcaaagtggaaggtcagaccagantatgctctggtactccacagtgctcacctgtatcactgcagggctttctgcactgaaagtggaagcagaaggctaatgggtcacattgtgtaaaggtctctggtgctcaaagtttctaggcaaagaagtgaaaatttggaattctgtcttaactgcgcttttatcccagactggttcatcattacattagggacaaaaaggttggcagttgctggtgttttggttgaataaataatgatgtgcacacagtagcgaa

SEQ ID NO: 308247 - DNA, 5222 bp, Homo sapiens
tttaaacgagctgtattaccccgcacagtgcaggagaaaagataattggctcaggtctcggctctgccatctaccacctgtggagccttagataagtcagttcttatctctgtcactcaacggtctcggtcttgtcatcttttacatggaatgtcatgaaatatacagtacattgcaggaactgcctcaggtaaagacttctagggttcagtaggtctcagtcgatccctctgagaaaggccgcaccctaaatgcacagactctgactctaaggggatggggtcggggaatctgcattttagtagcttctcaggtgattcagatgctcagtcaggattgagaaaccaggactcttcccagccctcctgttctctgatccacttctctgcttcctccacgtcctaacgattctccagttcccgcacagcaggagcgaagggaagaggggagagaaggcaccgctaaggaccgctggccccgccaggcggccgacctccccattccaggggcgccagccggcggattacataacgggcctcggggcgcgttctcgcgaggtttccaccgccccctcctcgctccacgtcagagggaaccgggcggagcggccaacatggcggaacgcaggagacacaagaagcggatccaggaagttggtgaaccatctaaagaagagaaggctgtggccaagtatcttcgattcaactgtccaacaaagtccaccaatatgatgggtcaccgggttgattattttattgcttcaaaagcagtggactgtcttttggattcaaagtgggcaaaggccaagaaaggagaggaagctttatttacaaccagggagtctgtggttgactactgcaacaggcttttaaagaagcagttttttcaccgagccctaaaagtaatgaaaatgaaatatgataaagacataaagaaagaaaaagataaaggaaaagctgaaagtggaaaagaagaagataaaaagagcaagaaagaaaatataaaggatgagaagacaaaaaaagaaaaagagaaaaaaaaagatggtgaaaaggaagaatccaaaaaggaggaaactccaggaactcctaaaaagaaggaaactaagaaaaaattcaaacttgagccacatgatgatcaggtttttctggatggaaatgaggtgtatgtatggatctatgacccagttcactttaaaacatttgtcatgggattaattcttgtgattgcagtaatagcggccaccctcttccccctttggccagcagaaatgagagtaggtgtttattacctcagtgtgggtgcaggctgttttgtagccagtattcttctccttgctgttgctcgatgcattctatttctcatcatttggctcataactggaggaaggcaccacttttggttcttgccaaatctgactgctgatgtgggcttcattgactccttcaggcctctgtacacacatgaatacaaaggaccaaaagcagacttaaagaaagatgagaagtctgaaaccaaaaagcaacagaagtccgacagtgaggaaaagtcagacagtgagaaaaaggaagatgaggaggggaaagtaggaccaggaaatcatggaacagaaggctcggggggagaacggcattcagacacggacagtgacaggagggaagatgatcgatcccagcacagtagtggaaatggaaatgattttgaaatgataacaaaagaggaactggaacagcaaacagatggggattgtgaagaggatgaggaagaggaaaatgatggagaaacacctaaatcttcacatgaaaaatcataatctgactaattttgggactgaatgaataagtacaagaggttggattttctatgttggctgattaccatattgaacacatggcatttgtagcattctttaaatctatctactgaaatgtatttgacattcaagcagttatattcggtccttcattttatagaatattggcactattattggtacagtttaaagccattaatatgttttatccatttgataattttacagtaagtaggtctcattcattttgacagttatcaaagatgtactttccacagttaaatttacattaatggcaatttttgatagttttatggctttttactgttagactaatcaaaaataactttaaaaggaacaaagaaactccaacatttcacattatgcatagttatgtagccatttcacagtttctttaagatgtgtaaactcattgtccttgatagtttttatttttcattataaaattataccaggagatttcttttaagattctgagttagcagagttcaaaactattttgtggaaacaagccaactagtaacaatgcagcaacacttctggtttagctaaattatttttccaatgtaggaaatccacactgatttgtacgtctgactgagagaaagatggtcgtctccagcagagaaagtgaacagcatttgttggaaggtgatggctctccctcctccctccccatttcattggcgtaacgtaaagtgtattctgtacataatttacaaataaaacattttattttaattgttacttattatttagatatttctcaacacttaaattcataaaattaagaccatgtaagggtatgtttttagagaaatggaagtttgagtaacccacagaacatctgtgatctttctacagcagcttcagttttgtgccaacattccatgtattttgaatatgagcaaaaactgatcttaagagcagacttaaagtagctttgtacgccttaatgttcattttgatttattttaaatctttacattcagaaatgagatactgtattatcagaccaggaggcattgctgtgaaagataatttcctattctaaaatatcaaatttaaaataaagataatgaaagaaaacataagagaactattggactctaattgctttgaactagttttgcagtttgactttacgtcttatacatcttagttacaagtctttggaaactcttgtttacttatgagcataatcattccttggagttatactaactaataatgaatattaaatgatttttcttcagtcacagtgagagcatcttgctttgtggttgaaataggtagtgtatgtcagtctttgctttaggctgtttctcatctaagtgtttgaattaaagatgttaaatttttctaattgtgaaaaatatgttttctgtatcgacacattttattaaacttggcttgattgcttctttatagtagtccctgtaagtggacataaatgtggctatttgatgttaatgcaactatgtcaaggctgcaatcactttaatagtttctttttagcaaataaatgttcattgatgaagtgcctgggtattttcccgtcccatttgcagagctctactacttcatttccacagtaagcatatatataatgatcacttctgagtttatcaccagtaacattgatacctattttggggtataaacatggtgtttttcagaaataaaaattatttcattaacctttactattactgtgataatacccaggcactcaatattcatcctgaaattttttataatatatgtaatttgtctagtcttaaagacatttggagcatggccaacaggaaggtcagcttcttactgatgtgtgtggattcttacagaatgttagtacaaatttttataaatatttggtgatccctggggggaaatatcattcttactatggttagaaagtgaattagaaatttcagctcagtttctattttactattcaagttgtgtactttaaacaaatataaaaatcaaaaggctgcctctattacaatcctcagtggaatagatggctatctttcttggctaacattaaatattcttgtaccagagcatggaaaatcgtttataattgttaatagaatggcgatttttttttaagaacttcagatttgctatgctgctgtaagtagaaagcatgaagctttttgatcatgtagggcttattgtagagggtatcaattggcctaactaagcaggattgaatttaccagaggctaagttcagatagtaagaataatgcatatgtgattgttcttaaagtcaatgtattaaataaggtatttttccttttccctcttactggatttttcaattttcaaaccatatggcctaggtaactttaattgaaataatatagatttagttgaatactattcaggaagtaataaattttaatatatcacattgaaattatgcagtggtgatgaattttggtgtttcccccctctttctggttttacatcatgaggatcagttagctgctgacaagaaaagtcatcttgtgtcttttgtaaattgaattttttttttaaatctattaggaactggaaaacagcaagtatggttgattctcattattcaaggtagttacgttctataaagtcactgcgaacactgaattagcaaatatagaacctaggggaaatacaaggctagatttctgcaagccactggtcacattttcatcaagcagtcaacatgtaaatttctgttgtaaagacaccttatttaatataatcgattcattaacattgaagtcatgaccaacaacactgtaactcatgcctgaatgaagcttatctgacacataagcttcataaggcacacaacagcctttttacccttaggaacagctttttgcccttagcactatgcttgggggccattttaaacagtgaaatcaaaaaaagaacagaaatgcaaaaaccatggcattagcgtaaaaaggacacgtttatagtatgaaagctggaacatggccttgttcaacctcagctcagaatatgtgtacagcaagttttttgctgtaccacaaaattttaggttaggcaaattcacaaatacggaatccatgaataacgaggatcaactgtacttaactatattttaaagctgtgacatttatctacctggtttatggaatagaatttattgctgaatcatgctccagtatttgagtgatgttttaaatatcctatgtctgaaaataattcctcctaattgtgtggtaatttgcttttactgtttccacagtatttcaggtctttgctcattcactcagtaatactgagcacttaccatgtaccagaattttactaggcacaaccatgaataaaaatacaattctcttgcaccattaaaaaaaaag

SEQ ID NO: 308248 - DNA, 4616 bp, Homo sapiens
tttaaacgagctgtattaccccgcacagtgcaggagaaaagataattggctcaggtctcggctctgccatctaccacctgtggagccttagataagtcagttcttatctctgtcactcaacggtctcggtcttgtcatcttttacatggaatgtcatgaaatatacagtacattgcaggaactgcctcaggtaaagacttctagggttcagtaggtctcagtcgatccctctgagaaaggccgcaccctaaatgcacagactctgactctaaggggatggggtcggggaatctgcattttagtagcttctcaggtgattcagatgctcagtcaggattgagaaaccaggactcttcccagccctcctgttctctgatccacttctctgcttcctccacgtcctaacgattctccagttcccgcacagcaggagcgaagggaagaggggagagaaggcaccgctaaggaccgctggccccgccaggcggccgacctccccattccaggggcgccagccggcggattacataacgggcctcggggcgcgttctcgcgaggtttccaccgccccctcctcgctccacgtcagagggaaccgggcggagcggccaacatggcggaacgcaggagacacaagaagcggatccaggaagttggtgaaccatctaaagaagagaaggctgtggccaagtatcttcgattcaactgtccaacaaagtccaccaatatgatgggtcaccgggttgattattttattgcttcaaaagcagtggactgtcttttggattcaaagtgggcaaaggccaagaaaggagaggaagctttatttacaaccagggagtctgtggttgactactgcaacaggcttttaaagaagcagttttttcaccgagccctaaaagtaatgaaaatgaaatatgataaagacataaagaaagaaaaagataaaggaaaagctgaaagtggaaaagaagaagataaaaagagcaagaaagaaaatataaaggatgagaagacaaaaaaagaaaaagagaaaaaaaaagatggtgaaaaggaagaatccaaaaaggaggaaactccaggaactcctaaaaagaaggaaactaagaaaaaattcaaacttgagccacatgatgatcaggtttttctggatggaaatgaggtgtatgtatggatctatgacccagttcactttaaaacatttgtcatgggattaattcttgtgattgcagtaatagcggccaccctcttccccctttggccagcagaaatgagagtaggtgtttattacctcagtgtgggtgcaggctgttttgtagccagtattcttctccttgctgttgctcgatgcattctatttctcatcatttggctcataactggaggaaggcaccacttttggttcttgccaaatctgactgctgatgtgggcttcattgactccttcaggcctctgtacacacatgaatacaaaggaccaaaagcagacttaaagaaagatgagaagtctgaaaccaaaaagcaacagaagtccgacagtgaggaaaagtcagacagtgagaaaaaggaagatgaggaggggaaagtaggaccaggaaatcatggaacagaaggctcggggggagaacggcattcagacacggacagtgacaggagggaagatgatcgatcccagcacagtagtggaaatggaaatgattttgaaatgataacaaaagaggaactggaacagcaaacagatggggattgtgaagaggatgaggaagaggaaaatgatggagaaacacctaaatcttcacatgaaaaatcataatctgactaattttgggactgaatgaataagtacaagaggttggattttctatgttggctgattaccatattgaacacatggcatttgtagcattctttaaatctatctactgaaatgtatttgacattcaagcagttatattcggtccttcattttatagaatattggcactattattggtacagtttaaagccattaatatgttttatccatttgataattttacagtaagtaggtctcattcattttgacagttatcaaagatgtactttccacagttaaatttacattaatggcaatttttgatagttttatggctttttactgttagactaatcaaaaataactttaaaaggaacaaagaaactccaacatttcacattatgcatagttatgtagccatttcacagtttctttaagatgtgtaaactcattgtccttgatagtttttatttttcattataaaattataccaggagatttcttttaagattctgagttagcagagttcaaaactattttgtggaaacaagccaactagtaacaatgcagcaacacttctggtttagctaaattatttttccaatgtaggaaatccacactgatttgtacgtctgactgagagaaagatggtcgtctccagcagagaaagtgaacagcatttgttggaaggtgatggctctccctcctccctccccatttcattggcgtaacgtaaagtgtattctgtacataatttacaaataaaacattttattttaattgttacttattatttagatatttctcaacacttaaattcataaaattaagaccatgtaagggtatgtttttagagaaatggaagtttgagtaacccacagaacatctgtgatctttctacagcagcttcagttttgtgccaacattccatgtattttgaatatgagcaaaaactgatcttaagagcagacttaaagtagctttgtacgccttaatgttcattttgatttattttaaatctttacattcagaaatgagatactgtattatcagaccaggaggcattgctgtgaaagataatttcctattctaaaatatcaaatttaaaataaagataatgaaagaaaacataagagaactattggactctaattgctttgaactagttttgcagtttgactttacgtcttatacatcttagttacaagtctttggaaactcttgtttacttatgagcataatcattccttggagttatactaactaataatgaatattaaatgatttttcttcagtcacagtgagagcatcttgctttgtggttgaaataggtagtgtatgtcagtctttgctttaggctgtttctcatctaagtgtttgaattaaagatgttaaatttttctaattgtgaaaaatatgttttctgtatcgacacattttattaaacttggcttgattgcttctttatagtagtccctgtaagtggacataaatgtggctatttgatgttaatgcaactatgtcaaggctgcaatcactttaatagtttctttttagcaaataaatgttcattgatgaagtgcctgggtattttcccgtcccatttgcagagctctactacttcatttccacagtaagcatatatataatgatcacttctgagtttatcaccagtaacattgatacctattttggggtataaacatggtgtttttcagaaataaaaattatttcattaacctttactattactgtgataatacccaggcactcaatattcatcctgaaattttttataatatatgtaatttgtctagtcttaaagacatttggagcatggccaacaggaaggtcagcttcttactgatgtgtgtggattcttacagaatgttagtacaaatttttataaatatttggtgatccctggggggaaatatcattcttactatggttagaaagtgaattagaaatttcagctcagtttctattttactattcaagttgtgtactttaaacaaatataaaaatcaaaaggctgcctctattacaatcctcagtggaatagatggctatctttcttggctaacattaaatattcttgtaccagagcatggaaaatcgtttataattgttaatagaatggcgatttttttttaagaacttcagatttgctatgctgctgtaagtagaaagcatgaagctttttgatcatgtagggcttattgtagagggtatcaattggcctaactaagcaggattgaatttaccagaggctaagttcagatagtaagaataatgcatatgtgattgttcttaaagtcaatgtattaaataaggtatttttccttttccctcttactggatttttcaattttcaaaccatatggcctaggtaactttaattgaaataatatagatttagttgaatactattcaggaagtaataaattttaatatatcacattgaaattatgcagtggtgatgaattttggtgtttcccccctctttctggttttacatcatgaggatcagttagctgctgacaagaaaagtcatcttgtgtcttttgtaaattgaattttttttttaaatctattaggaactggaaaacagcaagtatggttgattctcattattcaaggtagttacgttctataaagtcactgcgaacactgaattagcaaatatagaacctaggggaaatacaaggctagatttctgcaagccactggtcacatgttgactgcttgatgaaaatgtgaccagtggcttgcagaaatctagccttgtatttcccctaggttctatatttggtcgagc

SEQ ID NO: 308249 - DNA, 4405 bp, Homo sapiens
  misc_feature (4369)..(4369): n is a, c, g, or t
  misc_feature (4404)..(4404): n is a, c, g, or t
tttaaacgagctgtattaccccgcacagtgcaggagaaaagataattggctcaggtctcggctctgccatctaccacctgtggagccttagataagtcagttcttatctctgtcactcaacggtctcggtcttgtcatcttttacatggaatgtcatgaaatatacagtacattgcaggaactgcctcaggtaaagacttctagggttcagtaggtctcagtcgatccctctgagaaaggccgcaccctaaatgcacagactctgactctaaggggatggggtcggggaatctgcattttagtagcttctcaggtgattcagatgctcagtcaggattgagaaaccaggactcttcccagccctcctgttctctgatccacttctctgcttcctccacgtcctaacgattctccagttcccgcacagcaggagcgaagggaagaggggagagaaggcaccgctaaggaccgctggccccgccaggcggccgacctccccattccaggggcgccagccggcggattacataacgggcctcggggcgcgttctcgcgaggtttccaccgccccctcctcgctccacgtcagagggaaccgggcggagcggccaacatggcggaacgcaggagacacaagaagcggatccaggaagttggtgaaccatctaaagaagagaaggctgtggccaagtatcttcgattcaactgtccaacaaagtccaccaatatgatgggtcaccgggttgattattttattgcttcaaaagcagtggactgtcttttggattcaaagtgggcaaaggccaagaaaggagaggaagctttatttacaaccagggagtctgtggttgactactgcaacaggcttttaaagaagcagttttttcaccgagccctaaaagtaatgaaaatgaaatatgataaagacataaagaaagaaaaagataaaggaaaagctgaaagtggaaaagaagaagataaaaagagcaagaaagaaaatataaaggatgagaagacaaaaaaagaaaaagagaaaaaaaaagatggtgaaaaggaagaatccaaaaaggaggaaactccaggaactcctaaaaagaaggaaactaagaaaaaattcaaacttgagccacatgatgatcaggtttttctggatggaaatgaggtgtatgtatggatctatgacccagttcactttaaaacatttgtcatgggattaattcttgtgattgcagtaatagcggccaccctcttccccctttggccagcagaaatgagagtaggtgtttattacctcagtgtgggtgcaggctgttttgtagccagtattcttctccttgctgttgctcgatgcattctatttctcatcatttggctcataactggaggaaggcaccacttttggttcttgccaaatctgactgctgatgtgggcttcattgactccttcaggcctctgtacacacatgaatacaaaggaccaaaagcagacttaaagaaagatgagaagtctgaaaccaaaaagcaacagaagtccgacagtgaggaaaagtcagacagtgagaaaaaggaagatgaggaggggaaagtaggaccaggaaatcatggaacagaaggctcggggggagaacggcattcagacacggacagtgacaggagggaagatgatcgatcccagcacagtagtggaaatggaaatgattttgaaatgataacaaaagaggaactggaacagcaaacagatggggattgtgaagaggatgaggaagaggaaaatgatggagaaacacctaaatcttcacatgaaaaatcataatctgactaattttgggactgaatgaataagtacaagaggttggattttctatgttggctgattaccatattgaacacatggcatttgtagcattctttaaatctatctactgaaatgtatttgacattcaagcagttatattcggtccttcattttatagaatattggcactattattggtacagtttaaagccattaatatgttttatccatttgataattttacagtaagtaggtctcattcattttgacagttatcaaagatgtactttccacagttaaatttacattaatggcaatttttgatagttttatggctttttactgttagactaatcaaaaataactttaaaaggaacaaagaaactccaacatttcacattatgcatagttatgtagccatttcacagtttctttaagatgtgtaaactcattgtccttgatagtttttatttttcattataaaattataccaggagatttcttttaagattctgagttagcagagttcaaaactattttgtggaaacaagccaactagtaacaatgcagcaacacttctggtttagctaaattatttttccaatgtaggaaatccacactgatttgtacgtctgactgagagaaagatggtcgtctccagcagagaaagtgaacagcatttgttggaaggtgatggctctccctcctccctccccatttcattggcgtaacgtaaagtgtattctgtacataatttacaaataaaacattttattttaattgttacttattatttagatatttctcaacacttaaattcataaaattaagaccatgtaagggtatgtttttagagaaatggaagtttgagtaacccacagaacatctgtgatctttctacagcagcttcagttttgtgccaacattccatgtattttgaatatgagcaaaaactgatcttaagagcagacttaaagtagctttgtacgccttaatgttcattttgatttattttaaatctttacattcagaaatgagatactgtattatcagaccaggaggcattgctgtgaaagataatttcctattctaaaatatcaaatttaaaataaagataatgaaagaaaacataagagaactattggactctaattgctttgaactagttttgcagtttgactttacgtcttatacatcttagttacaagtctttggaaactcttgtttacttatgagcataatcattccttggagttatactaactaataatgaatattaaatgatttttcttcagtcacagtgagagcatcttgctttgtggttgaaataggtagtgtatgtcagtctttgctttaggctgtttctcatctaagtgtttgaattaaagatgttaaatttttctaattgtgaaaaatatgttttctgtatcgacacattttattaaacttggcttgattgcttctttatagtagtccctgtaagtggacataaatgtggctatttgatgttaatgcaactatgtcaaggctgcaatcactttaatagtttctttttagcaaataaatgttcattgatgaagtgcctgggtattttcccgtcccatttgcagagctctactacttcatttccacagtaagcatatatataatgatcacttctgagtttatcaccagtaacattgatacctattttggggtataaacatggtgtttttcagaaataaaaattatttcattaacctttactattactgtgataatacccaggcactcaatattcatcctgaaattttttataatatatgtaatttgtctagtcttaaagacatttggagcatggccaacaggaaggtcagcttcttactgatgtgtgtggattcttacagaatgttagtacaaatttttataaatatttggtgatccctggggggaaatatcattcttactatggttagaaagtgaattagaaatttcagctcagtttctattttactattcaagttgtgtactttaaacaaatataaaaatcaaaaggctgcctctattacaatcctcagtggaatagatggctatctttcttggctaacattaaatattcttgtaccagagcatggaaaatcgtttataattgttaatagaatggcgatttttttttaagaacttcagatttgctatgctgctgtaagtagaaagcatgaagctttttgatcatgtagggcttattgtagagggtatcaattggcctaactaagcaggattgaatttaccagaggctaagttcagatagtaagaataatgcatatgtgattgttcttaaagtcaatgtattaaataaggtatttttccttttccctcttactggatttttcaattttcaaaccatatggcctaggtaactttaattgaaataatatagatttagttgaatactattcaggaagtaataaattttaatatatcacattgaaattatgcagtggtgatgaattttggtgtttcccccctctttctggttttacatcatgaggatcagttagctgctgttttccagttcctaatagatttaaaaaaaanattcaatttacaaaagacacaagatgacttttctng

SEQ ID NO: 308250 - DNA, 4894 bp, Homo sapiens
  misc_feature (1935)..(1935): n is a, c, g, or t
  misc_feature (1965)..(1965): n is a, c, g, or t
  misc_feature (1996)..(1996): n is a, c, g, or t
  misc_feature (1998)..(1998): n is a, c, g, or t
tttaaacgagctgtattaccccgcacagtgcaggagaaaagataattggctcaggtctcggctctgccatctaccacctgtggagccttagataagtcagttcttatctctgtcactcaacggtctcggtcttgtcatcttttacatggaatgtcatgaaatatacagtacattgcaggaactgcctcaggtaaagacttctagggttcagtaggtctcagtcgatccctctgagaaaggccgcaccctaaatgcacagactctgactctaaggggatggggtcggggaatctgcattttagtagcttctcaggtgattcagatgctcagtcaggattgagaaaccaggactcttcccagccctcctgttctctgatccacttctctgcttcctccacgtcctaacgattctccagttcccgcacagcaggagcgaagggaagaggggagagaaggcaccgctaaggaccgctggccccgccaggcggccgacctccccattccaggggcgccagccggcggattacataacgggcctcggggcgcgttctcgcgaggtttccaccgccccctcctcgctccacgtcagagggaaccgggcggagcggccaacatggcggaacgcaggagacacaagaagcggatccaggaagttggtgaaccatctaaagaagagaaggctgtggccaagtatcttcgattcaactgtccaacaaagtccaccaatatgatgggtcaccgggttgattattttattgcttcaaaagcagtggactgtcttttggattcaaagtgggcaaaggccaagaaaggagaggaagctttatttacaaccagggagtctgtggttgactactgcaacaggcttttaaagaagcagttttttcaccgagccctaaaagtaatgaaaatgaaatatgataaagacataaagaaagaaaaagataaaggaaaagctgaaagtggaaaagaagaagataaaaagagcaagaaagaaaatataaaggatgagaagacaaaaaaagaaaaagagaaaaaaaaagatggtgaaaaggaagaatccaaaaaggaggaaactccaggaactcctaaaaagaaggaaactaagaaaaaattcaaacttgagccacatgatgatcaggtttttctggatggaaatgaggtgtatgtatggatctatgacccagttcactttaaaacatttgtcatgggattaattcttgtgattgcagtaatagcggccaccctcttccccctttggccagcagaaatgagagtaggtgtttattacctcagtgtgggtgcaggctgttttgtagccagtattcttctccttgctgttgctcgatgcattctatttctcatcatttggctcataactggaggaaggcaccacttttggttcttgccaaatctgactgctgatgtgggcttcattgactccttcaggcctctgtacacacatgaatacaaaggaccaaaagcagacttaaagaaagatgagaagtctgaaaccaaaaagcaacagaagtccgacagtgaggaaaagtcagacagtgagaaaaaggaagatgaggaggggaaagtaggaccaggaaatcatggaacagaaggctcggggggagaacggcattcagacacggacagtgacaggagggaagatgatcgatcccagcacagtagtggaaatggaaatgattttgaaatggctgcagtgctctgagccctaggattcatctttcttttcaccgtaggtggcctgactggcattgtattagcaaactcatcactagacatcgtactacacgacacgtactacgttgtagctcacttccactatgtcctatcaataggagctgtatttgccatcataggaggcttcattcactgatttcccctattctcaggctacaccctagaccaaacctacgccanaatccatcactatcatattcatcggcgtanatctaactttcttcccacaacactttctcgncntatcggaatgccccgacaagccaactagtaacaatgcagcaacacttctggtttagctaaattatttttccaatgtaggaaatccacactgatttgtacgtctgactgagagaaagatggtcgtctccagcagagaaagtgaacagcatttgttggaaggtgatggctctccctcctccctccccatttcattggcgtaacgtaaagtgtattctgtacataatttacaaataaaacattttattttaattgttacttattatttagatatttctcaacacttaaattcataaaattaagaccatgtaagggtatgtttttagagaaatggaagtttgagtaacccacagaacatctgtgatctttctacagcagcttcagttttgtgccaacattccatgtattttgaatatgagcaaaaactgatcttaagagcagacttaaagtagctttgtacgccttaatgttcattttgatttattttaaatctttacattcagaaatgagatactgtattatcagaccaggaggcattgctgtgaaagataatttcctattctaaaatatcaaatttaaaataaagataatgaaagaaaacataagagaactattggactctaattgctttgaactagttttgcagtttgactttacgtcttatacatcttagttacaagtctttggaaactcttgtttacttatgagcataatcattccttggagttatactaactaataatgaatattaaatgatttttcttcagtcacagtgagagcatcttgctttgtggttgaaataggtagtgtatgtcagtctttgctttaggctgtttctcatctaagtgtttgaattaaagatgttaaatttttctaattgtgaaaaatatgttttctgtatcgacacattttattaaacttggcttgattgcttctttatagtagtccctgtaagtggacataaatgtggctatttgatgttaatgcaactatgtcaaggctgcaatcactttaatagtttctttttagcaaataaatgttcattgatgaagtgcctgggtattttcccgtcccatttgcagagctctactacttcatttccacagtaagcatatatataatgatcacttctgagtttatcaccagtaacattgatacctattttggggtataaacatggtgtttttcagaaataaaaattatttcattaacctttactattactgtgataatacccaggcactcaatattcatcctgaaattttttataatatatgtaatttgtctagtcttaaagacatttggagcatggccaacaggaaggtcagcttcttactgatgtgtgtggattcttacagaatgttagtacaaatttttataaatatttggtgatccctggggggaaatatcattcttactatggttagaaagtgaattagaaatttcagctcagtttctattttactattcaagttgtgtactttaaacaaatataaaaatcaaaaggctgcctctattacaatcctcagtggaatagatggctatctttcttggctaacattaaatattcttgtaccagagcatggaaaatcgtttataattgttaatagaatggcgatttttttttaagaacttcagatttgctatgctgctgtaagtagaaagcatgaagctttttgatcatgtagggcttattgtagagggtatcaattggcctaactaagcaggattgaatttaccagaggctaagttcagatagtaagaataatgcatatgtgattgttcttaaagtcaatgtattaaataaggtatttttccttttccctcttactggatttttcaattttcaaaccatatggcctaggtaactttaattgaaataatatagatttagttgaatactattcaggaagtaataaattttaatatatcacattgaaattatgcagtggtgatgaattttggtgtttcccccctctttctggttttacatcatgaggatcagttagctgctgacaagaaaagtcatcttgtgtcttttgtaaattgaattttttttttaaatctattaggaactggaaaacagcaagtatggttgattctcattattcaaggtagttacgttctataaagtcactgcgaacactgaattagcaaatatagaacctaggggaaatacaaggctagatttctgcaagccactggtcacattttcatcaagcagtcaacatgtaaatttctgttgtaaagacaccttatttaatataatcgattcattaacattgaagtcatgaccaacaacactgtaactcatgcctgaatgaagcttatctgacacataagcttcataaggcacacaacagcctttttacccttaggaacagctttttgcccttagcactatgcttgggggccattttaaacagtgaaatcaaaaaaagaacagaaatgcaaaaaccatggcattagcgtaaaaaggacacgtttatagtatgaaagctggaacatggccttgttcaacctcagctcagaatatgtgtacagcaagttttttgctgtaccacaaaattttaggttaggcaaattcacaaatacggaatccatgaataacgaggatcaactgtacttaactatattttaaagctgtgacatttatctacctggtttatggaatagaatttattgctgaatcatgctccagtatttgagtgatgttttaaatatcctatgtctgaaaataattcctcctaattgtgtggtaatttgcttttactgtttccacagtatttcaggtctttgctcattcactcagtaatactgagcacttaccatgtaccagaattttactaggcacaaccatgaataaaaatacaattctcttgcaccattaaaaaaaaag

SEQ ID NO: 308251 - DNA, 5319 bp, Homo sapiens
tttaaacgagctgtattaccccgcacagtgcaggagaaaagataattggctcaggtctcggctctgccatctaccacctgtggagccttagataagtcagttcttatctctgtcactcaacggtctcggtcttgtcatcttttacatggaatgtcatgaaatatacagtacattgcaggaactgcctcaggtaaagacttctagggttcagtaggtctcagtcgatccctctgagaaaggccgcaccctaaatgcacagactctgactctaaggggatggggtcggggaatctgcattttagtagcttctcaggtgattcagatgctcagtcaggattgagaaaccaggactcttcccagccctcctgttctctgatccacttctctgcttcctccacgtcctaacgattctccagttcccgcacagcaggagcgaagggaagaggggagagaaggcaccgctaaggaccgctggccccgccaggcggccgacctccccattccaggggcgccagccggcggattacataacgggcctcggggcgcgttctcgcgaggtttccaccgccccctcctcgctccacgtcagagggaaccgggcggagcggccaacatggcggaacgcaggagacacaagaagcggatccagtataatttcagattctcgtgtcccatcgaagtttctagcaagaggactgttgtcacatttccttcttggactcattactggtcactgaaaaccagaagaagttggtgaaccatctaaagaagagaaggctgtggccaagtatcttcgattcaactgtccaacaaagtccaccaatatgatgggtcaccgggttgattattttattgcttcaaaagcagtggactgtcttttggattcaaagtgggcaaaggccaagaaaggagaggaagctttatttacaaccagggagtctgtggttgactactgcaacaggcttttaaagaagcagttttttcaccgagccctaaaagtaatgaaaatgaaatatgataaagacataaagaaagaaaaagataaaggaaaagctgaaagtggaaaagaagaagataaaaagagcaagaaagaaaatataaaggatgagaagacaaaaaaagaaaaagagaaaaaaaaagatggtgaaaaggaagaatccaaaaaggaggaaactccaggaactcctaaaaagaaggaaactaagaaaaaattcaaacttgagccacatgatgatcaggtttttctggatggaaatgaggtgtatgtatggatctatgacccagttcactttaaaacatttgtcatgggattaattcttgtgattgcagtaatagcggccaccctcttccccctttggccagcagaaatgagagtaggtgtttattacctcagtgtgggtgcaggctgttttgtagccagtattcttctccttgctgttgctcgatgcattctatttctcatcatttggctcataactggaggaaggcaccacttttggttcttgccaaatctgactgctgatgtgggcttcattgactccttcaggcctctgtacacacatgaatacaaaggaccaaaagcagacttaaagaaagatgagaagtctgaaaccaaaaagcaacagaagtccgacagtgaggaaaagtcagacagtgagaaaaaggaagatgaggaggggaaagtaggaccaggaaatcatggaacagaaggctcggggggagaacggcattcagacacggacagtgacaggagggaagatgatcgatcccagcacagtagtggaaatggaaatgattttgaaatgataacaaaagaggaactggaacagcaaacagatggggattgtgaagaggatgaggaagaggaaaatgatggagaaacacctaaatcttcacatgaaaaatcataatctgactaattttgggactgaatgaataagtacaagaggttggattttctatgttggctgattaccatattgaacacatggcatttgtagcattctttaaatctatctactgaaatgtatttgacattcaagcagttatattcggtccttcattttatagaatattggcactattattggtacagtttaaagccattaatatgttttatccatttgataattttacagtaagtaggtctcattcattttgacagttatcaaagatgtactttccacagttaaatttacattaatggcaatttttgatagttttatggctttttactgttagactaatcaaaaataactttaaaaggaacaaagaaactccaacatttcacattatgcatagttatgtagccatttcacagtttctttaagatgtgtaaactcattgtccttgatagtttttatttttcattataaaattataccaggagatttcttttaagattctgagttagcagagttcaaaactattttgtggaaacaagccaactagtaacaatgcagcaacacttctggtttagctaaattatttttccaatgtaggaaatccacactgatttgtacgtctgactgagagaaagatggtcgtctccagcagagaaagtgaacagcatttgttggaaggtgatggctctccctcctccctccccatttcattggcgtaacgtaaagtgtattctgtacataatttacaaataaaacattttattttaattgttacttattatttagatatttctcaacacttaaattcataaaattaagaccatgtaagggtatgtttttagagaaatggaagtttgagtaacccacagaacatctgtgatctttctacagcagcttcagttttgtgccaacattccatgtattttgaatatgagcaaaaactgatcttaagagcagacttaaagtagctttgtacgccttaatgttcattttgatttattttaaatctttacattcagaaatgagatactgtattatcagaccaggaggcattgctgtgaaagataatttcctattctaaaatatcaaatttaaaataaagataatgaaagaaaacataagagaactattggactctaattgctttgaactagttttgcagtttgactttacgtcttatacatcttagttacaagtctttggaaactcttgtttacttatgagcataatcattccttggagttatactaactaataatgaatattaaatgatttttcttcagtcacagtgagagcatcttgctttgtggttgaaataggtagtgtatgtcagtctttgctttaggctgtttctcatctaagtgtttgaattaaagatgttaaatttttctaattgtgaaaaatatgttttctgtatcgacacattttattaaacttggcttgattgcttctttatagtagtccctgtaagtggacataaatgtggctatttgatgttaatgcaactatgtcaaggctgcaatcactttaatagtttctttttagcaaataaatgttcattgatgaagtgcctgggtattttcccgtcccatttgcagagctctactacttcatttccacagtaagcatatatataatgatcacttctgagtttatcaccagtaacattgatacctattttggggtataaacatggtgtttttcagaaataaaaattatttcattaacctttactattactgtgataatacccaggcactcaatattcatcctgaaattttttataatatatgtaatttgtctagtcttaaagacatttggagcatggccaacaggaaggtcagcttcttactgatgtgtgtggattcttacagaatgttagtacaaatttttataaatatttggtgatccctggggggaaatatcattcttactatggttagaaagtgaattagaaatttcagctcagtttctattttactattcaagttgtgtactttaaacaaatataaaaatcaaaaggctgcctctattacaatcctcagtggaatagatggctatctttcttggctaacattaaatattcttgtaccagagcatggaaaatcgtttataattgttaatagaatggcgatttttttttaagaacttcagatttgctatgctgctgtaagtagaaagcatgaagctttttgatcatgtagggcttattgtagagggtatcaattggcctaactaagcaggattgaatttaccagaggctaagttcagatagtaagaataatgcatatgtgattgttcttaaagtcaatgtattaaataaggtatttttccttttccctcttactggatttttcaattttcaaaccatatggcctaggtaactttaattgaaataatatagatttagttgaatactattcaggaagtaataaattttaatatatcacattgaaattatgcagtggtgatgaattttggtgtttcccccctctttctggttttacatcatgaggatcagttagctgctgacaagaaaagtcatcttgtgtcttttgtaaattgaattttttttttaaatctattaggaactggaaaacagcaagtatggttgattctcattattcaaggtagttacgttctataaagtcactgcgaacactgaattagcaaatatagaacctaggggaaatacaaggctagatttctgcaagccactggtcacattttcatcaagcagtcaacatgtaaatttctgttgtaaagacaccttatttaatataatcgattcattaacattgaagtcatgaccaacaacactgtaactcatgcctgaatgaagcttatctgacacataagcttcataaggcacacaacagcctttttacccttaggaacagctttttgcccttagcactatgcttgggggccattttaaacagtgaaatcaaaaaaagaacagaaatgcaaaaaccatggcattagcgtaaaaaggacacgtttatagtatgaaagctggaacatggccttgttcaacctcagctcagaatatgtgtacagcaagttttttgctgtaccacaaaattttaggttaggcaaattcacaaatacggaatccatgaataacgaggatcaactgtacttaactatattttaaagctgtgacatttatctacctggtttatggaatagaatttattgctgaatcatgctccagtatttgagtgatgttttaaatatcctatgtctgaaaataattcctcctaattgtgtggtaatttgcttttactgtttccacagtatttcaggtctttgctcattcactcagtaatactgagcacttaccatgtaccagaattttactaggcacaaccatgaataaaaatacaattctcttgcaccattaaaaaaaaag

SEQ ID NO: 308252 - DNA, 5429 bp, Homo sapiens
tttaaacgagctgtattaccccgcacagtgcaggagaaaagataattggctcaggtctcggctctgccatctaccacctgtggagccttagataagtcagttcttatctctgtcactcaacggtctcggtcttgtcatcttttacatggaatgtcatgaaatatacagtacattgcaggaactgcctcaggtaaagacttctagggttcagtaggtctcagtcgatccctctgagaaaggccgcaccctaaatgcacagactctgactctaaggggatggggtcggggaatctgcattttagtagcttctcaggtgattcagatgctcagtcaggattgagaaaccaggactcttcccagccctcctgttctctgatccacttctctgcttcctccacgtcctaacgattctccagttcccgcacagcaggagcgaagggaagaggggagagaaggcaccgctaaggaccgctggccccgccaggcggccgacctccccattccaggggcgccagccggcggattacataacgggcctcggggcgcgttctcgcgaggtttccaccgccccctcctcgctccacgtcagagggaaccgggcggagcggccaacatggcggaacgcaggagacacaagaagcggatccagaggctgtggagtaatgtgacagtggcagagagctaaaacttgagccaaactgcctgtttgtaccccacctccaccaattattggctgagtaactttgagcaagttaatttttacctccctgtctgcatcggtaagaaaacatatttacctcaaaaaaaaaaaaagcaagaaaaaagaaaaactttaagattgctgtgaaaataataggaagttggtgaaccatctaaagaagagaaggctgtggccaagtatcttcgattcaactgtccaacaaagtccaccaatatgatgggtcaccgggttgattattttattgcttcaaaagcagtggactgtcttttggattcaaagtgggcaaaggccaagaaaggagaggaagctttatttacaaccagggagtctgtggttgactactgcaacaggcttttaaagaagcagttttttcaccgagccctaaaagtaatgaaaatgaaatatgataaagacataaagaaagaaaaagataaaggaaaagctgaaagtggaaaagaagaagataaaaagagcaagaaagaaaatataaaggatgagaagacaaaaaaagaaaaagagaaaaaaaaagatggtgaaaaggaagaatccaaaaaggaggaaactccaggaactcctaaaaagaaggaaactaagaaaaaattcaaacttgagccacatgatgatcaggtttttctggatggaaatgaggtgtatgtatggatctatgacccagttcactttaaaacatttgtcatgggattaattcttgtgattgcagtaatagcggccaccctcttccccctttggccagcagaaatgagagtaggtgtttattacctcagtgtgggtgcaggctgttttgtagccagtattcttctccttgctgttgctcgatgcattctatttctcatcatttggctcataactggaggaaggcaccacttttggttcttgccaaatctgactgctgatgtgggcttcattgactccttcaggcctctgtacacacatgaatacaaaggaccaaaagcagacttaaagaaagatgagaagtctgaaaccaaaaagcaacagaagtccgacagtgaggaaaagtcagacagtgagaaaaaggaagatgaggaggggaaagtaggaccaggaaatcatggaacagaaggctcggggggagaacggcattcagacacggacagtgacaggagggaagatgatcgatcccagcacagtagtggaaatggaaatgattttgaaatgataacaaaagaggaactggaacagcaaacagatggggattgtgaagaggatgaggaagaggaaaatgatggagaaacacctaaatcttcacatgaaaaatcataatctgactaattttgggactgaatgaataagtacaagaggttggattttctatgttggctgattaccatattgaacacatggcatttgtagcattctttaaatctatctactgaaatgtatttgacattcaagcagttatattcggtccttcattttatagaatattggcactattattggtacagtttaaagccattaatatgttttatccatttgataattttacagtaagtaggtctcattcattttgacagttatcaaagatgtactttccacagttaaatttacattaatggcaatttttgatagttttatggctttttactgttagactaatcaaaaataactttaaaaggaacaaagaaactccaacatttcacattatgcatagttatgtagccatttcacagtttctttaagatgtgtaaactcattgtccttgatagtttttatttttcattataaaattataccaggagatttcttttaagattctgagttagcagagttcaaaactattttgtggaaacaagccaactagtaacaatgcagcaacacttctggtttagctaaattatttttccaatgtaggaaatccacactgatttgtacgtctgactgagagaaagatggtcgtctccagcagagaaagtgaacagcatttgttggaaggtgatggctctccctcctccctccccatttcattggcgtaacgtaaagtgtattctgtacataatttacaaataaaacattttattttaattgttacttattatttagatatttctcaacacttaaattcataaaattaagaccatgtaagggtatgtttttagagaaatggaagtttgagtaacccacagaacatctgtgatctttctacagcagcttcagttttgtgccaacattccatgtattttgaatatgagcaaaaactgatcttaagagcagacttaaagtagctttgtacgccttaatgttcattttgatttattttaaatctttacattcagaaatgagatactgtattatcagaccaggaggcattgctgtgaaagataatttcctattctaaaatatcaaatttaaaataaagataatgaaagaaaacataagagaactattggactctaattgctttgaactagttttgcagtttgactttacgtcttatacatcttagttacaagtctttggaaactcttgtttacttatgagcataatcattccttggagttatactaactaataatgaatattaaatgatttttcttcagtcacagtgagagcatcttgctttgtggttgaaataggtagtgtatgtcagtctttgctttaggctgtttctcatctaagtgtttgaattaaagatgttaaatttttctaattgtgaaaaatatgttttctgtatcgacacattttattaaacttggcttgattgcttctttatagtagtccctgtaagtggacataaatgtggctatttgatgttaatgcaactatgtcaaggctgcaatcactttaatagtttctttttagcaaataaatgttcattgatgaagtgcctgggtattttcccgtcccatttgcagagctctactacttcatttccacagtaagcatatatataatgatcacttctgagtttatcaccagtaacattgatacctattttggggtataaacatggtgtttttcagaaataaaaattatttcattaacctttactattactgtgataatacccaggcactcaatattcatcctgaaattttttataatatatgtaatttgtctagtcttaaagacatttggagcatggccaacaggaaggtcagcttcttactgatgtgtgtggattcttacagaatgttagtacaaatttttataaatatttggtgatccctggggggaaatatcattcttactatggttagaaagtgaattagaaatttcagctcagtttctattttactattcaagttgtgtactttaaacaaatataaaaatcaaaaggctgcctctattacaatcctcagtggaatagatggctatctttcttggctaacattaaatattcttgtaccagagcatggaaaatcgtttataattgttaatagaatggcgatttttttttaagaacttcagatttgctatgctgctgtaagtagaaagcatgaagctttttgatcatgtagggcttattgtagagggtatcaattggcctaactaagcaggattgaatttaccagaggctaagttcagatagtaagaataatgcatatgtgattgttcttaaagtcaatgtattaaataaggtatttttccttttccctcttactggatttttcaattttcaaaccatatggcctaggtaactttaattgaaataatatagatttagttgaatactattcaggaagtaataaattttaatatatcacattgaaattatgcagtggtgatgaattttggtgtttcccccctctttctggttttacatcatgaggatcagttagctgctgacaagaaaagtcatcttgtgtcttttgtaaattgaattttttttttaaatctattaggaactggaaaacagcaagtatggttgattctcattattcaaggtagttacgttctataaagtcactgcgaacactgaattagcaaatatagaacctaggggaaatacaaggctagatttctgcaagccactggtcacattttcatcaagcagtcaacatgtaaatttctgttgtaaagacaccttatttaatataatcgattcattaacattgaagtcatgaccaacaacactgtaactcatgcctgaatgaagcttatctgacacataagcttcataaggcacacaacagcctttttacccttaggaacagctttttgcccttagcactatgcttgggggccattttaaacagtgaaatcaaaaaaagaacagaaatgcaaaaaccatggcattagcgtaaaaaggacacgtttatagtatgaaagctggaacatggccttgttcaacctcagctcagaatatgtgtacagcaagttttttgctgtaccacaaaattttaggttaggcaaattcacaaatacggaatccatgaataacgaggatcaactgtacttaactatattttaaagctgtgacatttatctacctggtttatggaatagaatttattgctgaatcatgctccagtatttgagtgatgttttaaatatcctatgtctgaaaataattcctcctaattgtgtggtaatttgcttttactgtttccacagtatttcaggtctttgctcattcactcagtaatactgagcacttaccatgtaccagaattttactaggcacaaccatgaataaaaatacaattctcttgcaccattaaaaaaaaag

SEQ ID NO: 308253 - DNA, 4625 bp, Homo sapiens
tcggtacccctcaacgctttatacttccaggagacacaagaagcggatccaggaagttggtgaaccatctaaagaagagaaggctgtggccaagtatcttcgattcaactgtccaacaaagtccaccaatatgatgggtcaccgggttgattattttattgcttcaaaagcagtggactgtcttttggattcaaagtgggcaaaggccaagaaaggagaggaagctttatttacaaccagggagtctgtggttgactactgcaacaggcttttaaagaagcagttttttcaccgagccctaaaagtaatgaaaatgaaatatgataaagacataaagaaagaaaaagataaaggaaaagctgaaagtggaaaagaagaagataaaaagagcaagaaagaaaatataaaggatgagaagacaaaaaaagaaaaagagaaaaaaaaagatggtgaaaaggaagaatccaaaaaggaggaaactccaggaactcctaaaaagaaggaaactaagaaaaaattcaaacttgagccacatgatgatcaggtttttctggatggaaatgaggtgtatgtatggatctatgacccagttcactttaaaacatttgtcatgggattaattcttgtgattgcagtaatagcggccaccctcttccccctttggccagcagaaatgagagtaggtgtttattacctcagtgtgggtgcaggctgttttgtagccagtattcttctccttgctgttgctcgatgcattctatttctcatcatttggctcataactggaggaaggcaccacttttggttcttgccaaatctgactgctgatgtgggcttcattgactccttcaggcctctgtacacacatgaatacaaaggaccaaaagcagacttaaagaaagatgagaagtctgaaaccaaaaagcaacagaagtccgacagtgaggaaaagtcagacagtgagaaaaaggaagatgaggaggggaaagtaggaccaggaaatcatggaacagaaggctcggggggagaacggcattcagacacggacagtgacaggagggaagatgatcgatcccagcacagtagtggaaatggaaatgattttgaaatgataacaaaagaggaactggaacagcaaacagatggggattgtgaagaggatgaggaagaggaaaatgatggagaaacacctaaatcttcacatgaaaaatcataatctgactaattttgggactgaatgaataagtacaagaggttggattttctatgttggctgattaccatattgaacacatggcatttgtagcattctttaaatctatctactgaaatgtatttgacattcaagcagttatattcggtccttcattttatagaatattggcactattattggtacagtttaaagccattaatatgttttatccatttgataattttacagtaagtaggtctcattcattttgacagttatcaaagatgtactttccacagttaaatttacattaatggcaatttttgatagttttatggctttttactgttagactaatcaaaaataactttaaaaggaacaaagaaactccaacatttcacattatgcatagttatgtagccatttcacagtttctttaagatgtgtaaactcattgtccttgatagtttttatttttcattataaaattataccaggagatttcttttaagattctgagttagcagagttcaaaactattttgtggaaacaagccaactagtaacaatgcagcaacacttctggtttagctaaattatttttccaatgtaggaaatccacactgatttgtacgtctgactgagagaaagatggtcgtctccagcagagaaagtgaacagcatttgttggaaggtgatggctctccctcctccctccccatttcattggcgtaacgtaaagtgtattctgtacataatttacaaataaaacattttattttaattgttacttattatttagatatttctcaacacttaaattcataaaattaagaccatgtaagggtatgtttttagagaaatggaagtttgagtaacccacagaacatctgtgatctttctacagcagcttcagttttgtgccaacattccatgtattttgaatatgagcaaaaactgatcttaagagcagacttaaagtagctttgtacgccttaatgttcattttgatttattttaaatctttacattcagaaatgagatactgtattatcagaccaggaggcattgctgtgaaagataatttcctattctaaaatatcaaatttaaaataaagataatgaaagaaaacataagagaactattggactctaattgctttgaactagttttgcagtttgactttacgtcttatacatcttagttacaagtctttggaaactcttgtttacttatgagcataatcattccttggagttatactaactaataatgaatattaaatgatttttcttcagtcacagtgagagcatcttgctttgtggttgaaataggtagtgtatgtcagtctttgctttaggctgtttctcatctaagtgtttgaattaaagatgttaaatttttctaattgtgaaaaatatgttttctgtatcgacacattttattaaacttggcttgattgcttctttatagtagtccctgtaagtggacataaatgtggctatttgatgttaatgcaactatgtcaaggctgcaatcactttaatagtttctttttagcaaataaatgttcattgatgaagtgcctgggtattttcccgtcccatttgcagagctctactacttcatttccacagtaagcatatatataatgatcacttctgagtttatcaccagtaacattgatacctattttggggtataaacatggtgtttttcagaaataaaaattatttcattaacctttactattactgtgataatacccaggcactcaatattcatcctgaaattttttataatatatgtaatttgtctagtcttaaagacatttggagcatggccaacaggaaggtcagcttcttactgatgtgtgtggattcttacagaatgttagtacaaatttttataaatatttggtgatccctggggggaaatatcattcttactatggttagaaagtgaattagaaatttcagctcagtttctattttactattcaagttgtgtactttaaacaaatataaaaatcaaaaggctgcctctattacaatcctcagtggaatagatggctatctttcttggctaacattaaatattcttgtaccagagcatggaaaatcgtttataattgttaatagaatggcgatttttttttaagaacttcagatttgctatgctgctgtaagtagaaagcatgaagctttttgatcatgtagggcttattgtagagggtatcaattggcctaactaagcaggattgaatttaccagaggctaagttcagatagtaagaataatgcatatgtgattgttcttaaagtcaatgtattaaataaggtatttttccttttccctcttactggatttttcaattttcaaaccatatggcctaggtaactttaattgaaataatatagatttagttgaatactattcaggaagtaataaattttaatatatcacattgaaattatgcagtggtgatgaattttggtgtttcccccctctttctggttttacatcatgaggatcagttagctgctgacaagaaaagtcatcttgtgtcttttgtaaattgaattttttttttaaatctattaggaactggaaaacagcaagtatggttgattctcattattcaaggtagttacgttctataaagtcactgcgaacactgaattagcaaatatagaacctaggggaaatacaaggctagatttctgcaagccactggtcacattttcatcaagcagtcaacatgtaaatttctgttgtaaagacaccttatttaatataatcgattcattaacattgaagtcatgaccaacaacactgtaactcatgcctgaatgaagcttatctgacacataagcttcataaggcacacaacagcctttttacccttaggaacagctttttgcccttagcactatgcttgggggccattttaaacagtgaaatcaaaaaaagaacagaaatgcaaaaaccatggcattagcgtaaaaaggacacgtttatagtatgaaagctggaacatggccttgttcaacctcagctcagaatatgtgtacagcaagttttttgctgtaccacaaaattttaggttaggcaaattcacaaatacggaatccatgaataacgaggatcaactgtacttaactatattttaaagctgtgacatttatctacctggtttatggaatagaatttattgctgaatcatgctccagtatttgagtgatgttttaaatatcctatgtctgaaaataattcctcctaattgtgtggtaatttgcttttactgtttccacagtatttcaggtctttgctcattcactcagtaatactgagcacttaccatgtaccagaattttactaggcacaaccatgaataaaaatacaattctcttgcaccattaaaaaaaaag

SEQ ID NO: 308254 - DNA, 5060 bp, Homo sapiens
aagatcagtagaagtttctaattatactgttcttaatctttcaagagttagtgttattcctctgacgtgggtatacagtattttattagattgtatattgaaattgtctgtcagatttgtacttacagaactccttagatttacacttgacagtacaattttatgcccttcaatacacattgttttacaattccagttgctctttaatattgttgtaagggctatataattcaccttttgaatagctgctcttatttagttgtgatcttatattaaacagaggctgtggagtaatgtgacagtggcagagagctaaaacttgagccaaactgcctgtttgtaccccacctccaccaattattggctgagtaactttgagcaagttaatttttacctccctgtctgcatcggtaagaaaacatatttacctcaaaaaaaaaaaaagcaagaaaaaagaaaaactttaagattgctgtgaaaataataggaagttggtgaaccatctaaagaagagaaggctgtggccaagtatcttcgattcaactgtccaacaaagtccaccaatatgatgggtcaccgggttgattattttattgcttcaaaagcagtggactgtcttttggattcaaagtgggcaaaggccaagaaaggagaggaagctttatttacaaccagggagtctgtggttgactactgcaacaggcttttaaagaagcagttttttcaccgagccctaaaagtaatgaaaatgaaatatgataaagacataaagaaagaaaaagataaaggaaaagctgaaagtggaaaagaagaagataaaaagagcaagaaagaaaatataaaggatgagaagacaaaaaaagaaaaagagaaaaaaaaagatggtgaaaaggaagaatccaaaaaggaggaaactccaggaactcctaaaaagaaggaaactaagaaaaaattcaaacttgagccacatgatgatcaggtttttctggatggaaatgaggtgtatgtatggatctatgacccagttcactttaaaacatttgtcatgggattaattcttgtgattgcagtaatagcggccaccctcttccccctttggccagcagaaatgagagtaggtgtttattacctcagtgtgggtgcaggctgttttgtagccagtattcttctccttgctgttgctcgatgcattctatttctcatcatttggctcataactggaggaaggcaccacttttggttcttgccaaatctgactgctgatgtgggcttcattgactccttcaggcctctgtacacacatgaatacaaaggaccaaaagcagacttaaagaaagatgagaagtctgaaaccaaaaagcaacagaagtccgacagtgaggaaaagtcagacagtgagaaaaaggaagatgaggaggggaaagtaggaccaggaaatcatggaacagaaggctcggggggagaacggcattcagacacggacagtgacaggagggaagatgatcgatcccagcacagtagtggaaatggaaatgattttgaaatgataacaaaagaggaactggaacagcaaacagatggggattgtgaagaggatgaggaagaggaaaatgatggagaaacacctaaatcttcacatgaaaaatcataatctgactaattttgggactgaatgaataagtacaagaggttggattttctatgttggctgattaccatattgaacacatggcatttgtagcattctttaaatctatctactgaaatgtatttgacattcaagcagttatattcggtccttcattttatagaatattggcactattattggtacagtttaaagccattaatatgttttatccatttgataattttacagtaagtaggtctcattcattttgacagttatcaaagatgtactttccacagttaaatttacattaatggcaatttttgatagttttatggctttttactgttagactaatcaaaaataactttaaaaggaacaaagaaactccaacatttcacattatgcatagttatgtagccatttcacagtttctttaagatgtgtaaactcattgtccttgatagtttttatttttcattataaaattataccaggagatttcttttaagattctgagttagcagagttcaaaactattttgtggaaacaagccaactagtaacaatgcagcaacacttctggtttagctaaattatttttccaatgtaggaaatccacactgatttgtacgtctgactgagagaaagatggtcgtctccagcagagaaagtgaacagcatttgttggaaggtgatggctctccctcctccctccccatttcattggcgtaacgtaaagtgtattctgtacataatttacaaataaaacattttattttaattgttacttattatttagatatttctcaacacttaaattcataaaattaagaccatgtaagggtatgtttttagagaaatggaagtttgagtaacccacagaacatctgtgatctttctacagcagcttcagttttgtgccaacattccatgtattttgaatatgagcaaaaactgatcttaagagcagacttaaagtagctttgtacgccttaatgttcattttgatttattttaaatctttacattcagaaatgagatactgtattatcagaccaggaggcattgctgtgaaagataatttcctattctaaaatatcaaatttaaaataaagataatgaaagaaaacataagagaactattggactctaattgctttgaactagttttgcagtttgactttacgtcttatacatcttagttacaagtctttggaaactcttgtttacttatgagcataatcattccttggagttatactaactaataatgaatattaaatgatttttcttcagtcacagtgagagcatcttgctttgtggttgaaataggtagtgtatgtcagtctttgctttaggctgtttctcatctaagtgtttgaattaaagatgttaaatttttctaattgtgaaaaatatgttttctgtatcgacacattttattaaacttggcttgattgcttctttatagtagtccctgtaagtggacataaatgtggctatttgatgttaatgcaactatgtcaaggctgcaatcactttaatagtttctttttagcaaataaatgttcattgatgaagtgcctgggtattttcccgtcccatttgcagagctctactacttcatttccacagtaagcatatatataatgatcacttctgagtttatcaccagtaacattgatacctattttggggtataaacatggtgtttttcagaaataaaaattatttcattaacctttactattactgtgataatacccaggcactcaatattcatcctgaaattttttataatatatgtaatttgtctagtcttaaagacatttggagcatggccaacaggaaggtcagcttcttactgatgtgtgtggattcttacagaatgttagtacaaatttttataaatatttggtgatccctggggggaaatatcattcttactatggttagaaagtgaattagaaatttcagctcagtttctattttactattcaagttgtgtactttaaacaaatataaaaatcaaaaggctgcctctattacaatcctcagtggaatagatggctatctttcttggctaacattaaatattcttgtaccagagcatggaaaatcgtttataattgttaatagaatggcgatttttttttaagaacttcagatttgctatgctgctgtaagtagaaagcatgaagctttttgatcatgtagggcttattgtagagggtatcaattggcctaactaagcaggattgaatttaccagaggctaagttcagatagtaagaataatgcatatgtgattgttcttaaagtcaatgtattaaataaggtatttttccttttccctcttactggatttttcaattttcaaaccatatggcctaggtaactttaattgaaataatatagatttagttgaatactattcaggaagtaataaattttaatatatcacattgaaattatgcagtggtgatgaattttggtgtttcccccctctttctggttttacatcatgaggatcagttagctgctgacaagaaaagtcatcttgtgtcttttgtaaattgaattttttttttaaatctattaggaactggaaaacagcaagtatggttgattctcattattcaaggtagttacgttctataaagtcactgcgaacactgaattagcaaatatagaacctaggggaaatacaaggctagatttctgcaagccactggtcacattttcatcaagcagtcaacatgtaaatttctgttgtaaagacaccttatttaatataatcgattcattaacattgaagtcatgaccaacaacactgtaactcatgcctgaatgaagcttatctgacacataagcttcataaggcacacaacagcctttttacccttaggaacagctttttgcccttagcactatgcttgggggccattttaaacagtgaaatcaaaaaaagaacagaaatgcaaaaaccatggcattagcgtaaaaaggacacgtttatagtatgaaagctggaacatggccttgttcaacctcagctcagaatatgtgtacagcaagttttttgctgtaccacaaaattttaggttaggcaaattcacaaatacggaatccatgaataacgaggatcaactgtacttaactatattttaaagctgtgacatttatctacctggtttatggaatagaatttattgctgaatcatgctccagtatttgagtgatgttttaaatatcctatgtctgaaaataattcctcctaattgtgtggtaatttgcttttactgtttccacagtatttcaggtctttgctcattcactcagtaatactgagcacttaccatgtaccagaattttactaggcacaaccatgaataaaaatacaattctcttgcaccattaaaaaaaaag

SEQ ID NO: 308255 - DNA, 4722 bp, Homo sapiens
cgtttttgtggttagctccttcttgccaaccaaccatgagctcccagattcgtcagaattattccaccgacgtggaggcagccgtcaacagcctggtcaatttgtacctgcaggctgttttgtagccagtattcttctccttgctgttggaagttggtgaaccatctaaagaagagaaggctgtggccaagtatcttcgattcaactgtccaacaaagtccaccaatatgatgggtcaccgggttgattattttattgcttcaaaagcagtggactgtcttttggattcaaagtgggcaaaggccaagaaaggagaggaagctttatttacaaccagggagtctgtggttgactactgcaacaggcttttaaagaagcagttttttcaccgagccctaaaagtaatgaaaatgaaatatgataaagacataaagaaagaaaaagataaaggaaaagctgaaagtggaaaagaagaagataaaaagagcaagaaagaaaatataaaggatgagaagacaaaaaaagaaaaagagaaaaaaaaagatggtgaaaaggaagaatccaaaaaggaggaaactccaggaactcctaaaaagaaggaaactaagaaaaaattcaaacttgagccacatgatgatcaggtttttctggatggaaatgaggtgtatgtatggatctatgacccagttcactttaaaacatttgtcatgggattaattcttgtgattgcagtaatagcggccaccctcttccccctttggccagcagaaatgagagtaggtgtttattacctcagtgtgggtgcaggctgttttgtagccagtattcttctccttgctgttgctcgatgcattctatttctcatcatttggctcataactggaggaaggcaccacttttggttcttgccaaatctgactgctgatgtgggcttcattgactccttcaggcctctgtacacacatgaatacaaaggaccaaaagcagacttaaagaaagatgagaagtctgaaaccaaaaagcaacagaagtccgacagtgaggaaaagtcagacagtgagaaaaaggaagatgaggaggggaaagtaggaccaggaaatcatggaacagaaggctcggggggagaacggcattcagacacggacagtgacaggagggaagatgatcgatcccagcacagtagtggaaatggaaatgattttgaaatgataacaaaagaggaactggaacagcaaacagatggggattgtgaagaggatgaggaagaggaaaatgatggagaaacacctaaatcttcacatgaaaaatcataatctgactaattttgggactgaatgaataagtacaagaggttggattttctatgttggctgattaccatattgaacacatggcatttgtagcattctttaaatctatctactgaaatgtatttgacattcaagcagttatattcggtccttcattttatagaatattggcactattattggtacagtttaaagccattaatatgttttatccatttgataattttacagtaagtaggtctcattcattttgacagttatcaaagatgtactttccacagttaaatttacattaatggcaatttttgatagttttatggctttttactgttagactaatcaaaaataactttaaaaggaacaaagaaactccaacatttcacattatgcatagttatgtagccatttcacagtttctttaagatgtgtaaactcattgtccttgatagtttttatttttcattataaaattataccaggagatttcttttaagattctgagttagcagagttcaaaactattttgtggaaacaagccaactagtaacaatgcagcaacacttctggtttagctaaattatttttccaatgtaggaaatccacactgatttgtacgtctgactgagagaaagatggtcgtctccagcagagaaagtgaacagcatttgttggaaggtgatggctctccctcctccctccccatttcattggcgtaacgtaaagtgtattctgtacataatttacaaataaaacattttattttaattgttacttattatttagatatttctcaacacttaaattcataaaattaagaccatgtaagggtatgtttttagagaaatggaagtttgagtaacccacagaacatctgtgatctttctacagcagcttcagttttgtgccaacattccatgtattttgaatatgagcaaaaactgatcttaagagcagacttaaagtagctttgtacgccttaatgttcattttgatttattttaaatctttacattcagaaatgagatactgtattatcagaccaggaggcattgctgtgaaagataatttcctattctaaaatatcaaatttaaaataaagataatgaaagaaaacataagagaactattggactctaattgctttgaactagttttgcagtttgactttacgtcttatacatcttagttacaagtctttggaaactcttgtttacttatgagcataatcattccttggagttatactaactaataatgaatattaaatgatttttcttcagtcacagtgagagcatcttgctttgtggttgaaataggtagtgtatgtcagtctttgctttaggctgtttctcatctaagtgtttgaattaaagatgttaaatttttctaattgtgaaaaatatgttttctgtatcgacacattttattaaacttggcttgattgcttctttatagtagtccctgtaagtggacataaatgtggctatttgatgttaatgcaactatgtcaaggctgcaatcactttaatagtttctttttagcaaataaatgttcattgatgaagtgcctgggtattttcccgtcccatttgcagagctctactacttcatttccacagtaagcatatatataatgatcacttctgagtttatcaccagtaacattgatacctattttggggtataaacatggtgtttttcagaaataaaaattatttcattaacctttactattactgtgataatacccaggcactcaatattcatcctgaaattttttataatatatgtaatttgtctagtcttaaagacatttggagcatggccaacaggaaggtcagcttcttactgatgtgtgtggattcttacagaatgttagtacaaatttttataaatatttggtgatccctggggggaaatatcattcttactatggttagaaagtgaattagaaatttcagctcagtttctattttactattcaagttgtgtactttaaacaaatataaaaatcaaaaggctgcctctattacaatcctcagtggaatagatggctatctttcttggctaacattaaatattcttgtaccagagcatggaaaatcgtttataattgttaatagaatggcgatttttttttaagaacttcagatttgctatgctgctgtaagtagaaagcatgaagctttttgatcatgtagggcttattgtagagggtatcaattggcctaactaagcaggattgaatttaccagaggctaagttcagatagtaagaataatgcatatgtgattgttcttaaagtcaatgtattaaataaggtatttttccttttccctcttactggatttttcaattttcaaaccatatggcctaggtaactttaattgaaataatatagatttagttgaatactattcaggaagtaataaattttaatatatcacattgaaattatgcagtggtgatgaattttggtgtttcccccctctttctggttttacatcatgaggatcagttagctgctgacaagaaaagtcatcttgtgtcttttgtaaattgaattttttttttaaatctattaggaactggaaaacagcaagtatggttgattctcattattcaaggtagttacgttctataaagtcactgcgaacactgaattagcaaatatagaacctaggggaaatacaaggctagatttctgcaagccactggtcacattttcatcaagcagtcaacatgtaaatttctgttgtaaagacaccttatttaatataatcgattcattaacattgaagtcatgaccaacaacactgtaactcatgcctgaatgaagcttatctgacacataagcttcataaggcacacaacagcctttttacccttaggaacagctttttgcccttagcactatgcttgggggccattttaaacagtgaaatcaaaaaaagaacagaaatgcaaaaaccatggcattagcgtaaaaaggacacgtttatagtatgaaagctggaacatggccttgttcaacctcagctcagaatatgtgtacagcaagttttttgctgtaccacaaaattttaggttaggcaaattcacaaatacggaatccatgaataacgaggatcaactgtacttaactatattttaaagctgtgacatttatctacctggtttatggaatagaatttattgctgaatcatgctccagtatttgagtgatgttttaaatatcctatgtctgaaaataattcctcctaattgtgtggtaatttgcttttactgtttccacagtatttcaggtctttgctcattcactcagtaatactgagcacttaccatgtaccagaattttactaggcacaaccatgaataaaaatacaattctcttgcaccattaaaaaaaaag

SEQ ID NO: 308256 - DNA, 4735 bp, Homo sapiens
cctcattcacacgagaaaacaccctcatgttcatacacctatcccccattctcctcctatccctcaaccccgacatcattaccgggttttcctcttaaaaaaataaaaaaaaaaaaaaagcaagaaaaaagaaaaactttaagattgctgtgaaaataataggaagttggtgaaccatctaaagaagagaaggctgtggccaagtatcttcgattcaactgtccaacaaagtccaccaatatgatgggtcaccgggttgattattttattgcttcaaaagcagtggactgtcttttggattcaaagtgggcaaaggccaagaaaggagaggaagctttatttacaaccagggagtctgtggttgactactgcaacaggcttttaaagaagcagttttttcaccgagccctaaaagtaatgaaaatgaaatatgataaagacataaagaaagaaaaagataaaggaaaagctgaaagtggaaaagaagaagataaaaagagcaagaaagaaaatataaaggatgagaagacaaaaaaagaaaaagagaaaaaaaaagatggtgaaaaggaagaatccaaaaaggaggaaactccaggaactcctaaaaagaaggaaactaagaaaaaattcaaacttgagccacatgatgatcaggtttttctggatggaaatgaggtgtatgtatggatctatgacccagttcactttaaaacatttgtcatgggattaattcttgtgattgcagtaatagcggccaccctcttccccctttggccagcagaaatgagagtaggtgtttattacctcagtgtgggtgcaggctgttttgtagccagtattcttctccttgctgttgctcgatgcattctatttctcatcatttggctcataactggaggaaggcaccacttttggttcttgccaaatctgactgctgatgtgggcttcattgactccttcaggcctctgtacacacatgaatacaaaggaccaaaagcagacttaaagaaagatgagaagtctgaaaccaaaaagcaacagaagtccgacagtgaggaaaagtcagacagtgagaaaaaggaagatgaggaggggaaagtaggaccaggaaatcatggaacagaaggctcggggggagaacggcattcagacacggacagtgacaggagggaagatgatcgatcccagcacagtagtggaaatggaaatgattttgaaatgataacaaaagaggaactggaacagcaaacagatggggattgtgaagaggatgaggaagaggaaaatgatggagaaacacctaaatcttcacatgaaaaatcataatctgactaattttgggactgaatgaataagtacaagaggttggattttctatgttggctgattaccatattgaacacatggcatttgtagcattctttaaatctatctactgaaatgtatttgacattcaagcagttatattcggtccttcattttatagaatattggcactattattggtacagtttaaagccattaatatgttttatccatttgataattttacagtaagtaggtctcattcattttgacagttatcaaagatgtactttccacagttaaatttacattaatggcaatttttgatagttttatggctttttactgttagactaatcaaaaataactttaaaaggaacaaagaaactccaacatttcacattatgcatagttatgtagccatttcacagtttctttaagatgtgtaaactcattgtccttgatagtttttatttttcattataaaattataccaggagatttcttttaagattctgagttagcagagttcaaaactattttgtggaaacaagccaactagtaacaatgcagcaacacttctggtttagctaaattatttttccaatgtaggaaatccacactgatttgtacgtctgactgagagaaagatggtcgtctccagcagagaaagtgaacagcatttgttggaaggtgatggctctccctcctccctccccatttcattggcgtaacgtaaagtgtattctgtacataatttacaaataaaacattttattttaattgttacttattatttagatatttctcaacacttaaattcataaaattaagaccatgtaagggtatgtttttagagaaatggaagtttgagtaacccacagaacatctgtgatctttctacagcagcttcagttttgtgccaacattccatgtattttgaatatgagcaaaaactgatcttaagagcagacttaaagtagctttgtacgccttaatgttcattttgatttattttaaatctttacattcagaaatgagatactgtattatcagaccaggaggcattgctgtgaaagataatttcctattctaaaatatcaaatttaaaataaagataatgaaagaaaacataagagaactattggactctaattgctttgaactagttttgcagtttgactttacgtcttatacatcttagttacaagtctttggaaactcttgtttacttatgagcataatcattccttggagttatactaactaataatgaatattaaatgatttttcttcagtcacagtgagagcatcttgctttgtggttgaaataggtagtgtatgtcagtctttgctttaggctgtttctcatctaagtgtttgaattaaagatgttaaatttttctaattgtgaaaaatatgttttctgtatcgacacattttattaaacttggcttgattgcttctttatagtagtccctgtaagtggacataaatgtggctatttgatgttaatgcaactatgtcaaggctgcaatcactttaatagtttctttttagcaaataaatgttcattgatgaagtgcctgggtattttcccgtcccatttgcagagctctactacttcatttccacagtaagcatatatataatgatcacttctgagtttatcaccagtaacattgatacctattttggggtataaacatggtgtttttcagaaataaaaattatttcattaacctttactattactgtgataatacccaggcactcaatattcatcctgaaattttttataatatatgtaatttgtctagtcttaaagacatttggagcatggccaacaggaaggtcagcttcttactgatgtgtgtggattcttacagaatgttagtacaaatttttataaatatttggtgatccctggggggaaatatcattcttactatggttagaaagtgaattagaaatttcagctcagtttctattttactattcaagttgtgtactttaaacaaatataaaaatcaaaaggctgcctctattacaatcctcagtggaatagatggctatctttcttggctaacattaaatattcttgtaccagagcatggaaaatcgtttataattgttaatagaatggcgatttttttttaagaacttcagatttgctatgctgctgtaagtagaaagcatgaagctttttgatcatgtagggcttattgtagagggtatcaattggcctaactaagcaggattgaatttaccagaggctaagttcagatagtaagaataatgcatatgtgattgttcttaaagtcaatgtattaaataaggtatttttccttttccctcttactggatttttcaattttcaaaccatatggcctaggtaactttaattgaaataatatagatttagttgaatactattcaggaagtaataaattttaatatatcacattgaaattatgcagtggtgatgaattttggtgtttcccccctctttctggttttacatcatgaggatcagttagctgctgacaagaaaagtcatcttgtgtcttttgtaaattgaattttttttttaaatctattaggaactggaaaacagcaagtatggttgattctcattattcaaggtagttacgttctataaagtcactgcgaacactgaattagcaaatatagaacctaggggaaatacaaggctagatttctgcaagccactggtcacattttcatcaagcagtcaacatgtaaatttctgttgtaaagacaccttatttaatataatcgattcattaacattgaagtcatgaccaacaacactgtaactcatgcctgaatgaagcttatctgacacataagcttcataaggcacacaacagcctttttacccttaggaacagctttttgcccttagcactatgcttgggggccattttaaacagtgaaatcaaaaaaagaacagaaatgcaaaaaccatggcattagcgtaaaaaggacacgtttatagtatgaaagctggaacatggccttgttcaacctcagctcagaatatgtgtacagcaagttttttgctgtaccacaaaattttaggttaggcaaattcacaaatacggaatccatgaataacgaggatcaactgtacttaactatattttaaagctgtgacatttatctacctggtttatggaatagaatttattgctgaatcatgctccagtatttgagtgatgttttaaatatcctatgtctgaaaataattcctcctaattgtgtggtaatttgcttttactgtttccacagtatttcaggtctttgctcattcactcagtaatactgagcacttaccatgtaccagaattttactaggcacaaccatgaataaaaatacaattctcttgcaccattaaaaaaaaag

SEQ ID NO: 308257 - DNA, 5292 bp, Homo sapiens
tttaaacgagctgtattaccccgcacagtgcaggagaaaagataattggctcaggtctcggctctgccatctaccacctgtggagccttagataagtcagttcttatctctgtcactcaacggtctcggtcttgtcatcttttacatggaatgtcatgaaatatacagtacattgcaggaactgcctcaggtaaagacttctagggttcagtaggtctcagtcgatccctctgagaaaggccgcaccctaaatgcacagactctgactctaaggggatggggtcggggaatctgcattttagtagcttctcaggtgattcagatgctcagtcaggattgagaaaccaggactcttcccagccctcctgttctctgatccacttctctgcttcctccacgtcctaacgattctccagttcccgcacagcaggagcgaagggaagaggggagagaaggcaccgctaaggaccgctggccccgccaggcggccgacctccccattccaggggcgccagccggcggattacataacgggcctcggggcgcgttctcgcgaggtttccaccgccccctcctcgctccacgtcagagggaaccgggcggagcggccaacatggcggaacgcaggagacacaagaagcggatccaggaagttggtgaaccatctaaagaagagaaggctgtggccaagtatcttcgattcaactgtccaacaaagtccaccaatatgatgggtcaccgggttgattattttattgcttcaaaagcagtggactgtcttttggattcaaagtgggcaaaggccaagaaaggagaggaagctttatttacaaccagggagtctgtggttgactactgcaacaggtcttgatatttttgcttttcagtctctatctatatggggagtgtaatgccatacctgtttttcccaaaggcttttaaagaagcagttttttcaccgagccctaaaagtaatgaaaatgaaatatgataaagacataaagaaagaaaaagataaaggaaaagctgaaagtggaaaagaagaagataaaaagagcaagaaagaaaatataaaggatgagaagacaaaaaaagaaaaagagaaaaaaaaagatggtgaaaaggaagaatccaaaaaggaggaaactccaggaactcctaaaaagaaggaaactaagaaaaaattcaaacttgagccacatgatgatcaggtttttctggatggaaatgaggtgtatgtatggatctatgacccagttcactttaaaacatttgtcatgggattaattcttgtgattgcagtaatagcggccaccctcttccccctttggccagcagaaatgagagtaggtgtttattacctcagtgtgggtgcaggctgttttgtagccagtattcttctccttgctgttgctcgatgcattctatttctcatcatttggctcataactggaggaaggcaccacttttggttcttgccaaatctgactgctgatgtgggcttcattgactccttcaggcctctgtacacacatgaatacaaaggaccaaaagcagacttaaagaaagatgagaagtctgaaaccaaaaagcaacagaagtccgacagtgaggaaaagtcagacagtgagaaaaaggaagatgaggaggggaaagtaggaccaggaaatcatggaacagaaggctcggggggagaacggcattcagacacggacagtgacaggagggaagatgatcgatcccagcacagtagtggaaatggaaatgattttgaaatgataacaaaagaggaactggaacagcaaacagatggggattgtgaagaggatgaggaagaggaaaatgatggagaaacacctaaatcttcacatgaaaaatcataatctgactaattttgggactgaatgaataagtacaagaggttggattttctatgttggctgattaccatattgaacacatggcatttgtagcattctttaaatctatctactgaaatgtatttgacattcaagcagttatattcggtccttcattttatagaatattggcactattattggtacagtttaaagccattaatatgttttatccatttgataattttacagtaagtaggtctcattcattttgacagttatcaaagatgtactttccacagttaaatttacattaatggcaatttttgatagttttatggctttttactgttagactaatcaaaaataactttaaaaggaacaaagaaactccaacatttcacattatgcatagttatgtagccatttcacagtttctttaagatgtgtaaactcattgtccttgatagtttttatttttcattataaaattataccaggagatttcttttaagattctgagttagcagagttcaaaactattttgtggaaacaagccaactagtaacaatgcagcaacacttctggtttagctaaattatttttccaatgtaggaaatccacactgatttgtacgtctgactgagagaaagatggtcgtctccagcagagaaagtgaacagcatttgttggaaggtgatggctctccctcctccctccccatttcattggcgtaacgtaaagtgtattctgtacataatttacaaataaaacattttattttaattgttacttattatttagatatttctcaacacttaaattcataaaattaagaccatgtaagggtatgtttttagagaaatggaagtttgagtaacccacagaacatctgtgatctttctacagcagcttcagttttgtgccaacattccatgtattttgaatatgagcaaaaactgatcttaagagcagacttaaagtagctttgtacgccttaatgttcattttgatttattttaaatctttacattcagaaatgagatactgtattatcagaccaggaggcattgctgtgaaagataatttcctattctaaaatatcaaatttaaaataaagataatgaaagaaaacataagagaactattggactctaattgctttgaactagttttgcagtttgactttacgtcttatacatcttagttacaagtctttggaaactcttgtttacttatgagcataatcattccttggagttatactaactaataatgaatattaaatgatttttcttcagtcacagtgagagcatcttgctttgtggttgaaataggtagtgtatgtcagtctttgctttaggctgtttctcatctaagtgtttgaattaaagatgttaaatttttctaattgtgaaaaatatgttttctgtatcgacacattttattaaacttggcttgattgcttctttatagtagtccctgtaagtggacataaatgtggctatttgatgttaatgcaactatgtcaaggctgcaatcactttaatagtttctttttagcaaataaatgttcattgatgaagtgcctgggtattttcccgtcccatttgcagagctctactacttcatttccacagtaagcatatatataatgatcacttctgagtttatcaccagtaacattgatacctattttggggtataaacatggtgtttttcagaaataaaaattatttcattaacctttactattactgtgataatacccaggcactcaatattcatcctgaaattttttataatatatgtaatttgtctagtcttaaagacatttggagcatggccaacaggaaggtcagcttcttactgatgtgtgtggattcttacagaatgttagtacaaatttttataaatatttggtgatccctggggggaaatatcattcttactatggttagaaagtgaattagaaatttcagctcagtttctattttactattcaagttgtgtactttaaacaaatataaaaatcaaaaggctgcctctattacaatcctcagtggaatagatggctatctttcttggctaacattaaatattcttgtaccagagcatggaaaatcgtttataattgttaatagaatggcgatttttttttaagaacttcagatttgctatgctgctgtaagtagaaagcatgaagctttttgatcatgtagggcttattgtagagggtatcaattggcctaactaagcaggattgaatttaccagaggctaagttcagatagtaagaataatgcatatgtgattgttcttaaagtcaatgtattaaataaggtatttttccttttccctcttactggatttttcaattttcaaaccatatggcctaggtaactttaattgaaataatatagatttagttgaatactattcaggaagtaataaattttaatatatcacattgaaattatgcagtggtgatgaattttggtgtttcccccctctttctggttttacatcatgaggatcagttagctgctgacaagaaaagtcatcttgtgtcttttgtaaattgaattttttttttaaatctattaggaactggaaaacagcaagtatggttgattctcattattcaaggtagttacgttctataaagtcactgcgaacactgaattagcaaatatagaacctaggggaaatacaaggctagatttctgcaagccactggtcacattttcatcaagcagtcaacatgtaaatttctgttgtaaagacaccttatttaatataatcgattcattaacattgaagtcatgaccaacaacactgtaactcatgcctgaatgaagcttatctgacacataagcttcataaggcacacaacagcctttttacccttaggaacagctttttgcccttagcactatgcttgggggccattttaaacagtgaaatcaaaaaaagaacagaaatgcaaaaaccatggcattagcgtaaaaaggacacgtttatagtatgaaagctggaacatggccttgttcaacctcagctcagaatatgtgtacagcaagttttttgctgtaccacaaaattttaggttaggcaaattcacaaatacggaatccatgaataacgaggatcaactgtacttaactatattttaaagctgtgacatttatctacctggtttatggaatagaatttattgctgaatcatgctccagtatttgagtgatgttttaaatatcctatgtctgaaaataattcctcctaattgtgtggtaatttgcttttactgtttccacagtatttcaggtctttgctcattcactcagtaatactgagcacttaccatgtaccagaattttactaggcacaaccatgaataaaaatacaattctcttgcaccattaaaaaaaaag

SEQ ID NO: 308258 - DNA, 3980 bp, Homo sapiens
tttaaacgagctgtattaccccgcacagtgcaggagaaaagataattggctcaggtctcggctctgccatctaccacctgtggagccttagataagtcagttcttatctctgtcactcaacggtctcggtcttgtcatcttttacatggaatgtcatgaaatatacagtacattgcaggaactgcctcaggtaaagacttctagggttcagtaggtctcagtcgatccctctgagaaaggccgcaccctaaatgcacagactctgactctaaggggatggggtcggggaatctgcattttagtagcttctcaggtgattcagatgctcagtcaggattgagaaaccaggactcttcccagccctcctgttctctgatccacttctctgcttcctccacgtcctaacgattctccagttcccgcacagcaggagcgaagggaagaggggagagaaggcaccgctaaggaccgctggccccgccaggcggccgacctccccattccaggggcgccagccggcggattacataacgggcctcggggcgcgttctcgcgaggtttccaccgccccctcctcgctccacgtcagagggaaccgggcggagcggccaacatggcggaacgcaggagacacaagaagcggatccaggaagttggtgaaccatctaaagaagagaaggctgtggccaagtatcttcgattcaactgtccaacaaagtccaccaatatgatgggtcaccgggttgattattttattgcttcaaaagcagtggactgtcttttggattcaaagtgggcaaaggccaagaaaggagaggaagctttatttacaaccagggagtctgtggttgactactgcaacaggcttttaaagaagcagttttttcaccgagccctaaaagtaatgaaaatgaaatatgataaagacataaagaaagaaaaagataaaggaaaagctgaaagtggaaaagaagaagataaaaagagcaagaaagaaaatataaaggatgagaagacaaaaaaagaaaaagagaaaaaaaaagatggtgaaaaggaagaatccaaaaaggaggaaactccaggaactcctaaaaagaaggaaactaagaaaaaattcaaacttgagccacatgatgatcaggtttttctggatggaaatgaggaaatccacactgatttgtacgtctgactgagagaaagatggtcgtctccagcagagaaagtgaacagcatttgttggaaggtgatggctctccctcctccctccccatttcattggcgtaacgtaaagtgtattctgtacataatttacaaataaaacattttattttaattgttacttattatttagatatttctcaacacttaaattcataaaattaagaccatgtaagggtatgtttttagagaaatggaagtttgagtaacccacagaacatctgtgatctttctacagcagcttcagttttgtgccaacattccatgtattttgaatatgagcaaaaactgatcttaagagcagacttaaagtagctttgtacgccttaatgttcattttgatttattttaaatctttacattcagaaatgagatactgtattatcagaccaggaggcattgctgtgaaagataatttcctattctaaaatatcaaatttaaaataaagataatgaaagaaaacataagagaactattggactctaattgctttgaactagttttgcagtttgactttacgtcttatacatcttagttacaagtctttggaaactcttgtttacttatgagcataatcattccttggagttatactaactaataatgaatattaaatgatttttcttcagtcacagtgagagcatcttgctttgtggttgaaataggtagtgtatgtcagtctttgctttaggctgtttctcatctaagtgtttgaattaaagatgttaaatttttctaattgtgaaaaatatgttttctgtatcgacacattttattaaacttggcttgattgcttctttatagtagtccctgtaagtggacataaatgtggctatttgatgttaatgcaactatgtcaaggctgcaatcactttaatagtttctttttagcaaataaatgttcattgatgaagtgcctgggtattttcccgtcccatttgcagagctctactacttcatttccacagtaagcatatatataatgatcacttctgagtttatcaccagtaacattgatacctattttggggtataaacatggtgtttttcagaaataaaaattatttcattaacctttactattactgtgataatacccaggcactcaatattcatcctgaaattttttataatatatgtaatttgtctagtcttaaagacatttggagcatggccaacaggaaggtcagcttcttactgatgtgtgtggattcttacagaatgttagtacaaatttttataaatatttggtgatccctggggggaaatatcattcttactatggttagaaagtgaattagaaatttcagctcagtttctattttactattcaagttgtgtactttaaacaaatataaaaatcaaaaggctgcctctattacaatcctcagtggaatagatggctatctttcttggctaacattaaatattcttgtaccagagcatggaaaatcgtttataattgttaatagaatggcgatttttttttaagaacttcagatttgctatgctgctgtaagtagaaagcatgaagctttttgatcatgtagggcttattgtagagggtatcaattggcctaactaagcaggattgaatttaccagaggctaagttcagatagtaagaataatgcatatgtgattgttcttaaagtcaatgtattaaataaggtatttttccttttccctcttactggatttttcaattttcaaaccatatggcctaggtaactttaattgaaataatatagatttagttgaatactattcaggaagtaataaattttaatatatcacattgaaattatgcagtggtgatgaattttggtgtttcccccctctttctggttttacatcatgaggatcagttagctgctgacaagaaaagtcatcttgtgtcttttgtaaattgaattttttttttaaatctattaggaactggaaaacagcaagtatggttgattctcattattcaaggtagttacgttctataaagtcactgcgaacactgaattagcaaatatagaacctaggggaaatacaaggctagatttctgcaagccactggtcacattttcatcaagcagtcaacatgtaaatttctgttgtaaagacaccttatttaatataatcgattcattaacattgaagtcatgaccaacaacactgtaactcatgcctgaatgaagcttatctgacacataagcttcataaggcacacaacagcctttttacccttaggaacagctttttgcccttagcactatgcttgggggccattttaaacagtgaaatcaaaaaaagaacagaaatgcaaaaaccatggcattagcgtaaaaaggacacgtttatagtatgaaagctggaacatggccttgttcaacctcagctcagaatatgtgtacagcaagttttttgctgtaccacaaaattttaggttaggcaaattcacaaatacggaatccatgaataacgaggatcaactgtacttaactatattttaaagctgtgacatttatctacctggtttatggaatagaatttattgctgaatcatgctccagtatttgagtgatgttttaaatatcctatgtctgaaaataattcctcctaattgtgtggtaatttgcttttactgtttccacagtatttcaggtctttgctcattcactcagtaatactgagcacttaccatgtaccagaattttactaggcacaaccatgaataaaaatacaattctcttgcaccattaaaaaaaaag

SEQ ID NO: 308259 - DNA, 4495 bp, Homo sapiens
ggcaacttggcaagagcccatctctacacacctggctaatttttgtatttttagtagaggcagggtttcaccatgttggccaggcttgtcttgaacttctgacctcaagtgatctggccgccttggccttcaaagtgctgggattataggcgtgagccaccaagcccagtcaaacaaatttttaagtgtatgtaagaacatacaaatttacttaagtgctttatagaatttatagttatcctataatcattttctagcgccagaagaaccactactactgaaggaaagatctttggaatttatttaccttagaaattacttctcgtatgttaagaggttgatgactgctttaagggacctaaaatatagaattaagcattactttctaatgtgacattagaacttttaagcaccgaggtttcttgattcttctaggtgtatgtatggatctatgacccagttcactttaaaacatttgtcatgggattaattcttgtgattgcagtaatagcggccaccctcttccccctttggccagcagaaatgagagtaggtgtttattacctcagtgtgggtgcaggctgttttgtagccagtattcttctccttgctgttgctcgatgcattctatttctcatcatttggctcataactggaggaaggcaccacttttggttcttgccaaatctgactgctgatgtgggcttcattgactccttcaggcctctgtacacacatgaatacaaaggaccaaaagcagacttaaagaaagatgagaagtctgaaaccaaaaagcaacagaagtccgacagtgaggaaaagtcagacagtgagaaaaaggaagatgaggaggggaaagtaggaccaggaaatcatggaacagaaggctcggggggagaacggcattcagacacggacagtgacaggagggaagatgatcgatcccagcacagtagtggaaatggaaatgattttgaaatgataacaaaagaggaactggaacagcaaacagatggggattgtgaagaggatgaggaagaggaaaatgatggagaaacacctaaatcttcacatgaaaaatcataatctgactaattttgggactgaatgaataagtacaagaggttggattttctatgttggctgattaccatattgaacacatggcatttgtagcattctttaaatctatctactgaaatgtatttgacattcaagcagttatattcggtccttcattttatagaatattggcactattattggtacagtttaaagccattaatatgttttatccatttgataattttacagtaagtaggtctcattcattttgacagttatcaaagatgtactttccacagttaaatttacattaatggcaatttttgatagttttatggctttttactgttagactaatcaaaaataactttaaaaggaacaaagaaactccaacatttcacattatgcatagttatgtagccatttcacagtttctttaagatgtgtaaactcattgtccttgatagtttttatttttcattataaaattataccaggagatttcttttaagattctgagttagcagagttcaaaactattttgtggaaacaagccaactagtaacaatgcagcaacacttctggtttagctaaattatttttccaatgtaggaaatccacactgatttgtacgtctgactgagagaaagatggtcgtctccagcagagaaagtgaacagcatttgttggaaggtgatggctctccctcctccctccccatttcattggcgtaacgtaaagtgtattctgtacataatttacaaataaaacattttattttaattgttacttattatttagatatttctcaacacttaaattcataaaattaagaccatgtaagggtatgtttttagagaaatggaagtttgagtaacccacagaacatctgtgatctttctacagcagcttcagttttgtgccaacattccatgtattttgaatatgagcaaaaactgatcttaagagcagacttaaagtagctttgtacgccttaatgttcattttgatttattttaaatctttacattcagaaatgagatactgtattatcagaccaggaggcattgctgtgaaagataatttcctattctaaaatatcaaatttaaaataaagataatgaaagaaaacataagagaactattggactctaattgctttgaactagttttgcagtttgactttacgtcttatacatcttagttacaagtctttggaaactcttgtttacttatgagcataatcattccttggagttatactaactaataatgaatattaaatgatttttcttcagtcacagtgagagcatcttgctttgtggttgaaataggtagtgtatgtcagtctttgctttaggctgtttctcatctaagtgtttgaattaaagatgttaaatttttctaattgtgaaaaatatgttttctgtatcgacacattttattaaacttggcttgattgcttctttatagtagtccctgtaagtggacataaatgtggctatttgatgttaatgcaactatgtcaaggctgcaatcactttaatagtttctttttagcaaataaatgttcattgatgaagtgcctgggtattttcccgtcccatttgcagagctctactacttcatttccacagtaagcatatatataatgatcacttctgagtttatcaccagtaacattgatacctattttggggtataaacatggtgtttttcagaaataaaaattatttcattaacctttactattactgtgataatacccaggcactcaatattcatcctgaaattttttataatatatgtaatttgtctagtcttaaagacatttggagcatggccaacaggaaggtcagcttcttactgatgtgtgtggattcttacagaatgttagtacaaatttttataaatatttggtgatccctggggggaaatatcattcttactatggttagaaagtgaattagaaatttcagctcagtttctattttactattcaagttgtgtactttaaacaaatataaaaatcaaaaggctgcctctattacaatcctcagtggaatagatggctatctttcttggctaacattaaatattcttgtaccagagcatggaaaatcgtttataattgttaatagaatggcgatttttttttaagaacttcagatttgctatgctgctgtaagtagaaagcatgaagctttttgatcatgtagggcttattgtagagggtatcaattggcctaactaagcaggattgaatttaccagaggctaagttcagatagtaagaataatgcatatgtgattgttcttaaagtcaatgtattaaataaggtatttttccttttccctcttactggatttttcaattttcaaaccatatggcctaggtaactttaattgaaataatatagatttagttgaatactattcaggaagtaataaattttaatatatcacattgaaattatgcagtggtgatgaattttggtgtttcccccctctttctggttttacatcatgaggatcagttagctgctgacaagaaaagtcatcttgtgtcttttgtaaattgaattttttttttaaatctattaggaactggaaaacagcaagtatggttgattctcattattcaaggtagttacgttctataaagtcactgcgaacactgaattagcaaatatagaacctaggggaaatacaaggctagatttctgcaagccactggtcacattttcatcaagcagtcaacatgtaaatttctgttgtaaagacaccttatttaatataatcgattcattaacattgaagtcatgaccaacaacactgtaactcatgcctgaatgaagcttatctgacacataagcttcataaggcacacaacagcctttttacccttaggaacagctttttgcccttagcactatgcttgggggccattttaaacagtgaaatcaaaaaaagaacagaaatgcaaaaaccatggcattagcgtaaaaaggacacgtttatagtatgaaagctggaacatggccttgttcaacctcagctcagaatatgtgtacagcaagttttttgctgtaccacaaaattttaggttaggcaaattcacaaatacggaatccatgaataacgaggatcaactgtacttaactatattttaaagctgtgacatttatctacctggtttatggaatagaatttattgctgaatcatgctccagtatttgagtgatgttttaaatatcctatgtctgaaaataattcctcctaattgtgtggtaatttgcttttactgtttccacagtatttcaggtctttgctcattcactcagtaatactgagcacttaccatgtaccagaattttactaggcacaaccatgaataaaaatacaattctcttgcaccattaaaaaaaaag

SEQ ID NO: 308260 - DNA, 4348 bp, Homo sapiens
  misc_feature (88)..(88): n is a, c, g, or t
tcatcagctcgcccgtatgctactgtgtggatcccttcttcttcctaactttcagttcttatctgcaaagtggaaggtcagaccagantatgctctggtactccacagtgctcacctgtatcactgcagggctttctgcactgaaagtggaagcagaaggctaatgggtcacattgtgtaaaggtctctggtgctcaaagtttctaggcaaagaagtgaaaatttggaattctgtcttaactgcgcttttatcccagactggttcatcattacattagggacaaaaaggtgtatgtatggatctatgacccagttcactttaaaacatttgtcatgggattaattcttgtgattgcagtaatagcggccaccctcttccccctttggccagcagaaatgagagtaggtgtttattacctcagtgtgggtgcaggctgttttgtagccagtattcttctccttgctgttgctcgatgcattctatttctcatcatttggctcataactggaggaaggcaccacttttggttcttgccaaatctgactgctgatgtgggcttcattgactccttcaggcctctgtacacacatgaatacaaaggaccaaaagcagacttaaagaaagatgagaagtctgaaaccaaaaagcaacagaagtccgacagtgaggaaaagtcagacagtgagaaaaaggaagatgaggaggggaaagtaggaccaggaaatcatggaacagaaggctcggggggagaacggcattcagacacggacagtgacaggagggaagatgatcgatcccagcacagtagtggaaatggaaatgattttgaaatgataacaaaagaggaactggaacagcaaacagatggggattgtgaagaggatgaggaagaggaaaatgatggagaaacacctaaatcttcacatgaaaaatcataatctgactaattttgggactgaatgaataagtacaagaggttggattttctatgttggctgattaccatattgaacacatggcatttgtagcattctttaaatctatctactgaaatgtatttgacattcaagcagttatattcggtccttcattttatagaatattggcactattattggtacagtttaaagccattaatatgttttatccatttgataattttacagtaagtaggtctcattcattttgacagttatcaaagatgtactttccacagttaaatttacattaatggcaatttttgatagttttatggctttttactgttagactaatcaaaaataactttaaaaggaacaaagaaactccaacatttcacattatgcatagttatgtagccatttcacagtttctttaagatgtgtaaactcattgtccttgatagtttttatttttcattataaaattataccaggagatttcttttaagattctgagttagcagagttcaaaactattttgtggaaacaagccaactagtaacaatgcagcaacacttctggtttagctaaattatttttccaatgtaggaaatccacactgatttgtacgtctgactgagagaaagatggtcgtctccagcagagaaagtgaacagcatttgttggaaggtgatggctctccctcctccctccccatttcattggcgtaacgtaaagtgtattctgtacataatttacaaataaaacattttattttaattgttacttattatttagatatttctcaacacttaaattcataaaattaagaccatgtaagggtatgtttttagagaaatggaagtttgagtaacccacagaacatctgtgatctttctacagcagcttcagttttgtgccaacattccatgtattttgaatatgagcaaaaactgatcttaagagcagacttaaagtagctttgtacgccttaatgttcattttgatttattttaaatctttacattcagaaatgagatactgtattatcagaccaggaggcattgctgtgaaagataatttcctattctaaaatatcaaatttaaaataaagataatgaaagaaaacataagagaactattggactctaattgctttgaactagttttgcagtttgactttacgtcttatacatcttagttacaagtctttggaaactcttgtttacttatgagcataatcattccttggagttatactaactaataatgaatattaaatgatttttcttcagtcacagtgagagcatcttgctttgtggttgaaataggtagtgtatgtcagtctttgctttaggctgtttctcatctaagtgtttgaattaaagatgttaaatttttctaattgtgaaaaatatgttttctgtatcgacacattttattaaacttggcttgattgcttctttatagtagtccctgtaagtggacataaatgtggctatttgatgttaatgcaactatgtcaaggctgcaatcactttaatagtttctttttagcaaataaatgttcattgatgaagtgcctgggtattttcccgtcccatttgcagagctctactacttcatttccacagtaagcatatatataatgatcacttctgagtttatcaccagtaacattgatacctattttggggtataaacatggtgtttttcagaaataaaaattatttcattaacctttactattactgtgataatacccaggcactcaatattcatcctgaaattttttataatatatgtaatttgtctagtcttaaagacatttggagcatggccaacaggaaggtcagcttcttactgatgtgtgtggattcttacagaatgttagtacaaatttttataaatatttggtgatccctggggggaaatatcattcttactatggttagaaagtgaattagaaatttcagctcagtttctattttactattcaagttgtgtactttaaacaaatataaaaatcaaaaggctgcctctattacaatcctcagtggaatagatggctatctttcttggctaacattaaatattcttgtaccagagcatggaaaatcgtttataattgttaatagaatggcgatttttttttaagaacttcagatttgctatgctgctgtaagtagaaagcatgaagctttttgatcatgtagggcttattgtagagggtatcaattggcctaactaagcaggattgaatttaccagaggctaagttcagatagtaagaataatgcatatgtgattgttcttaaagtcaatgtattaaataaggtatttttccttttccctcttactggatttttcaattttcaaaccatatggcctaggtaactttaattgaaataatatagatttagttgaatactattcaggaagtaataaattttaatatatcacattgaaattatgcagtggtgatgaattttggtgtttcccccctctttctggttttacatcatgaggatcagttagctgctgacaagaaaagtcatcttgtgtcttttgtaaattgaattttttttttaaatctattaggaactggaaaacagcaagtatggttgattctcattattcaaggtagttacgttctataaagtcactgcgaacactgaattagcaaatatagaacctaggggaaatacaaggctagatttctgcaagccactggtcacattttcatcaagcagtcaacatgtaaatttctgttgtaaagacaccttatttaatataatcgattcattaacattgaagtcatgaccaacaacactgtaactcatgcctgaatgaagcttatctgacacataagcttcataaggcacacaacagcctttttacccttaggaacagctttttgcccttagcactatgcttgggggccattttaaacagtgaaatcaaaaaaagaacagaaatgcaaaaaccatggcattagcgtaaaaaggacacgtttatagtatgaaagctggaacatggccttgttcaacctcagctcagaatatgtgtacagcaagttttttgctgtaccacaaaattttaggttaggcaaattcacaaatacggaatccatgaataacgaggatcaactgtacttaactatattttaaagctgtgacatttatctacctggtttatggaatagaatttattgctgaatcatgctccagtatttgagtgatgttttaaatatcctatgtctgaaaataattcctcctaattgtgtggtaatttgcttttactgtttccacagtatttcaggtctttgctcattcactcagtaatactgagcacttaccatgtaccagaattttactaggcacaaccatgaataaaaatacaattctcttgcaccattaaaaaaaaag

SEQ ID NO: 308261 - DNA, 4239 bp, Homo sapiens
aaaatctaacgttgagtaaatgtgatagtgatgagaaaggaattttgtgtactgtaaccttgcagtagagatgcagctgtccttcgtgtgtggaaacacacctctcctttacatagttgggaacctcattagaaatgacttgcttttctaaatctcaggtttttctggatggaaatgaggtgtatgtatggatctatgacccagttcactttaaaacatttgtcatgggattaattcttgtgattgcagtaatagcggccaccctcttccccctttggccagcagaaatgagagtaggtgtttattacctcagtgtgggtgcaggctgttttgtagccagtattcttctccttgctgttgctcgatgcattctatttctcatcatttggctcataactggaggaaggcaccacttttggttcttgccaaatctgactgctgatgtgggcttcattgactccttcaggcctctgtacacacatgaatacaaaggaccaaaagcagacttaaagaaagatgagaagtctgaaaccaaaaagcaacagaagtccgacagtgaggaaaagtcagacagtgagaaaaaggaagatgaggaggggaaagtaggaccaggaaatcatggaacagaaggctcggggggagaacggcattcagacacggacagtgacaggagggaagatgatcgatcccagcacagtagtggaaatggaaatgattttgaaatgataacaaaagaggaactggaacagcaaacagatggggattgtgaagaggatgaggaagaggaaaatgatggagaaacacctaaatcttcacatgaaaaatcataatctgactaattttgggactgaatgaataagtacaagaggttggattttctatgttggctgattaccatattgaacacatggcatttgtagcattctttaaatctatctactgaaatgtatttgacattcaagcagttatattcggtccttcattttatagaatattggcactattattggtacagtttaaagccattaatatgttttatccatttgataattttacagtaagtaggtctcattcattttgacagttatcaaagatgtactttccacagttaaatttacattaatggcaatttttgatagttttatggctttttactgttagactaatcaaaaataactttaaaaggaacaaagaaactccaacatttcacattatgcatagttatgtagccatttcacagtttctttaagatgtgtaaactcattgtccttgatagtttttatttttcattataaaattataccaggagatttcttttaagattctgagttagcagagttcaaaactattttgtggaaacaagccaactagtaacaatgcagcaacacttctggtttagctaaattatttttccaatgtaggaaatccacactgatttgtacgtctgactgagagaaagatggtcgtctccagcagagaaagtgaacagcatttgttggaaggtgatggctctccctcctccctccccatttcattggcgtaacgtaaagtgtattctgtacataatttacaaataaaacattttattttaattgttacttattatttagatatttctcaacacttaaattcataaaattaagaccatgtaagggtatgtttttagagaaatggaagtttgagtaacccacagaacatctgtgatctttctacagcagcttcagttttgtgccaacattccatgtattttgaatatgagcaaaaactgatcttaagagcagacttaaagtagctttgtacgccttaatgttcattttgatttattttaaatctttacattcagaaatgagatactgtattatcagaccaggaggcattgctgtgaaagataatttcctattctaaaatatcaaatttaaaataaagataatgaaagaaaacataagagaactattggactctaattgctttgaactagttttgcagtttgactttacgtcttatacatcttagttacaagtctttggaaactcttgtttacttatgagcataatcattccttggagttatactaactaataatgaatattaaatgatttttcttcagtcacagtgagagcatcttgctttgtggttgaaataggtagtgtatgtcagtctttgctttaggctgtttctcatctaagtgtttgaattaaagatgttaaatttttctaattgtgaaaaatatgttttctgtatcgacacattttattaaacttggcttgattgcttctttatagtagtccctgtaagtggacataaatgtggctatttgatgttaatgcaactatgtcaaggctgcaatcactttaatagtttctttttagcaaataaatgttcattgatgaagtgcctgggtattttcccgtcccatttgcagagctctactacttcatttccacagtaagcatatatataatgatcacttctgagtttatcaccagtaacattgatacctattttggggtataaacatggtgtttttcagaaataaaaattatttcattaacctttactattactgtgataatacccaggcactcaatattcatcctgaaattttttataatatatgtaatttgtctagtcttaaagacatttggagcatggccaacaggaaggtcagcttcttactgatgtgtgtggattcttacagaatgttagtacaaatttttataaatatttggtgatccctggggggaaatatcattcttactatggttagaaagtgaattagaaatttcagctcagtttctattttactattcaagttgtgtactttaaacaaatataaaaatcaaaaggctgcctctattacaatcctcagtggaatagatggctatctttcttggctaacattaaatattcttgtaccagagcatggaaaatcgtttataattgttaatagaatggcgatttttttttaagaacttcagatttgctatgctgctgtaagtagaaagcatgaagctttttgatcatgtagggcttattgtagagggtatcaattggcctaactaagcaggattgaatttaccagaggctaagttcagatagtaagaataatgcatatgtgattgttcttaaagtcaatgtattaaataaggtatttttccttttccctcttactggatttttcaattttcaaaccatatggcctaggtaactttaattgaaataatatagatttagttgaatactattcaggaagtaataaattttaatatatcacattgaaattatgcagtggtgatgaattttggtgtttcccccctctttctggttttacatcatgaggatcagttagctgctgacaagaaaagtcatcttgtgtcttttgtaaattgaattttttttttaaatctattaggaactggaaaacagcaagtatggttgattctcattattcaaggtagttacgttctataaagtcactgcgaacactgaattagcaaatatagaacctaggggaaatacaaggctagatttctgcaagccactggtcacattttcatcaagcagtcaacatgtaaatttctgttgtaaagacaccttatttaatataatcgattcattaacattgaagtcatgaccaacaacactgtaactcatgcctgaatgaagcttatctgacacataagcttcataaggcacacaacagcctttttacccttaggaacagctttttgcccttagcactatgcttgggggccattttaaacagtgaaatcaaaaaaagaacagaaatgcaaaaaccatggcattagcgtaaaaaggacacgtttatagtatgaaagctggaacatggccttgttcaacctcagctcagaatatgtgtacagcaagttttttgctgtaccacaaaattttaggttaggcaaattcacaaatacggaatccatgaataacgaggatcaactgtacttaactatattttaaagctgtgacatttatctacctggtttatggaatagaatttattgctgaatcatgctccagtatttgagtgatgttttaaatatcctatgtctgaaaataattcctcctaattgtgtggtaatttgcttttactgtttccacagtatttcaggtctttgctcattcactcagtaatactgagcacttaccatgtaccagaattttactaggcacaaccatgaataaaaatacaattctcttgcaccattaaaaaaaaag

SEQ ID NO: 308262 - DNA, 4161 bp, Homo sapiens
cactttactcaacaggtcagattagataagaacctctgagaatctcctagttggcacacagtactaaagactggaatagcttccagagatgatttatcttaaaataaacgttgttcataagaaactagaatttctacaacagttttgagattggtcatcttttgattgcagtaatagcggccaccctcttccccctttggccagcagaaatgagagtaggtgtttattacctcagtgtgggtgcaggctgttttgtagccagtattcttctccttgctgttgctcgatgcattctatttctcatcatttggctcataactggaggaaggcaccacttttggttcttgccaaatctgactgctgatgtgggcttcattgactccttcaggcctctgtacacacatgaatacaaaggaccaaaagcagacttaaagaaagatgagaagtctgaaaccaaaaagcaacagaagtccgacagtgaggaaaagtcagacagtgagaaaaaggaagatgaggaggggaaagtaggaccaggaaatcatggaacagaaggctcggggggagaacggcattcagacacggacagtgacaggagggaagatgatcgatcccagcacagtagtggaaatggaaatgattttgaaatgataacaaaagaggaactggaacagcaaacagatggggattgtgaagaggatgaggaagaggaaaatgatggagaaacacctaaatcttcacatgaaaaatcataatctgactaattttgggactgaatgaataagtacaagaggttggattttctatgttggctgattaccatattgaacacatggcatttgtagcattctttaaatctatctactgaaatgtatttgacattcaagcagttatattcggtccttcattttatagaatattggcactattattggtacagtttaaagccattaatatgttttatccatttgataattttacagtaagtaggtctcattcattttgacagttatcaaagatgtactttccacagttaaatttacattaatggcaatttttgatagttttatggctttttactgttagactaatcaaaaataactttaaaaggaacaaagaaactccaacatttcacattatgcatagttatgtagccatttcacagtttctttaagatgtgtaaactcattgtccttgatagtttttatttttcattataaaattataccaggagatttcttttaagattctgagttagcagagttcaaaactattttgtggaaacaagccaactagtaacaatgcagcaacacttctggtttagctaaattatttttccaatgtaggaaatccacactgatttgtacgtctgactgagagaaagatggtcgtctccagcagagaaagtgaacagcatttgttggaaggtgatggctctccctcctccctccccatttcattggcgtaacgtaaagtgtattctgtacataatttacaaataaaacattttattttaattgttacttattatttagatatttctcaacacttaaattcataaaattaagaccatgtaagggtatgtttttagagaaatggaagtttgagtaacccacagaacatctgtgatctttctacagcagcttcagttttgtgccaacattccatgtattttgaatatgagcaaaaactgatcttaagagcagacttaaagtagctttgtacgccttaatgttcattttgatttattttaaatctttacattcagaaatgagatactgtattatcagaccaggaggcattgctgtgaaagataatttcctattctaaaatatcaaatttaaaataaagataatgaaagaaaacataagagaactattggactctaattgctttgaactagttttgcagtttgactttacgtcttatacatcttagttacaagtctttggaaactcttgtttacttatgagcataatcattccttggagttatactaactaataatgaatattaaatgatttttcttcagtcacagtgagagcatcttgctttgtggttgaaataggtagtgtatgtcagtctttgctttaggctgtttctcatctaagtgtttgaattaaagatgttaaatttttctaattgtgaaaaatatgttttctgtatcgacacattttattaaacttggcttgattgcttctttatagtagtccctgtaagtggacataaatgtggctatttgatgttaatgcaactatgtcaaggctgcaatcactttaatagtttctttttagcaaataaatgttcattgatgaagtgcctgggtattttcccgtcccatttgcagagctctactacttcatttccacagtaagcatatatataatgatcacttctgagtttatcaccagtaacattgatacctattttggggtataaacatggtgtttttcagaaataaaaattatttcattaacctttactattactgtgataatacccaggcactcaatattcatcctgaaattttttataatatatgtaatttgtctagtcttaaagacatttggagcatggccaacaggaaggtcagcttcttactgatgtgtgtggattcttacagaatgttagtacaaatttttataaatatttggtgatccctggggggaaatatcattcttactatggttagaaagtgaattagaaatttcagctcagtttctattttactattcaagttgtgtactttaaacaaatataaaaatcaaaaggctgcctctattacaatcctcagtggaatagatggctatctttcttggctaacattaaatattcttgtaccagagcatggaaaatcgtttataattgttaatagaatggcgatttttttttaagaacttcagatttgctatgctgctgtaagtagaaagcatgaagctttttgatcatgtagggcttattgtagagggtatcaattggcctaactaagcaggattgaatttaccagaggctaagttcagatagtaagaataatgcatatgtgattgttcttaaagtcaatgtattaaataaggtatttttccttttccctcttactggatttttcaattttcaaaccatatggcctaggtaactttaattgaaataatatagatttagttgaatactattcaggaagtaataaattttaatatatcacattgaaattatgcagtggtgatgaattttggtgtttcccccctctttctggttttacatcatgaggatcagttagctgctgacaagaaaagtcatcttgtgtcttttgtaaattgaattttttttttaaatctattaggaactggaaaacagcaagtatggttgattctcattattcaaggtagttacgttctataaagtcactgcgaacactgaattagcaaatatagaacctaggggaaatacaaggctagatttctgcaagccactggtcacattttcatcaagcagtcaacatgtaaatttctgttgtaaagacaccttatttaatataatcgattcattaacattgaagtcatgaccaacaacactgtaactcatgcctgaatgaagcttatctgacacataagcttcataaggcacacaacagcctttttacccttaggaacagctttttgcccttagcactatgcttgggggccattttaaacagtgaaatcaaaaaaagaacagaaatgcaaaaaccatggcattagcgtaaaaaggacacgtttatagtatgaaagctggaacatggccttgttcaacctcagctcagaatatgtgtacagcaagttttttgctgtaccacaaaattttaggttaggcaaattcacaaatacggaatccatgaataacgaggatcaactgtacttaactatattttaaagctgtgacatttatctacctggtttatggaatagaatttattgctgaatcatgctccagtatttgagtgatgttttaaatatcctatgtctgaaaataattcctcctaattgtgtggtaatttgcttttactgtttccacagtatttcaggtctttgctcattcactcagtaatactgagcacttaccatgtaccagaattttactaggcacaaccatgaataaaaatacaattctcttgcaccattaaaaaaaaag

SEQ ID NO: 308263 - DNA, 4017 bp, Homo sapiens
tcccacagccggtggtcccgcatacgcccaggtaggcaaacccggaccacctttggccagcagaaatgagagtaggtgtttattacctcagtgtgggtgcaggctgttttgtagccagtattcttctccttgctgttgctcgatgcattctatttctcatcatttggctcataactggaggaaggcaccacttttggttcttgccaaatctgactgctgatgtgggcttcattgactccttcaggcctctgtacacacatgaatacaaaggaccaaaagcagacttaaagaaagatgagaagtctgaaaccaaaaagcaacagaagtccgacagtgaggaaaagtcagacagtgagaaaaaggaagatgaggaggggaaagtaggaccaggaaatcatggaacagaaggctcggggggagaacggcattcagacacggacagtgacaggagggaagatgatcgatcccagcacagtagtggaaatggaaatgattttgaaatgataacaaaagaggaactggaacagcaaacagatggggattgtgaagaggatgaggaagaggaaaatgatggagaaacacctaaatcttcacatgaaaaatcataatctgactaattttgggactgaatgaataagtacaagaggttggattttctatgttggctgattaccatattgaacacatggcatttgtagcattctttaaatctatctactgaaatgtatttgacattcaagcagttatattcggtccttcattttatagaatattggcactattattggtacagtttaaagccattaatatgttttatccatttgataattttacagtaagtaggtctcattcattttgacagttatcaaagatgtactttccacagttaaatttacattaatggcaatttttgatagttttatggctttttactgttagactaatcaaaaataactttaaaaggaacaaagaaactccaacatttcacattatgcatagttatgtagccatttcacagtttctttaagatgtgtaaactcattgtccttgatagtttttatttttcattataaaattataccaggagatttcttttaagattctgagttagcagagttcaaaactattttgtggaaacaagccaactagtaacaatgcagcaacacttctggtttagctaaattatttttccaatgtaggaaatccacactgatttgtacgtctgactgagagaaagatggtcgtctccagcagagaaagtgaacagcatttgttggaaggtgatggctctccctcctccctccccatttcattggcgtaacgtaaagtgtattctgtacataatttacaaataaaacattttattttaattgttacttattatttagatatttctcaacacttaaattcataaaattaagaccatgtaagggtatgtttttagagaaatggaagtttgagtaacccacagaacatctgtgatctttctacagcagcttcagttttgtgccaacattccatgtattttgaatatgagcaaaaactgatcttaagagcagacttaaagtagctttgtacgccttaatgttcattttgatttattttaaatctttacattcagaaatgagatactgtattatcagaccaggaggcattgctgtgaaagataatttcctattctaaaatatcaaatttaaaataaagataatgaaagaaaacataagagaactattggactctaattgctttgaactagttttgcagtttgactttacgtcttatacatcttagttacaagtctttggaaactcttgtttacttatgagcataatcattccttggagttatactaactaataatgaatattaaatgatttttcttcagtcacagtgagagcatcttgctttgtggttgaaataggtagtgtatgtcagtctttgctttaggctgtttctcatctaagtgtttgaattaaagatgttaaatttttctaattgtgaaaaatatgttttctgtatcgacacattttattaaacttggcttgattgcttctttatagtagtccctgtaagtggacataaatgtggctatttgatgttaatgcaactatgtcaaggctgcaatcactttaatagtttctttttagcaaataaatgttcattgatgaagtgcctgggtattttcccgtcccatttgcagagctctactacttcatttccacagtaagcatatatataatgatcacttctgagtttatcaccagtaacattgatacctattttggggtataaacatggtgtttttcagaaataaaaattatttcattaacctttactattactgtgataatacccaggcactcaatattcatcctgaaattttttataatatatgtaatttgtctagtcttaaagacatttggagcatggccaacaggaaggtcagcttcttactgatgtgtgtggattcttacagaatgttagtacaaatttttataaatatttggtgatccctggggggaaatatcattcttactatggttagaaagtgaattagaaatttcagctcagtttctattttactattcaagttgtgtactttaaacaaatataaaaatcaaaaggctgcctctattacaatcctcagtggaatagatggctatctttcttggctaacattaaatattcttgtaccagagcatggaaaatcgtttataattgttaatagaatggcgatttttttttaagaacttcagatttgctatgctgctgtaagtagaaagcatgaagctttttgatcatgtagggcttattgtagagggtatcaattggcctaactaagcaggattgaatttaccagaggctaagttcagatagtaagaataatgcatatgtgattgttcttaaagtcaatgtattaaataaggtatttttccttttccctcttactggatttttcaattttcaaaccatatggcctaggtaactttaattgaaataatatagatttagttgaatactattcaggaagtaataaattttaatatatcacattgaaattatgcagtggtgatgaattttggtgtttcccccctctttctggttttacatcatgaggatcagttagctgctgacaagaaaagtcatcttgtgtcttttgtaaattgaattttttttttaaatctattaggaactggaaaacagcaagtatggttgattctcattattcaaggtagttacgttctataaagtcactgcgaacactgaattagcaaatatagaacctaggggaaatacaaggctagatttctgcaagccactggtcacattttcatcaagcagtcaacatgtaaatttctgttgtaaagacaccttatttaatataatcgattcattaacattgaagtcatgaccaacaacactgtaactcatgcctgaatgaagcttatctgacacataagcttcataaggcacacaacagcctttttacccttaggaacagctttttgcccttagcactatgcttgggggccattttaaacagtgaaatcaaaaaaagaacagaaatgcaaaaaccatggcattagcgtaaaaaggacacgtttatagtatgaaagctggaacatggccttgttcaacctcagctcagaatatgtgtacagcaagttttttgctgtaccacaaaattttaggttaggcaaattcacaaatacggaatccatgaataacgaggatcaactgtacttaactatattttaaagctgtgacatttatctacctggtttatggaatagaatttattgctgaatcatgctccagtatttgagtgatgttttaaatatcctatgtctgaaaataattcctcctaattgtgtggtaatttgcttttactgtttccacagtatttcaggtctttgctcattcactcagtaatactgagcacttaccatgtaccagaattttactaggcacaaccatgaataaaaatacaattctcttgcaccattaaaaaaaaag

SEQ ID NO: 308264 - DNA, 3408 bp, Homo sapiens
  misc_feature (28)..(28): n is a, c, g, or t
atgtgaaagtggctacataactatgcanaatgtgaaggttggattttctatgttggctgattaccatattgaacacatggcatttgtagcattctttaaatctatctactgaaatgtatttgacattcaagcagttatattcggtccttcattttatagaatattggcactattattggtacagtttaaagccattaatatgttttatccatttgataattttacagtaagtaggtctcattcattttgacagttatcaaagatgtactttccacagttaaatttacattaatggcaatttttgatagttttatggctttttactgttagactaatcaaaaataactttaaaaggaacaaagaaactccaacatttcacattatgcatagttatgtagccatttcacagtttctttaagatgtgtaaactcattgtccttgatagtttttatttttcattataaaattataccaggagatttcttttaagattctgagttagcagagttcaaaactattttgtggaaacaagccaactagtaacaatgcagcaacacttctggtttagctaaattatttttccaatgtaggaaatccacactgatttgtacgtctgactgagagaaagatggtcgtctccagcagagaaagtgaacagcatttgttggaaggtgatggctctccctcctccctccccatttcattggcgtaacgtaaagtgtattctgtacataatttacaaataaaacattttattttaattgttacttattatttagatatttctcaacacttaaattcataaaattaagaccatgtaagggtatgtttttagagaaatggaagtttgagtaacccacagaacatctgtgatctttctacagcagcttcagttttgtgccaacattccatgtattttgaatatgagcaaaaactgatcttaagagcagacttaaagtagctttgtacgccttaatgttcattttgatttattttaaatctttacattcagaaatgagatactgtattatcagaccaggaggcattgctgtgaaagataatttcctattctaaaatatcaaatttaaaataaagataatgaaagaaaacataagagaactattggactctaattgctttgaactagttttgcagtttgactttacgtcttatacatcttagttacaagtctttggaaactcttgtttacttatgagcataatcattccttggagttatactaactaataatgaatattaaatgatttttcttcagtcacagtgagagcatcttgctttgtggttgaaataggtagtgtatgtcagtctttgctttaggctgtttctcatctaagtgtttgaattaaagatgttaaatttttctaattgtgaaaaatatgttttctgtatcgacacattttattaaacttggcttgattgcttctttatagtagtccctgtaagtggacataaatgtggctatttgatgttaatgcaactatgtcaaggctgcaatcactttaatagtttctttttagcaaataaatgttcattgatgaagtgcctgggtattttcccgtcccatttgcagagctctactacttcatttccacagtaagcatatatataatgatcacttctgagtttatcaccagtaacattgatacctattttggggtataaacatggtgtttttcagaaataaaaattatttcattaacctttactattactgtgataatacccaggcactcaatattcatcctgaaattttttataatatatgtaatttgtctagtcttaaagacatttggagcatggccaacaggaaggtcagcttcttactgatgtgtgtggattcttacagaatgttagtacaaatttttataaatatttggtgatccctggggggaaatatcattcttactatggttagaaagtgaattagaaatttcagctcagtttctattttactattcaagttgtgtactttaaacaaatataaaaatcaaaaggctgcctctattacaatcctcagtggaatagatggctatctttcttggctaacattaaatattcttgtaccagagcatggaaaatcgtttataattgttaatagaatggcgatttttttttaagaacttcagatttgctatgctgctgtaagtagaaagcatgaagctttttgatcatgtagggcttattgtagagggtatcaattggcctaactaagcaggattgaatttaccagaggctaagttcagatagtaagaataatgcatatgtgattgttcttaaagtcaatgtattaaataaggtatttttccttttccctcttactggatttttcaattttcaaaccatatggcctaggtaactttaattgaaataatatagatttagttgaatactattcaggaagtaataaattttaatatatcacattgaaattatgcagtggtgatgaattttggtgtttcccccctctttctggttttacatcatgaggatcagttagctgctgacaagaaaagtcatcttgtgtcttttgtaaattgaattttttttttaaatctattaggaactggaaaacagcaagtatggttgattctcattattcaaggtagttacgttctataaagtcactgcgaacactgaattagcaaatatagaacctaggggaaatacaaggctagatttctgcaagccactggtcacattttcatcaagcagtcaacatgtaaatttctgttgtaaagacaccttatttaatataatcgattcattaacattgaagtcatgaccaacaacactgtaactcatgcctgaatgaagcttatctgacacataagcttcataaggcacacaacagcctttttacccttaggaacagctttttgcccttagcactatgcttgggggccattttaaacagtgaaatcaaaaaaagaacagaaatgcaaaaaccatggcattagcgtaaaaaggacacgtttatagtatgaaagctggaacatggccttgttcaacctcagctcagaatatgtgtacagcaagttttttgctgtaccacaaaattttaggttaggcaaattcacaaatacggaatccatgaataacgaggatcaactgtacttaactatattttaaagctgtgacatttatctacctggtttatggaatagaatttattgctgaatcatgctccagtatttgagtgatgttttaaatatcctatgtctgaaaataattcctcctaattgtgtggtaatttgcttttactgtttccacagtatttcaggtctttgctcattcactcagtaatactgagcacttaccatgtaccagaattttactaggcacaaccatgaataaaaatacaattctcttgcaccattaaaaaaaaag

SEQ ID NO: 308265 - DNA, 2580 bp, Homo sapiens
tttaaacgagctgtattaccccgcacagtgcaggagaaaagataattggctcaggtctcggctctgccatctaccacctgtggagccttagataagtcagttcttatctctgtcactcaacggtctcggtcttgtcatcttttacatggaatgtcatgaaatatacagtacattgcaggaactgcctcaggtaaagacttctagggttcagtaggtctcagtcgatccctctgagaaaggccgcaccctaaatgcacagactctgactctaaggggatggggtcggggaatctgcattttagtagcttctcaggtgattcagatgctcagtcaggattgagaaaccaggactcttcccagccctcctgttctctgatccacttctctgcttcctccacgtcctaacgattctccagttcccgcacagcaggagcgaagggaagaggggagagaaggcaccgctaaggaccgctggccccgccaggcggccgacctccccattccaggggcgccagccggcggattacataacgggcctcggggcgcgttctcgcgaggtttccaccgccccctcctcgctccacgtcagagggaaccgggcggagcggccaacatggcggaacgcaggagacacaagaagcggatccaggaagttggtgaaccatctaaagaagagaaggctgtggccaagtatcttcgattcaactgtccaacaaagtccaccaatatgatgggtcaccgggttgattattttattgcttcaaaagcagtggactgtcttttggattcaaagtgggcaaaggccaagaaaggagaggaagctttatttacaaccagggagtctgtggttgactactgcaacaggcttttaaagaagcagttttttcaccgagccctaaaagtaatgaaaatgaaatatgataaagacataaagaaagaaaaagataaaggaaaagctgaaagtggaaaagaagaagataaaaagagcaagaaagaaaatataaaggatgagaagacaaaaaaagaaaaagagaaaaaaaaagatggtgaaaaggaagaatccaaaaaggaggaaactccaggaactcctaaaaagaaggaaactaagaaaaaattcaaacttgagccacatgatgatcaggtttttctggatggaaatgaggtgtatgtatggatctatgacccagttcactttaaaacatttgtcatgggattaattcttgtgattgcagtaatagcggccaccctcttccccctttggccagcagaaatgagagtaggtgtttattacctcagtgtgggtgcaggctgttttgtagccagtattcttctccttgctgttgctcgatgcattctatttctcatcatttggctcataactggaggaaggcaccacttttggttcttgccaaatctgactgctgatgtgggcttcattgactccttcaggcctctgtacacacatgaatacaaaggaccaaaagcagacttaaagaaagatgagaagtctgaaaccaaaaagcaacagaagtccgacagtgaggaaaagtcagacagtgagaaaaaggaagatgaggaggggaaagtaggaccaggaaatcatggaacagaaggctcggggggagaacggcattcagacacggacagtgacaggagggaagatgatcgatcccagcacagtagtggaaatggaaatgattttgaaatgataacaaaagaggaactggaacagcaaacagatggggattgtgaagaggatgaggaagaggaaaatgatggagaaacacctaaatcttcacatgaaaaatcataatctgactaattttgggactgaatgaataagtacaagaggttggattttctatgttggctgattaccatattgaacacatggcatttgtagcattctttaaatctatctactgaaatgtatttgacattcaagcagttatattcggtccttcattttatagaatattggcactattattggtacagtttaaagccattaatatgttttatccatttgataattttacagtaagtaggtctcattcattttgacagttatcaaagatgtactttccacagttaaatttacattaatggcaatttttgatagttttatggctttttactgttagactaatcaaaaataactttaaaaggaacaaagaaactccaacatttcacattatgcatagttatgtagccatttcacagtttctttaagatgtgtaaactcattgtccttgatagtttttatttttcattataaaattataccaggagatttcttttaagattctgagttagcagagttcaaaactattttgtggaaacaagccaactagtaacaatgcagcaacacttctggtttagctaaattatttttccaatgtaggaaatccacactgatttgtacgtctgactgagagaaagatggtcgtctccagcagagaaagtgaacagcatttgttggaaggtgatggctctccctcctccctccccatttcattggcgtaacgtaaagtgtattctgtacataatttacaaataaaacattttattttaattgtt

SEQ ID NO: 308266 - DNA, 2160 bp, Homo sapiens
tttaaacgagctgtattaccccgcacagtgcaggagaaaagataattggctcaggtctcggctctgccatctaccacctgtggagccttagataagtcagttcttatctctgtcactcaacggtctcggtcttgtcatcttttacatggaatgtcatgaaatatacagtacattgcaggaactgcctcaggtaaagacttctagggttcagtaggtctcagtcgatccctctgagaaaggccgcaccctaaatgcacagactctgactctaaggggatggggtcggggaatctgcattttagtagcttctcaggtgattcagatgctcagtcaggattgagaaaccaggactcttcccagccctcctgttctctgatccacttctctgcttcctccacgtcctaacgattctccagttcccgcacagcaggagcgaagggaagaggggagagaaggcaccgctaaggaccgctggccccgccaggcggccgacctccccattccaggggcgccagccggcggattacataacgggcctcggggcgcgttctcgcgaggtttccaccgccccctcctcgctccacgtcagagggaaccgggcggagcggccaacatggcggaacgcaggagacacaagaagcggatccaggaagttggtgaaccatctaaagaagagaaggctgtggccaagtatcttcgattcaactgtccaacaaagtccaccaatatgatgggtcaccgggttgattattttattgcttcaaaagcagtggactgtcttttggattcaaagtgggcaaaggccaagaaaggagaggaagctttatttacaaccagggagtctgtggttgactactgcaacaggcttttaaagaagcagttttttcaccgagccctaaaagtaatgaaaatgaaatatgataaagacataaagaaagaaaaagataaaggaaaagctgaaagtggaaaagaagaagataaaaagagcaagaaagaaaatataaaggatgagaagacaaaaaaagaaaaagagaaaaaaaaagatggtgaaaaggaagaatccaaaaaggaggaaactccaggaactcctaaaaagaaggaaactaagaaaaaattcaaacttgagccacatgatgatcaggtttttctggatggaaatgaggtgtatgtatggatctatgacccagttcactttaaaacatttgtcatgggattaattcttgtgattgcagtaatagcggccaccctcttccccctttggccagcagaaatgagagtaggtgtttattacctcagtgtgggtgcaggctgttttgtagccagtattcttctccttgctgttgctcgatgcattctatttctcatcatttggctcataactggaggaaggcaccacttttggttcttgccaaatctgactgctgatgtgggcttcattgactccttcaggcctctgtacacacatgaatacaaaggaccaaaagcagacttaaagaaagatgagaagtctgaaaccaaaaagcaacagaagtccgacagtgaggaaaagtcagacagtgagaaaaaggaagatgaggaggggaaagtaggaccaggaaatcatggaacagaaggctcggggggagaacggcattcagacacggacagtgacaggagggaagatgatcgatcccagcacagtagtggaaatggaaatgattttgaaatgataacaaaagaggaactggaacagcaaacagatggggattgtgaagaggatgaggaagaggaaaatgatggagaaacacctaaatcttcacatgaaaaatcataatctgactaattttgggactgaatgaataagtacaagaggttggattttctatgttggctgattaccatattgaacacatggcatttgtagcattctttaaatctatctactgaaatgtatttgacattcaagcagttatattcggtccttcattttatagaatattggcactattattggtacagtttaaagcagcccactttaatatcgcctccccctccatccccgactccattcccacccagtaaaggtagggtctcaattcaatttttggaccagttatttcaaaggaatgtaccttttccaacaagttaaaaatttaccattaaatgggcaatttttttgac

SEQ ID NO: 308267 - DNA, 2076 bp, Homo sapiens
tttaaacgagctgtattaccccgcacagtgcaggagaaaagataattggctcaggtctcggctctgccatctaccacctgtggagccttagataagtcagttcttatctctgtcactcaacggtctcggtcttgtcatcttttacatggaatgtcatgaaatatacagtacattgcaggaactgcctcaggtaaagacttctagggttcagtaggtctcagtcgatccctctgagaaaggccgcaccctaaatgcacagactctgactctaaggggatggggtcggggaatctgcattttagtagcttctcaggtgattcagatgctcagtcaggattgagaaaccaggactcttcccagccctcctgttctctgatccacttctctgcttcctccacgtcctaacgattctccagttcccgcacagcaggagcgaagggaagaggggagagaaggcaccgctaaggaccgctggccccgccaggcggccgacctccccattccaggggcgccagccggcggattacataacgggcctcggggcgcgttctcgcgaggtttccaccgccccctcctcgctccacgtcagagggaaccgggcggagcggccaacatggcggaacgcaggagacacaagaagcggatccaggaagttggtgaaccatctaaagaagagaaggctgtggccaagtatcttcgattcaactgtccaacaaagtccaccaatatgatgggtcaccgggttgattattttattgcttcaaaagcagtggactgtcttttggattcaaagtgggcaaaggccaagaaaggagaggaagctttatttacaaccagggagtctgtggttgactactgcaacaggcttttaaagaagcagttttttcaccgagccctaaaagtaatgaaaatgaaatatgataaagacataaagaaagaaaaagataaaggaaaagctgaaagtggaaaagaagaagataaaaagagcaagaaagaaaatataaaggatgagaagacaaaaaaagaaaaagagaaaaaaaaagatggtgaaaaggaagaatccaaaaaggaggaaactccaggaactcctaaaaagaaggaaactaagaaaaaattcaaacttgagccacatgatgatcaggtttttctggatggaaatgaggtgtatgtatggatctatgacccagttcactttaaaacatttgtcatgggattaattcttgtgattgcagtaatagcggccaccctcttccccctttggccagcagaaatgagagtaggtgtttattacctcagtgtgggtgcaggctgttttgtagccagtattcttctccttgctgttgctcgatgcattctatttctcatcatttggctcataactggaggaaggcaccacttttggttcttgccaaatctgactgctgatgtgggcttcattgactccttcaggcctctgtacacacatgaatacaaaggaccaaaagcagacttaaagaaagatgagaagtctgaaaccaaaaagcaacagaagtccgacagtgaggaaaagtcagacagtgagaaaaaggaagatgaggaggggaaagtaggaccaggaaatcatggaacagaaggctcggggggagaacggcattcagacacggacagtgacaggagggaagatgatcgatcccagcacagtagtggaaatggaaatgattttgaaatgataacaaaagaggaactggaacagcaaacagatggggattgtgaagaggatgaggaagaggaaaatgatggagaaacacctaaatcttcacatgaaaaatcataatctgactaattttgggactgaatgaataagtacaagaggttggattttctatgttggctgattaccatattgaacacactttgacgaccattactccttggataagattgtcattcagaaataccatactgtgaatggccactactgtgaacttcgatcagccctgtctaagcaagagatggctagtgcttcatccagccgaagaggtcgaagtggttctggaaactttggtggtggtcgtggaggtggtttcgctggggctt

SEQ ID NO: 308268 - DNA, 1969 bp, Homo sapiens
tttaaacgagctgtattaccccgcacagtgcaggagaaaagataattggctcaggtctcggctctgccatctaccacctgtggagccttagataagtcagttcttatctctgtcactcaacggtctcggtcttgtcatcttttacatggaatgtcatgaaatatacagtacattgcaggaactgcctcaggtaaagacttctagggttcagtaggtctcagtcgatccctctgagaaaggccgcaccctaaatgcacagactctgactctaaggggatggggtcggggaatctgcattttagtagcttctcaggtgattcagatgctcagtcaggattgagaaaccaggactcttcccagccctcctgttctctgatccacttctctgcttcctccacgtcctaacgattctccagttcccgcacagcaggagcgaagggaagaggggagagaaggcaccgctaaggaccgctggccccgccaggcggccgacctccccattccaggggcgccagccggcggattacataacgggcctcggggcgcgttctcgcgaggtttccaccgccccctcctcgctccacgtcagagggaaccgggcggagcggccaacatggcggaacgcaggagacacaagaagcggatccaggaagttggtgaaccatctaaagaagagaaggctgtggccaagtatcttcgattcaactgtccaacaaagtccaccaatatgatgggtcaccgggttgattattttattgcttcaaaagcagtggactgtcttttggattcaaagtgggcaaaggccaagaaaggagaggaagctttatttacaaccagggagtctgtggttgactactgcaacaggcttttaaagaagcagttttttcaccgagccctaaaagtaatgaaaatgaaatatgataaagacataaagaaagaaaaagataaaggaaaagctgaaagtggaaaagaagaagataaaaagagcaagaaagaaaatataaaggatgagaagacaaaaaaagaaaaagagaaaaaaaaagatggtgaaaaggaagaatccaaaaaggaggaaactccaggaactcctaaaaagaaggaaactaagaaaaaattcaaacttgagccacatgatgatcaggtttttctggatggaaatgaggtgtatgtatggatctatgacccagttcactttaaaacatttgtcatgggattaattcttgtgattgcagtaatagcggccaccctcttccccctttggccagcagaaatgagagtaggtgtttattacctcagtgtgggtgcaggctgttttgtagccagtattcttctccttgctgttgctcgatgcattctatttctcatcatttggctcataactggaggaaggcaccacttttggttcttgccaaatctgactgctgatgtgggcttcattgactccttcaggcctctgtacacacatgaatacaaaggaccaaaagcagacttaaagaaagatgagaagtctgaaaccaaaaagcaacagaagtccgacagtgaggaaaagtcagacagtgagaaaaaggaagatgaggaggggaaagtaggaccaggaaatcatggaacagaaggctcggggggagaacggcattcagacacggacagtgacaggagggaagatgatcgatcccagcacagtagtggaaatggaaatgattttgaaatgataacaaaagaggaactggaacagcaaacagatggggattgtgaagaggatgaggaagaggaaaatgatggagaaacacctaaatcttcacatgaaaaatcataatctgactaattttgggactgaatgaataagtacaagaggttggattttctatgttggctgattaccatattgaacacaacgggccccacgaagagccccgcaaagagccacgcgacgagccgcccctaagagccacccgaagtgccgcaccaagag

SEQ ID NO: 308269 - DNA, 2329 bp, Homo sapiens
  misc_feature (1935)..(1935): n is a, c, g, or t
  misc_feature (1965)..(1965): n is a, c, g, or t
  misc_feature (1996)..(1996): n is a, c, g, or t
  misc_feature (1998)..(1998): n is a, c, g, or t
  misc_feature (2123)..(2123): n is a, c, g, or t
  misc_feature (2134)..(2134): n is a, c, g, or t
  misc_feature (2156)..(2156): n is a, c, g, or t
  misc_feature (2190)..(2190): n is a, c, g, or t
  misc_feature (2238)..(2238): n is a, c, g, or t
  misc_feature (2247)..(2248): n is a, c, g, or t
  misc_feature (2268)..(2268): n is a, c, g, or t
  misc_feature (2328)..(2328): n is a, c, g, or t
tttaaacgagctgtattaccccgcacagtgcaggagaaaagataattggctcaggtctcggctctgccatctaccacctgtggagccttagataagtcagttcttatctctgtcactcaacggtctcggtcttgtcatcttttacatggaatgtcatgaaatatacagtacattgcaggaactgcctcaggtaaagacttctagggttcagtaggtctcagtcgatccctctgagaaaggccgcaccctaaatgcacagactctgactctaaggggatggggtcggggaatctgcattttagtagcttctcaggtgattcagatgctcagtcaggattgagaaaccaggactcttcccagccctcctgttctctgatccacttctctgcttcctccacgtcctaacgattctccagttcccgcacagcaggagcgaagggaagaggggagagaaggcaccgctaaggaccgctggccccgccaggcggccgacctccccattccaggggcgccagccggcggattacataacgggcctcggggcgcgttctcgcgaggtttccaccgccccctcctcgctccacgtcagagggaaccgggcggagcggccaacatggcggaacgcaggagacacaagaagcggatccaggaagttggtgaaccatctaaagaagagaaggctgtggccaagtatcttcgattcaactgtccaacaaagtccaccaatatgatgggtcaccgggttgattattttattgcttcaaaagcagtggactgtcttttggattcaaagtgggcaaaggccaagaaaggagaggaagctttatttacaaccagggagtctgtggttgactactgcaacaggcttttaaagaagcagttttttcaccgagccctaaaagtaatgaaaatgaaatatgataaagacataaagaaagaaaaagataaaggaaaagctgaaagtggaaaagaagaagataaaaagagcaagaaagaaaatataaaggatgagaagacaaaaaaagaaaaagagaaaaaaaaagatggtgaaaaggaagaatccaaaaaggaggaaactccaggaactcctaaaaagaaggaaactaagaaaaaattcaaacttgagccacatgatgatcaggtttttctggatggaaatgaggtgtatgtatggatctatgacccagttcactttaaaacatttgtcatgggattaattcttgtgattgcagtaatagcggccaccctcttccccctttggccagcagaaatgagagtaggtgtttattacctcagtgtgggtgcaggctgttttgtagccagtattcttctccttgctgttgctcgatgcattctatttctcatcatttggctcataactggaggaaggcaccacttttggttcttgccaaatctgactgctgatgtgggcttcattgactccttcaggcctctgtacacacatgaatacaaaggaccaaaagcagacttaaagaaagatgagaagtctgaaaccaaaaagcaacagaagtccgacagtgaggaaaagtcagacagtgagaaaaaggaagatgaggaggggaaagtaggaccaggaaatcatggaacagaaggctcggggggagaacggcattcagacacggacagtgacaggagggaagatgatcgatcccagcacagtagtggaaatggaaatgattttgaaatggctgcagtgctctgagccctaggattcatctttcttttcaccgtaggtggcctgactggcattgtattagcaaactcatcactagacatcgtactacacgacacgtactacgttgtagctcacttccactatgtcctatcaataggagctgtatttgccatcataggaggcttcattcactgatttcccctattctcaggctacaccctagaccaaacctacgccanaatccatcactatcatattcatcggcgtanatctaactttcttcccacaacactttctcgncntatcggaatgccccgacgttactcggactaccccgatgcatacaccacatgaaacatcctatcatctgtaggctcattcatttctctaacagcagtaatattaataattttcatgatttgagaanccttcgcttcnaagcgaaaatcctaattagtanaagaaccctccataaacctggaattgactatatngatgcccccccaccctaccacacatttcgaagaacccgttataccatnaaaatcttnnacaaaaaggaaaggaatccnaaccccccccaagcttggttttcaaagcccaaccccccatgggctcccatgaactttttnc

SEQ ID NO: 308270 - DNA, 1704 bp, Homo sapiens
tttaaacgagctgtattaccccgcacagtgcaggagaaaagataattggctcaggtctcggctctgccatctaccacctgtggagccttagataagtcagttcttatctctgtcactcaacggtctcggtcttgtcatcttttacatggaatgtcatgaaatatacagtacattgcaggaactgcctcaggtaaagacttctagggttcagtaggtctcagtcgatccctctgagaaaggccgcaccctaaatgcacagactctgactctaaggggatggggtcggggaatctgcattttagtagcttctcaggtgattcagatgctcagtcaggattgagaaaccaggactcttcccagccctcctgttctctgatccacttctctgcttcctccacgtcctaacgattctccagttcccgcacagcaggagcgaagggaagaggggagagaaggcaccgctaaggaccgctggccccgccaggcggccgacctccccattccaggggcgccagccggcggattacataacgggcctcggggcgcgttctcgcgaggtttccaccgccccctcctcgctccacgtcagagggaaccgggcggagcggccaacatggcggaacgcaggagacacaagaagcggatccaggaagttggtgaaccatctaaagaagagaaggctgtggccaagtatcttcgattcaactgtccaacaaagtccaccaatatgatgggtcaccgggttgattattttattgcttcaaaagcagtggactgtcttttggattcaaagtgggcaaaggccaagaaaggagaggaagctttatttacaaccagggagtctgtggttgactactgcaacaggcttttaaagaagcagttttttcaccgagccctaaaagtaatgaaaatgaaatatgataaagacataaagaaagaaaaagataaaggaaaagctgaaagtggaaaagaagaagataaaaagagcaagaaagaaaatataaaggatgagaagacaaaaaaagaaaaagagaaaaaaaaagatggtgaaaaggaagaatccaaaaaggaggaaactccaggaactcctaaaaagaaggaaactaagaaaaaattcaaacttgagccacatgatgatcaggtttttctggatggaaatgaggtgtatgtatggatctatgacccagttcactttaaaacatttgtcatgggattaattcttgtgattgcagtaatagcggccaccctcttccccctttggccagcagaaatgagagtaggtgtttattacctcagtgtgggtgcaggctgttttgtagccagtattcttctccttgctgttgctcgatgcattctatttctcatcatttggctcataactggaggaaggcaccacttttggttcttgccaaatctgactgctgatgtgggcttcattgactccttcaggcctctgtacacacatgaatacaaaggcggcccggttaacccggaccgcctttgtcttccgagttcacctgtgtgaaggcgacagtggtgcaggtcttcctgtggactagacgtcccagtcttgcctttcccttgataatgcagtaagggacccccattttacgacacaggtcaggcaagaagacaaccagctcgatgtgatccacgtcgtgtgcaatcaccaccagctgagctttcttgttctccaccaaagga

SEQ ID NO: 308271 - DNA, 1427 bp, Homo sapiens
tttaaacgagctgtattaccccgcacagtgcaggagaaaagataattggctcaggtctcggctctgccatctaccacctgtggagccttagataagtcagttcttatctctgtcactcaacggtctcggtcttgtcatcttttacatggaatgtcatgaaatatacagtacattgcaggaactgcctcaggtaaagacttctagggttcagtaggtctcagtcgatccctctgagaaaggccgcaccctaaatgcacagactctgactctaaggggatggggtcggggaatctgcattttagtagcttctcaggtgattcagatgctcagtcaggattgagaaaccaggactcttcccagccctcctgttctctgatccacttctctgcttcctccacgtcctaacgattctccagttcccgcacagcaggagcgaagggaagaggggagagaaggcaccgctaaggaccgctggccccgccaggcggccgacctccccattccaggggcgccagccggcggattacataacgggcctcggggcgcgttctcgcgaggtttccaccgccccctcctcgctccacgtcagagggaaccgggcggagcggccaacatggcggaacgcaggagacacaagaagcggatccaggaagttggtgaaccatctaaagaagagaaggctgtggccaagtatcttcgattcaactgtccaacaaagtccaccaatatgatgggtcaccgggttgattattttattgcttcaaaagcagtggactgtcttttggattcaaagtgggcaaaggccaagaaaggagaggaagctttatttacaaccagggagtctgtggttgactactgcaacaggcttttaaagaagcagttttttcaccgagccctaaaagtaatgaaaatgaaatatgataaagacataaagaaagaaaaagataaaggaaaagctgaaagtggaaaagaagaagataaaaagagcaagaaagaaaatataaaggatgagaagacaaaaaaagaaaaagagaaaaaaaaagatggtgaaaaggaagaatccaaaaaggaggaaactccaggaactcctaaaaagaaggaaactaagaaaaaattcaaacttgagccacatgatgatcaggtttttctggatggaaatgaggtgtatgtatggatctatgacccagttcactttaaaacatttgtcatgggattaattcttgtgattgcagtaatagcggccaccctcttccccctttggccagcagaaatgagagtaggtgtttattacctcagtgtgggtgcaggctgttttgtagccagtattcttctccttgctgttggaagttggtgaaccatctaaagaagagaaggctgtggccaagtatcttcgattcaactgtccaacaaagtccaccaatatggat

SEQ ID NO: 308272 - DNA, 1900 bp, Homo sapiens
tttaaacgagctgtattaccccgcacagtgcaggagaaaagataattggctcaggtctcggctctgccatctaccacctgtggagccttagataagtcagttcttatctctgtcactcaacggtctcggtcttgtcatcttttacatggaatgtcatgaaatatacagtacattgcaggaactgcctcaggtaaagacttctagggttcagtaggtctcagtcgatccctctgagaaaggccgcaccctaaatgcacagactctgactctaaggggatggggtcggggaatctgcattttagtagcttctcaggtgattcagatgctcagtcaggattgagaaaccaggactcttcccagccctcctgttctctgatccacttctctgcttcctccacgtcctaacgattctccagttcccgcacagcaggagcgaagggaagaggggagagaaggcaccgctaaggaccgctggccccgccaggcggccgacctccccattccaggggcgccagccggcggattacataacgggcctcggggcgcgttctcgcgaggtttccaccgccccctcctcgctccacgtcagagggaaccgggcggagcggccaacatggcggaacgcaggagacacaagaagcggatccaggaagttggtgaaccatctaaagaagagaaggctgtggccaagtatcttcgattcaactgtccaacaaagtccaccaatatgatgggtcaccgggttgattattttattgcttcaaaagcagtggactgtcttttggattcaaagtgggcaaaggccaagaaaggagaggaagctttatttacaaccagggagtctgtggttgactactgcaacaggcttttaaagaagcagttttttcaccgagccctaaaagtaatgaaaatgaaatatgataaagacataaagaaagaaaaagataaaggaaaagctgaaagtggaaaagaagaagataaaaagagcaagaaagaaaatataaaggatgagaagacaaaaaaagaaaaagagaaaaaaaaagatggtgaaaaggaagaatccaaaaaggaggaaactccaggaactcctaaaaagaaggaaactaagaaaaaattcaaacttgagccacatgatgatcaggtttttctggatggaaatgaggtgtatgtatggatctatgacccagttcactttaaaacatttgtcatgggattaattcttggtaagtagtgagatgttaatagctataaagtgcaatctaaaatttagaaaacaatatgcagatactgtaaaagaaaatgttcctaaatttaacataaaatagttgtcattttaaaaatactttaaataaagtcagaagataaataatacactaaggaaaatatttgaaacatattaaagatcttttaagagattaacaaactgatagaaaaatggtcaaggtagttaacagataaagaaatacaatgaccaatcatcatgagtgatacttaatcacactcatatacaaattaaagctgtagtgattaagagtcttgcaaaccttaacattaaaggtcttagaaaaaaatcagctctctctaacagttgataggtatgtctattgttttaatttttgtaaagggcagtttgtcagtatctttgaaattttatgtgtctgcagtgacccagcaattctaggctgttcccatacagttgcacaaagtgtgtgcattgacacattatctgtttttttccaaatcccttagactatacttgagtataatctagcaaatatctttcaaattcaaaatgcttataccatttgatctaataaattccactttaaggaatttaccctatgccataatcacagttgcacaaacgtacatgtgcaaggatattatacctagaatagat

SEQ ID NO: 308273 - DNA, 1842 bp, Homo sapiens
tttaaacgagctgtattaccccgcacagtgcaggagaaaagataattggctcaggtctcggctctgccatctaccacctgtggagccttagataagtcagttcttatctctgtcactcaacggtctcggtcttgtcatcttttacatggaatgtcatgaaatatacagtacattgcaggaactgcctcaggtaaagacttctagggttcagtaggtctcagtcgatccctctgagaaaggccgcaccctaaatgcacagactctgactctaaggggatggggtcggggaatctgcattttagtagcttctcaggtgattcagatgctcagtcaggattgagaaaccaggactcttcccagccctcctgttctctgatccacttctctgcttcctccacgtcctaacgattctccagttcccgcacagcaggagcgaagggaagaggggagagaaggcaccgctaaggaccgctggccccgccaggcggccgacctccccattccaggggcgccagccggcggattacataacgggcctcggggcgcgttctcgcgaggtttccaccgccccctcctcgctccacgtcagagggaaccgggcggagcggccaacatggcggaacgcaggagacacaagaagcggatccaggaagttggtgaaccatctaaagaagagaaggctgtggccaagtatcttcgattcaactgtccaacaaagtccaccaatatgatgggtcaccgggttgattattttattgcttcaaaagcagtggactgtcttttggattcaaagtgggcaaaggccaagaaaggagaggaagctttatttacaaccagggagtctgtggttgactactgcaacaggcttttaaagaagcagttttttcaccgagccctaaaagtaatgaaaatgaaatatgataaagacataaagaaagaaaaagataaaggaaaagctgaaagtggaaaagaagaagataaaaagagcaagaaagaaaatataaaggatgagaagacaaaaaaagaaaaagagaaaaaaaaagatggtgaaaaggaagaatccaaaaaggaggaaactccaggaactcctaaaaagaaggaaactaagaaaaaattcaaacttgagccacatgatgatcaggtttttctggatggaaatgaggtgtatgtatggatctatgacccagttcactttaaaacatttgtcatgggattaattcttggtaagtagtgagatgttaatagctataaagtgcaatctaaaatttagaaaacaatatgcagatactgtaaaagaaaatgttcctaaatttaacataaaatagttgtcattttaaaaatactttaaataaagtcagaagataaataatacactaaggaaaatatttgaaacatattaaagatcttttaagagattaacaaactgatagaaaaatggtcaaggtagttaacagataaagaaatacaatgaccaatcatcatgagtgatacttaatcacactcatatacaaattaaagctgtagtgattaagagtcttgcaaaccttaacattaaaggtcttagaaggcagtttgtcagtatctttgaaattttatgtgtctgcagtgacccagcaattctaggctgttcccatacagttgcacaaagtgtgtgcattgacacattatctgtttttttccaaatcccttagactatacttgagtataatctagcaaatatctttcaaattcaaaatgcttataccatttgatctaataaattccactttaaggaatttaccctatgccataatcacagttgcacaaacgtacatgtgcaaggatattatacctagaatagat

SEQ ID NO: 308274 - DNA, 1346 bp, Homo sapiens
tttaaacgagctgtattaccccgcacagtgcaggagaaaagataattggctcaggtctcggctctgccatctaccacctgtggagccttagataagtcagttcttatctctgtcactcaacggtctcggtcttgtcatcttttacatggaatgtcatgaaatatacagtacattgcaggaactgcctcaggtaaagacttctagggttcagtaggtctcagtcgatccctctgagaaaggccgcaccctaaatgcacagactctgactctaaggggatggggtcggggaatctgcattttagtagcttctcaggtgattcagatgctcagtcaggattgagaaaccaggactcttcccagccctcctgttctctgatccacttctctgcttcctccacgtcctaacgattctccagttcccgcacagcaggagcgaagggaagaggggagagaaggcaccgctaaggaccgctggccccgccaggcggccgacctccccattccaggggcgccagccggcggattacataacgggcctcggggcgcgttctcgcgaggtttccaccgccccctcctcgctccacgtcagagggaaccgggcggagcggccaacatggcggaacgcaggagacacaagaagcggatccaggaagttggtgaaccatctaaagaagagaaggctgtggccaagtatcttcgattcaactgtccaacaaagtccaccaatatgatgggtcaccgggttgattattttattgcttcaaaagcagtggactgtcttttggattcaaagtgggcaaaggccaagaaaggagaggaagctttatttacaaccagggagtctgtggttgactactgcaacaggcttttaaagaagcagttttttcaccgagccctaaaagtaatgaaaatgaaatatgataaagacataaagaaagaaaaagataaaggaaaagctgaaagtggaaaagaagaagataaaaagagcaagaaagaaaatataaaggatgagaagacaaaaaaagaaaaagagaaaaaaaaagatggtgaaaaggaagaatccaaaaaggaggaaactccaggaactcctaaaaagaaggaaactaagaaaaaattcaaacttgagccacatgatgatcaggtttttctggatggaaatgaggttagagtaagcctataactagaagttcagttttctataggagtttttagaaagatgtttgatgccttcactaataaaaggaaaaattttgagaaatctaattatgctcttaaatgtataaaagctactccatttttaaaatcaataatttctcttatttagatttttaaaagtcagatttgac

SEQ ID NO: 308275 - DNA, 1080 bp, Homo sapiens
tttaaacgagctgtattaccccgcacagtgcaggagaaaagataattggctcaggtctcggctctgccatctaccacctgtggagccttagataagtcagttcttatctctgtcactcaacggtctcggtcttgtcatcttttacatggaatgtcatgaaatatacagtacattgcaggaactgcctcaggtaaagacttctagggttcagtaggtctcagtcgatccctctgagaaaggccgcaccctaaatgcacagactctgactctaaggggatggggtcggggaatctgcattttagtagcttctcaggtgattcagatgctcagtcaggattgagaaaccaggactcttcccagccctcctgttctctgatccacttctctgcttcctccacgtcctaacgattctccagttcccgcacagcaggagcgaagggaagaggggagagaaggcaccgctaaggaccgctggccccgccaggcggccgacctccccattccaggggcgccagccggcggattacataacgggcctcggggcgcgttctcgcgaggtttccaccgccccctcctcgctccacgtcagagggaaccgggcggagcggccaacatggcggaacgcaggagacacaagaagcggatccaggaagttggtgaaccatctaaagaagagaaggctgtggccaagtatcttcgattcaactgtccaacaaagtccaccaatatgatgggtcaccgggttgattattttattgcttcaaaagcagtggactgtcttttggattcaaagtgggcaaaggccaagaaaggagaggaagctttatttacaaccagggagtctgtggttgactactgcaacaggcttttaaagaagcagttttttcaccgagccctaaaagtaatgaaaatgaaatatgataaagacataaagaaagaaaaagataaaggaaaagctgaaagtggaaaagaagaagataaaaagagcaagaaagaaaatataaaggatgagagcaggcgcgccggaacctccttttactttttctcctgcgatgcggaacgtacccaccttctttaaaa

SEQ ID NO: 308276 - DNA, 1162 bp, Homo sapiens
tttaaacgagctgtattaccccgcacagtgcaggagaaaagataattggctcaggtctcggctctgccatctaccacctgtggagccttagataagtcagttcttatctctgtcactcaacggtctcggtcttgtcatcttttacatggaatgtcatgaaatatacagtacattgcaggaactgcctcaggtaaagacttctagggttcagtaggtctcagtcgatccctctgagaaaggccgcaccctaaatgcacagactctgactctaaggggatggggtcggggaatctgcattttagtagcttctcaggtgattcagatgctcagtcaggattgagaaaccaggactcttcccagccctcctgttctctgatccacttctctgcttcctccacgtcctaacgattctccagttcccgcacagcaggagcgaagggaagaggggagagaaggcaccgctaaggaccgctggccccgccaggcggccgacctccccattccaggggcgccagccggcggattacataacgggcctcggggcgcgttctcgcgaggtttccaccgccccctcctcgctccacgtcagagggaaccgggcggagcggccaacatggcggaacgcaggagacacaagaagcggatccagaggctgtggagtaatgtgacagtggcagagagctaaaacttgagccaaactgcctgtttgtaccccacctccaccaattattggctgagtaactttgagcaagttaatttttacctccctgtctgcatcggtaagaaaacatatttacctcaaaaaaaaaaaaagcaagaaaaaagaaaaactttaagattgctgtgaaaataataggaagttggtgaaccatctaaagaagagaaggctgtggccaagtatcttcgattcaactgtccaacaaagtccaccaatatgatgggtcaccgggttgattattttattggtaggattatatcagtaaaatcgtattagtgtacatatgttatgaagttaacctacatttgggatatgtagaagttttaaaagtgctttccaaatgtgattgttctggtgatggacatatggcagttgattattctgttcttttcttttatgattgaaaatgtctataataaaaagataacatgttttctaataaca

SEQ ID NO: 308277 - DNA, 570 bp, Homo sapiens
gaaattagtgaaaccaggaatacatcatgttttgccaaatatattgcacatttttcaatttgatgttgtgcacgtccttttcagagtccaaaaatctcaccttagtatatttaatcattgcttaattgaagataatcattacagtggcacactgaattgcgaagtacttggagaaaaaataacaccaagaaagctgaaaagacattatttggacccatcaaatcatcacttttaatctgttaacatttcttaaactgtttattttctcctttctttattacgtcagctcttgcatttgagacttaacataaagtgaagctgagtcttgattatatgaacccagaaagagtctttatatggataatctcaaacctataatctcttttatacttaaggtacatcattaaaagtgaaaattatattgaatatcactgagttttgacaacttttatataattgactgtaaagtgttttgatttagtggtagagttgactactttttcacgggcatactagttgtaatttctcttgtgttgctaatttatgccttcctttgcttattttattcag

SEQ ID NO: 308278 - DNA, 350 bp, Homo sapiens
agatttgtaaattattattcagcgcatgaatttctcaagtatatgattatactaaattaatattcatatgttgcagggaagttggtgaaccatctaaagaagagaaggctgtggccaagtatcttcgattcaactgtccaacaaagtccaccaatatgatgggtcaccgggttgattattttattggtaggattatatcagtaaaatcgtattagtgtacatatgttatgaagttaacctacatttgggatatgtagaagttttaaaagtgctttccaaatgtgattgttctggtgatggacatatggcagttgattattctgttcttttcttttatgattgaaaatgtc

SEQ ID NO: 308279 - DNA, 1117 bp, Homo sapiens
atccggaccgttagggagcccaatgggcgtcgccgccaggccccgttgcagagcgcgtctagccaataggcagcggcggcgggcgggcgcgggcgacaggcggcgcagctgaggcggagcaggcgctgcggcaggagggaagatggcggacgaggagaagctgccgcccggctgggagaagcgcatgagccgcagctcaggccgagtgtactacttcaaccacatcactaacgccagccagtgggagcggcccagcggcaacagcagcagtggtggcaaaaacgggcagggggagcctgccagggtccgctgctcgcacctgctggtgaagcacagccagtcacggcggccctcgtcctggcggcaggagaagatcacccggaccaaggaggaggccctggagctgatcaacggctacatccagaagatcaagtcgggagaggaggactttgagtctctggcctcacagttcagcgactgcagctcagccaaggccaggggagacctgggtgccttcagcagaggtcagatgcagaagccatttgaagacgcctcgtttgcgctgcggacgggggagatgagcgggcccgtgttcacggattccggcatccacatcatcctccgcactgagtgagggtggggagcccaggcctggcctcggggcagggcagggcggctaggccggccagctcccccttgcccgccagccagtggccgaaccccccactccctgccaccgtcacacagtatttattgttcccacaatggctgggagggggcccttccagattgggggccctggggtccccactccctgtccatccccagttggggctgcgaccgccagattctcccttaaggaattgacttcagcaggggtgggaggctcccagacccagggcagtgtggtgggaggggtgttccaaagagaaggcctggtcagcagagccgccccgtgtccccccaggtgctggaggcagactcgagggccgaattgtttctagttaggccacgctcctctgttcagtcgcaaaggtgaacactcatgcggcccagccatgggccctctgagcaactgtgcagcaccctttcacccccaattaaacccagaaccact

SEQ ID NO: 308280 - DNA, 1008 bp, Homo sapiens
ggccagccccctgcctgggtcagcctctccctgcctgctgctctcctctggcccatccagcttgtatgtagattttccctcacgtgtgtgtgtgtgtgtgcgtgtgtgtgctggtgagagtgacagcgggagcagggatgtgagacctgcagggtggcagggctcatggatgactggcggggtgcattaagtgctcatgctcgtgaaaggcacctcttcttgggtgtgggtgaggacaggtgtgactgcgcatgcaggtatgtgtgaggagaggggttgtggggagcatgtgcgcctgtgaggggaggctttccaactgaagtgctgcctcccccgctggccagctctggagtcctccatcctgtctggtcaggccccccccaacccctgacctggcactcccattccgttccatgtccacaggctacatccagaagatcaagtcgggagaggaggactttgagtctctggcctcacagttcagcgactgcagctcagccaaggccaggggagacctgggtgccttcagcagaggtgcgcaaggaatgggcctcaccaggttgggggacccttaccaccctgaggggtagaggccaggagggtctgggcattgggctcccaggtgccacaccggccttcggggtccagcaggtggcagcacagccccttcctcaggcttcagaggctgctctgctgggcagggccagggccacacagggaggggggctgcagcactttcttcctggcatcatctctaccctggggggcatggtctcttgtgtgtctgtgcacagatgtcctcatcccaggcccaccaaggtgggtacatcctgtcctctgcctcttcctttttgtggtttaaggttgagggccctgagagtcccagggcctgtcccccagaatccctctcaaaggtggggaaaccaggggtgagaggaggtggccctgagtttaggcctgtctggccaggacagtggaaatcagggacagaggggactaggcctcctc

SEQ ID NO: 308281 - DNA, 1525 bp, Homo sapiens
atccggaccgttagggagcccaatgggcgtcgccgccaggccccgttgcagagcgcgtctagccaataggcagcggcggcgggcgggcgcgggcgacaggcggcgcagctgaggcggagcaggcgctgcggcaggagggaagatggcggacgaggagaagctgccgcccggctgggagaagcgcatgagccgcagctcaggccgagtgtactacttcaaccacatcactaacgccagccagtgggagcggcccagcggcaacagcagcagtggtggcaaaaacgggcagggggagcctgccagggtccgctgctcgcacctgctggtgaagcacagccagtcacggcggccctcgtcctggcggcaggagaagatcacccggaccaaggaggaggccctggagctgatcaacggctacatccagaagatcaagtcgggagaggaggactttgagtctctggcctcacagttcagcgactgcagctcagccaaggccaggggagacctgggtgccttcagcagaggtcagatgcagaagccatttgaagacgcctcgtttgcgctgcggacgggggagatgagcgggcccgtgttcacggattccggcatccacatcatcctccgcactgagtgagggtggggagcccaggcctggcctcggggcagggcagggcggctaggccggccagctcccccttgcccgccagccagtggccgaaccccccactccctgccaccgtcacacagtatttattgttcccacaatggctgggagggggcccttccagattgggggccctggggtccccactccctgtccatccccagttggggctgcgaccgccagattctcccttaaggaattgacttcagcaggggtgggaggctcccagacccagggcagtgtggtgggaggggtgttccaaagagaaggcctggtcagcagagccgccccgtgtccccccaggtgctggaggcagactcgagggccgaattgtttctagttaggccacgctcctctgttcagtcgcaaaggtgaacactcatgcggcccagccatgggccctctgagcaactgtgcagcaccctttcacccccaattaaacccagaaccactaaaaaaaaaaacaacaaacgaaacagaaacaacaacaacagactcacacaaaagcgaaacaaagacctagcaatgaagacgaagcaaacacaagcgcaccgagagagggcgcgagcacagccacagaagaacagtcagccggcagggagacaacaaagaggcgagcacagcgccccgcgtgcacagcaagagggggcgcacaaagagggcggaagcacaaaagcgcgagcgaaggaggggccacgcgcagcgaaacgcagccgccgccgagacgcgagcacacaccaacccaccaaagcggacccagccccagagagcagccacccccaccacgcgagcagacgaaacaccacgagcgacacaaccatcccaagcacgcataacgcaccgacccacaaagaacaaact

SEQ ID NO: 308282 - DNA, 1899 bp, Homo sapiens
atccggaccgttagggagcccaatgggcgtcgccgccaggccccgttgcagagcgcgtctagccaataggcagcggcggcgggcgggcgcgggcgacaggcggcgcagctgaggcggagcaggcgctgcggcaggagggaagatggcggacgaggagaagctgccgcccggctgggagaagcgcatgagccgcagctcaggccgagtgtactacttcaaccacatcactaacgccagccagtgggagcggcccagcggcaacagcagcagtggtggcaaaaacgggcagggggagcctgccagggtccgctgctcgcacctgctggtgaagcacagccagtcacggcggccctcgtcctggcggcaggagaagatcacccggaccaaggaggaggccctggagctgatcaacggctacatccagaagatcaagtcgggagaggaggactttgagtctctggcctcacagttcagcgactgcagctcagccaaggccaggggagacctgggtgccttcagcagaggtcagatgcagaagccatttgaagacgcctcgtttgcgctgcggacgggggagatgagcgggcccgtgttcacggattccggcatccacatcatcctccgcactgagtgagggtggggagcccaggcctggcctcggggcagggcagggcggctaggccggccagctcccccttgcccgccagccagtggccgaaccccccactccctgccaccgtcacacagtatttattgttcccacaatggctgggagggggcccttccagattgggggccctggggtccccactccctgtccatccccagttggggctgcgaccgccagattctcccttaaggaattgacttcagcaggggtgggaggctcccagacccagggcagtgtggtgggaggggtgttccaaagagaaggcctggtcagcagagccgccccgtgtccccccaggtgctggaggcagactcgagggccgaattgtttctagttaggccacgctcctctgttcagtcgcaaaggtgaacactcatgcggcccagccatgggccctctgagcaactgtgcagcaccctttcacccccaattaaacccagaaccactaaaaaaaaaaaaaaaaaaaaaaaaaaaaaaaaaaaaaaaaaaaaaaaaaaaaacaaaggggggggggcgcgagccaaaaaaatacccccacaggggggcgccccagtgtgacgcgacccacggagttttggtaacaaggggggcccacaaggggagggggcgcatttaagccacagggagcggggcccccgggataaaacaacggtggtggtggagaacacaccgcgcacggggaaaccttgggagaaaagaccccccacacgcgggggggggacacaacgtgcggcacacaccccgagagagagattgaaaggagaccagagggggggagaatagagcgcctgggagaggggcgaacagaggtgtgtacacacaaggcggaaaaatatcatcgtgggtttagaagaaattgtgcacgggagaatagatgggaagaattttaccgcggggggattatatttattataataggaggaaaaacaacgagagaagacacggagcacggggacaacaagaaaagaggggggagggggcgagggaaacgagcaccagtgcgcgggagagagaacgagggggagcccgacggcggagaagagcccacaggccacctacgctacccacacgacggagacgcggcacggacccgcacacgagggaggaacgaaagcgccgagagaaggacaaagaccagagcgcccgacaagcggaagagcgaagagaggggagggaagcaacgccgagcggcgcgggagaaggaggcgagcccagcgggcggagacgaa

SEQ ID NO: 308283 - DNA, 2590 bp, Homo sapiens
atccggaccgttagggagcccaatgggcgtcgccgccaggccccgttgcagagcgcgtctagccaataggcagcggcggcgggcgggcgcgggcgacaggcggcgcagctgaggcggagcaggcgctgcggcaggagggaagatggcggacgaggagaagctgccgcccggctgggagaagcgcatgagccgcagctcaggtgccgcgggggtcggggctggggcgggactgcgcgggcccgcgtaagcagggctcgagctcgccccttgggcgcggcggcagcgctgcctccctcccatggggtcctggctcttccgcgtcgtccccggggtaacggccccggcccgccctgttgtggggactgcgagcctcaggagccgccgggaagcctgaggaagctgaggcagggggctgggcgggtgagggtccggggagtccggggcgatggccctggccctgccggcccggctgatacctctcggcctaatgcacctgacaccccgggggacgtctctgcaccttgctgggcccgggggcacccctgggagggagacaccccagtaccctgcaaagggcgtagggtgttgcccggcctcgggtccacaacctacccctgctaacacccctactgtgtacacctaatgctgagtctgcgacatcgcccgtgacattctgccagacgatggcccctgtgcttaggcccgatttaagggttagccacaatgataatattgccagtaacagggcatgtttttctctgtgtcaagcgctttaagttctctctgaattgccgcaactctgggagccaggtagttattacttccaccttaccagcaaggaaactgaggtcagaaaactgaaggaactcgtccaagatcattcatttcaggggccgggggttggattaggacctaggcagtttgcctacaaatccccctccccgtgtcactgcaaactcctgaggagcaggcccagcatctgtgggcaggtcccgagtcactctgctgcctctagagcccatagcaatcgcatttgcaataataattctccttggttgagtgccaggttctggtgaactgtttggatacatggactctcctcattaaccccatgaggtttgatctccttattctctattccccatttttcagatgagaaaactgaggtgcagggagattagagcccattgccaaggttttagagtgagtcagtagctcagctgcatttgcacctggaacccgcgctctcgcccaccctgctctagccctggcctgtggctgggacctccagcataaaccggatgctctgcccagctctgggcccatttctgctgtttctgctcagttcaaccctgatggcttcctttatgggtgacactccatgtcacccaggcgaactgtcagcctttggagtggcacccagtagggtctttacttccagtttcttgttcacagtcttcactccttcatacccctcactccctgggtaacatcgggccaccagtaatgctggttcctagctctgcaacaccatgcacggtgtagtagctaagagcagagctttcgggtgtgaagtacctgagtacagttcctgccttcccctgtgtgtgcctggaacagagtaaacactcaggaagcgttacccactgctgccattcccagagatgcaaaaggccgagtgtactacttcaaccacatcactaacgccagccagtgggagcggcccagcggcaacagcagcagtggtggcaaaaacgggcagggggagcctgccagggtccgctgctcgcacctgctggtgaagcacagccagtcacggcggccctcgtcctggcggcaggagaagatcacccggaccaaggaggaggccctggagctgatcaacggctacatccagaagatcaagtcgggagaggaggactttgagtctctggcctcacagttcagcgactgcagctcagccaaggccaggggagacctgggtgccttcagcagaggtcagatgcagaagccatttgaagacgcctcgtttgcgctgcggacgggggagatgagcgggcccgtgttcacggattccggcatccacatcatcctccgcactgagtgagggtggggagcccaggcctggcctcggggcagggcagggcggctaggccggccagctcccccttgcccgccagccagtggccgaaccccccactccctgccaccgtcacacagtatttattgttcccacaatggctgggagggggcccttccagattgggggccctggggtccccactccctgtccatccccagttggggctgcgaccgccagattctcccttaaggaattgacttcagcaggggtgggaggctcccagacccagggcagtgtggtgggaggggtgttccaaagagaaggcctggtcagcagagccgccccgtgtccccccaggtgctggaggcagactcgagggccgaattgtttctagttaggccacgctcctctgttcagtcgcaaaggtgaacactcatgcggcccagccatgggccctctgagcaactgtgcagcaccctttcacccccaattaaacccagaaccact

SEQ ID NO: 308284 - DNA, 1380 bp, Homo sapiens
caatgaccctaaggtaggaactgttatctccattttgcaggtgagaacaccaaggcccagggaagatatatcacatttgaacccagattcagatttgaatccaggtggcctggctgctgagtgcatggtttgagtcactccctgtcccccagcttcctctgttccatcactctgggttattttcctccttgaagttatcagggattgatactatcctgtgtttcatttgcttgtttagcacctgtctgctctcacctagaatgttagctctctaagggcagggactgtatcctgccacattggcccacgtctggagagcctgtggacatggtggatacaccatggatttgttgaatgaaggcgccccctgcaagccaggccctcaccctggcttctggctgtgggcccaggggtgtcctgggagcacaaccctagctgaattcctgcctgccctcccctccaggccgagtgtactacttcaaccacatcactaacgccagccagtgggagcggcccagcggcaacagcagcagtggtggcaaaaacgggcagggggagcctgccagggtccgctgctcgcacctgctggtgaagcacagccagtcacggcggccctcgtcctggcggcaggagaagatcacccggaccaaggaggaggccctggagctgatcaacggctacatccagaagatcaagtcgggagaggaggactttgagtctctggcctcacagttcagcgactgcagctcagccaaggccaggggagacctgggtgccttcagcagaggtcagatgcagaagccatttgaagacgcctcgtttgcgctgcggacgggggagatgagcgggcccgtgttcacggattccggcatccacatcatcctccgcactgagtgagggtggggagcccaggcctggcctcggggcagggcagggcggctaggccggccagctcccccttgcccgccagccagtggccgaaccccccactccctgccaccgtcacacagtatttattgttcccacaatggctgggagggggcccttccagattgggggccctggggtccccactccctgtccatccccagttggggctgcgaccgccagattctcccttaaggaattgacttcagcaggggtgggaggctcccagacccagggcagtgtggtgggaggggtgttccaaagagaaggcctggtcagcagagccgccccgtgtccccccaggtgctggaggcagactcgagggccgaattgtttctagttaggccacgctcctctgttcagtcgcaaaggtgaacactcatgcggcccagccatgggccctctgagcaactgtgcagcaccctttcacccccaattaaacccagaaccact

SEQ ID NO: 308285 - DNA, 1638 bp, Homo sapiens
atccggaccgttagggagcccaatgggcgtcgccgccaggccccgttgcagagcgcgtctagccaataggcagcggcggcgggcgggcgcgggcgacaggcggcgcagctgaggcggagcaggcgctgcggcaggagggaagatggcggacgaggagaagctgccgcccggctgggagaagcgcatgagccgcagctcagatgagaaaactgaggtgcagggagattagagcccattgccaaggttttagagtgagtcagtagctcagctgcatttgcacctggaacccgcgctctcgcccaccctgctctagccctggcctgtggctgggacctccagcataaaccggatgctctgcccagctctgggcccatttctgctgtttctgctcagttcaaccctgatggcttcctttatgggtgacactccatgtcacccaggcgaactgtcagcctttggagtggcacccagtagggtctttacttccagtttcttgttcacagtcttcactccttcatacccctcactccctgggtaacatcgggccaccagtaatgctggttcctagctctgcaacaccatgcacggtgtagtagctaagagcagagctttcgggtgtgaagtacctgagtacagttcctgccttcccctgtgtgtgcctggaacagagtaaacactcaggaagcgttacccactgctgccattcccagagatgcaaaaggccgagtgtactacttcaaccacatcactaacgccagccagtgggagcggcccagcggcaacagcagcagtggtggcaaaaacgggcagggggagcctgccagggtccgctgctcgcacctgctggtgaagcacagccagtcacggcggccctcgtcctggcggcaggagaagatcacccggaccaaggaggaggccctggagctgatcaacggctacatccagaagatcaagtcgggagaggaggactttgagtctctggcctcacagttcagcgactgcagctcagccaaggccaggggagacctgggtgccttcagcagaggtcagatgcagaagccatttgaagacgcctcgtttgcgctgcggacgggggagatgagcgggcccgtgttcacggattccggcatccacatcatcctccgcactgagtgagggtggggagcccaggcctggcctcggggcagggcagggcggctaggccggccagctcccccttgcccgccagccagtggccgaaccccccactccctgccaccgtcacacagtatttattgttcccacaatggctgggagggggcccttccagattgggggccctggggtccccactccctgtccatccccagttggggctgcgaccgccagattctcccttaaggaattgacttcagcaggggtgggaggctcccagacccagggcagtgtggtgggaggggtgttccaaagagaaggcctggtcagcagagccgccccgtgtccccccaggtgctggaggcagactcgagggccgaattgtttctagttaggccacgctcctctgttcagtcgcaaaggtgaacactcatgcggcccagccatgggccctctgagcaactgtgcagcaccctttcacccccaattaaacccagaaccact

SEQ ID NO: 308286 - DNA, 1359 bp, Homo sapiens
ctcctggcatcggtaaatgttctgtcattgttagtggtcactgtcattgctgttgttggttgtggtagcacagggcccagcacagagtgtacactcggtcagtattggctgttgttttactctctcatcacttggtccagttggcctgtaggatgttattttcctccttgaagttatcagggattgatactatcctgtgtttcatttgcttgtttagcacctgtctgctctcacctagaatgttagctctctaagggcagggactgtatcctgccacattggcccacgtctggagagcctgtggacatggtggatacaccatggatttgttgaatgaaggcgccccctgcaagccaggccctcaccctggcttctggctgtgggcccaggggtgtcctgggagcacaaccctagctgaattcctgcctgccctcccctccaggccgagtgtactacttcaaccacatcactaacgccagccagtgggagcggcccagcggcaacagcagcagtggtggcaaaaacgggcagggggagcctgccagggtccgctgctcgcacctgctggtgaagcacagccagtcacggcggccctcgtcctggcggcaggagaagatcacccggaccaaggaggaggccctggagctgatcaacggctacatccagaagatcaagtcgggagaggaggactttgagtctctggcctcacagttcagcgactgcagctcagccaaggccaggggagacctgggtgccttcagcagaggtcagatgcagaagccatttgaagacgcctcgtttgcgctgcggacgggggagatgagcgggcccgtgttcacggattccggcatccacatcatcctccgcactgagtgagggtggggagcccaggcctggcctcggggcagggcagggcggctaggccggccagctcccccttgcccgccagccagtggccgaaccccccactccctgccaccgtcacacagtatttattgttcccacaatggctgggagggggcccttccagattgggggccctggggtccccactccctgtccatccccagttggggctgcgaccgccagattctcccttaaggaattgacttcagcaggggtgggaggctcccagacccagggcagtgtggtgggaggggtgttccaaagagaaggcctggtcagcagagccgccccgtgtccccccaggtgctggaggcagactcgagggccgaattgtttctagttaggccacgctcctctgttcagtcgcaaaggtgaacactcatgcggcccagccatgggccctctgagcaactgtgcagcaccctttcacccccaattaaacccagaaccact

SEQ ID NO: 308287 - DNA, 1063 bp, Homo sapiens
atccggaccgttagggagcccaatgggcgtcgccgccaggccccgttgcagagcgcgtctagccaataggcagcggcggcgggcgggcgcgggcgacaggcggcgcagctgaggcggagcaggcgctgcggcaggagggaagatggcggacgaggagaagctgccgcccggctgggagaagcgcatgagccgcagctcaggccgagtgtactacttcaaccacatcactaacgccagccagtgggagcggcccagcggcaacagcagcagtggtggcaacagccagtcacggcggccctcgtcctggcggcaggagaagatcacccggaccaaggaggaggccctggagctgatcaacggctacatccagaagatcaagtcgggagaggaggactttgagtctctggcctcacagttcagcgactgcagctcagccaaggccaggggagacctgggtgccttcagcagaggtcagatgcagaagccatttgaagacgcctcgtttgcgctgcggacgggggagatgagcgggcccgtgttcacggattccggcatccacatcatcctccgcactgagtgagggtggggagcccaggcctggcctcggggcagggcagggcggctaggccggccagctcccccttgcccgccagccagtggccgaaccccccactccctgccaccgtcacacagtatttattgttcccacaatggctgggagggggcccttccagattgggggccctggggtccccactccctgtccatccccagttggggctgcgaccgccagattctcccttaaggaattgacttcagcaggggtgggaggctcccagacccagggcagtgtggtgggaggggtgttccaaagagaaggcctggtcagcagagccgccccgtgtccccccaggtgctggaggcagactcgagggccgaattgtttctagttaggccacgctcctctgttcagtcgcaaaggtgaacactcatgcggcccagccatgggccctctgagcaactgtgcagcaccctttcacccccaattaaacccagaaccact

SEQ ID NO: 308288 - DNA, 1142 bp, Homo sapiens
atccggaccgttagggagcccaatgggcgtcgccgccaggccccgttgcagagcgcgtctagccaataggcagcggcggcgggcgggcgcgggcgacaggcggcgcagctgaggcggagcaggcgctgcggcaggagggaagatggcggacgaggagaagctgccgcccggctgggagaagcgcatgagccgcagctcaggccgagtgtactacttcaaccacatcactaacgccagccagtgggagcggcccagcggcaacagcagcagtggtggcaaaaacgggcagggggagcctgccagggtccgctgctcgcacctgctggtgaagcacagccagtcacggcggccctcgtcctggcggcaggagaagatcacccggaccaaggaggaggccctggagctgatcaacggctacatccagaagatcaagtcgggagaggaggactttgagtctctggcctcacagttcagcgactgcagctcagccaaggccaggggagacctgggtgccttcagcagaggtgcgcaaggaatgggcctcaccaggtcagatgcagaagccatttgaagacgcctcgtttgcgctgcggacgggggagatgagcgggcccgtgttcacggattccggcatccacatcatcctccgcactgagtgagggtggggagcccaggcctggcctcggggcagggcagggcggctaggccggccagctcccccttgcccgccagccagtggccgaaccccccactccctgccaccgtcacacagtatttattgttcccacaatggctgggagggggcccttccagattgggggccctggggtccccactccctgtccatccccagttggggctgcgaccgccagattctcccttaaggaattgacttcagcaggggtgggaggctcccagacccagggcagtgtggtgggaggggtgttccaaagagaaggcctggtcagcagagccgccccgtgtccccccaggtgctggaggcagactcgagggccgaattgtttctagttaggccacgctcctctgttcagtcgcaaaggtgaacactcatgcggcccagccatgggccctctgagcaactgtgcagcaccctttcacccccaattaaacccagaaccact

SEQ ID NO: 308289 - DNA, 2615 bp, Homo sapiens
atccggaccgttagggagcccaatgggcgtcgccgccaggccccgttgcagagcgcgtctagccaataggcagcggcggcgggcgggcgcgggcgacaggcggcgcagctgaggcggagcaggcgctgcggcaggagggaagatggcggacgaggagaagctgccgcccggctgggagaagcgcatgagccgcagctcaggtgccgcgggggtcggggctggggcgggactgcgcgggcccgcgtaagcagggctcgagctcgccccttgggcgcggcggcagcgctgcctccctcccatggggtcctggctcttccgcgtcgtccccggggtaacggccccggcccgccctgttgtggggactgcgagcctcaggagccgccgggaagcctgaggaagctgaggcagggggctgggcgggtgagggtccggggagtccggggcgatggccctggccctgccggcccggctgatacctctcggcctaatgcacctgacaccccgggggacgtctctgcaccttgctgggcccgggggcacccctgggagggagacaccccagtaccctgcaaagggcgtagggtgttgcccggcctcgggtccacaacctacccctgctaacacccctactgtgtacacctaatgctgagtctgcgacatcgcccgtgacattctgccagacgatggcccctgtgcttaggcccgatttaagggttagccacaatgataatattgccagtaacagggcatgtttttctctgtgtcaagcgctttaagttctctctgaattgccgcaactctgggagccaggtagttattacttccaccttaccagcaaggaaactgaggtcagaaaactgaaggaactcgtccaagatcattcatttcaggggccgggggttggattaggacctaggcagtttgcctacaaatccccctccccgtgtcactgcaaactcctgaggagcaggcccagcatctgtgggcaggtcccgagtcactctgctgcctctagagcccatagcaatcgcatttgcaataataattctccttggttgagtgccaggttctggtgaactgtttggatacatggactctcctcattaaccccatgaggtttgatctccttattctctattccccatttttcagatgagaaaactgaggtgcagggagattagagcccattgccaaggttttagagtgagtcagtagctcagctgcatttgcacctggaacccgcgctctcgcccaccctgctctagccctggcctgtggctgggacctccagcataaaccggatgctctgcccagctctgggcccatttctgctgtttctgctcagttcaaccctgatggcttcctttatgggtgacactccatgtcacccaggcgaactgtcagcctttggagtggcacccagtagggtctttacttccagtttcttgttcacagtcttcactccttcatacccctcactccctgggtaacatcgggccaccagtaatgctggttcctagctctgcaacaccatgcacggtgtagtagctaagagcagagctttcgggtgtgaagtacctgagtacagttcctgccttcccctgtgtgtgcctggaacagagtaaacactcaggaagcgttacccactgctgccattcccagagatgcaaaaggccgagtgtactacttcaaccacatcactaacgccagccagtgggagcggcccagcggcaacagcagcagtggtggcaaaaacgggcagggggagcctgccagggtccgctgctcgcacctgctggtgaagcacagccagtcacggcggccctcgtcctggcggcaggagaagatcacccggaccaaggaggaggccctggagctgatcaacggctacatccagaagatcaagtcgggagaggaggactttgagtctctggcctcacagttcagcgactgcagctcagccaaggccaggggagacctgggtgccttcagcagaggtgcgcaaggaatgggcctcaccaggtcagatgcagaagccatttgaagacgcctcgtttgcgctgcggacgggggagatgagcgggcccgtgttcacggattccggcatccacatcatcctccgcactgagtgagggtggggagcccaggcctggcctcggggcagggcagggcggctaggccggccagctcccccttgcccgccagccagtggccgaaccccccactccctgccaccgtcacacagtatttattgttcccacaatggctgggagggggcccttccagattgggggccctggggtccccactccctgtccatccccagttggggctgcgaccgccagattctcccttaaggaattgacttcagcaggggtgggaggctcccagacccagggcagtgtggtgggaggggtgttccaaagagaaggcctggtcagcagagccgccccgtgtccccccaggtgctggaggcagactcgagggccgaattgtttctagttaggccacgctcctctgttcagtcgcaaaggtgaacactcatgcggcccagccatgggccctctgagcaactgtgcagcaccctttcacccccaattaaacccagaaccact

SEQ ID NO: 308290 - DNA, 1055 bp, Homo sapiens
  misc_feature (913)..(913): n is a, c, g, or t
  misc_feature (972)..(972): n is a, c, g, or t
  misc_feature (982)..(982): n is a, c, g, or t
  misc_feature (1001)..(1001): n is a, c, g, or t
  misc_feature (1021)..(1021): n is a, c, g, or t
  misc_feature (1045)..(1045): n is a, c, g, or t
atccggaccgttagggagcccaatgggcgtcgccgccaggccccgttgcagagcgcgtctagccaataggcagcggcggcgggcgggcgcgggcgacaggcggcgcagctgaggcggagcaggcgctgcggcaggagggaagatggcggacgaggagaagctgccgcccggctgggagaagcgcatgagccgcagctcaggccgagtgtactacttcaaccacatcactaacgccagccagtgggagcggcccagcggcaacagcagcagtggtggcaaaaacgggcagggggagcctgccagggtccgctgctcgcacctgctggtgaagcacagccagtcacggcggccctcgtcctggcggcaggagaagatcacccggaccaaggaggaggccctggagctgatcaacggctacatccagaagatcaagtcgggagaggaggactttgagtctctggcctcacagttcagcgactgcagctcagccaaggccaggggagacctgggtgccttcagcagaggtcagatgcagaagccatttgaagacgcctcgtttgcgctgcggacgggggagatgagcgggcccgtgttcacggattccggcatccacatcatcctccgcactgagtgagggtggggagcccaggcctggcctcggggcagggcagggcggctaggccggccagctcccccttgcccgccagccagtggccgaaccccccactccctgccaccgtcacacagtatttattgttcccacaatggctgggagggggcccttccagattgggggccctggggtccccactccctgtccatccccagttggggctgcgaccgccagattctcccttaaggaattgacttcagcaggggtgggaggctccccaaaaccaagggccattttttntttggaaagggtttttcccaaaaaaaaaaggcctggttccaccaaaaaccccccccttnttccccccangtttcttggaaagccaaanctccaaagggcccaaatttnttttcctatttttgggcccccctncctccttttt

SEQ ID NO: 308291 - DNA, 896 bp, Homo sapiens
atccggaccgttagggagcccaatgggcgtcgccgccaggccccgttgcagagcgcgtctagccaataggcagcggcggcgggcgggcgcgggcgacaggcggcgcagctgaggcggagcaggcgctgcggcaggagggaagatggcggacgaggagaagctgccgcccggctgggagaagcgcatgagccgcagctcaggccgagtgtactacttcaaccacatcactaacgccagccagtgggagcggcccagcggcaacagcagcagtggtggcaaaaacgggcagggggagcctgccagggtccgctgctcgcacctgctggtgaagcacagccagtcacggcggccctcgtcctggcggcaggagaagatcacccggaccaaggaggaggccctggagctgatcaacggctacatccagaagatcaagtcgggagaggaggactttgagtctctggcctcacagttcagcgactgcagctcagccaaggccaggggagacctgggtgccttcagcagaggtcagatgcagaagccatttgaagacgcctcgtttgcgctgcggacgggggagatgagcgggcccgtgttcacggattccggcatccacatcatcctccgcactgagtgagggtggggagcccaggcctggcctcggggcagggcagggcggctaggccggccagctcccccttgcccgccagccagtggccgaaccccccactccctgccaccgtcacacagtgctggaggcagactcgagggccgaattgtttctagttaggccacgctcctctgttcagtcgcaaaggtgaacactcatgcggcccagccatgggccctctgagcaactgtgcagcaccctttcacccccaattaaacccagaaccact

SEQ ID NO: 308292 - DNA, 786 bp, Homo sapiens
atccggaccgttagggagcccaatgggcgtcgccgccaggccccgttgcagagcgcgtctagccaataggcagcggcggcgggcgggcgcgggcgacaggcggcgcagctgaggcggagcaggcgctgcggcaggagggaagatggcggacgaggagaagctgccgcccggctgggagaagcgcatgagccgcagctcaggccgagtgtactacttcaaccacatcactaacgccagccagtgggagcggcccagcggcaacagcagcagtggtggcaaaaacgggcagggggagcctgccagggtccgctgctcgcacctgctggtgaagcacagccagtcacggcggccctcgtcctggcggcaggagaagatcacccggaccaaggaggaggccctggagctgatcaacggctacatccagaagatcaagtcgggagaggaggactttgagtctctggcctcacagttcagcgactgcagctcagccaaggccaggggagacctgggtgccttcagcagaggtcagatgcagaagccatttgaagacgcctcgtttgcgctgcggacgggggagatgagcgggcccgtgttcacggattccggcatccacatcatcctccgcactgagtgagggtgctggaggcagactcgagggccgaattgtttctagttaggccacgctcctctgttcagtcgcaaaggtgaacactcatgcggcccagccatgggccctctgagcaactgtgcagcaccctttcacccccaattaaacccagaaccact

SEQ ID NO: 308293 - DNA, 653 bp, Homo sapiens
atccggaccgttagggagcccaatgggcgtcgccgccaggccccgttgcagagcgcgtctagccaataggcagcggcggcgggcgggcgcgggcgacaggcggcgcagctgaggcggagcaggcgctgcggcaggagggaagatggcggacgaggagaagctgccgcccggctgggagaagcgcatgagccgcagctcaggccgagtgtactacttcaaccacatcactaacgccagccagtgggagcggcccagcggcaacagcagcagtggtggcaaaaacgggcagggggagcctgccagggtccgctgctcgcacctgctggtgaagcacagccagtcacggcggccctcgtcctggcggcaggagaagatcacccggaccaaggaggaggccctggagctgatcaacggctacatccagaagatcaagtcgggagaggaggactttgagtctctggcctcacagttcaggtcagcagagccgccccgtgtccccccaggtgctggaggcagactcgagggccgaattgtttctagttaggccacgctcctctgttcagtcgcaaaggtgaacactcatgcggcccagccatgggccctctgagcaactgtgcagcaccctttcacccccaattaaacccagaaccact

SEQ ID NO: 308294 - DNA, 998 bp, Homo sapiens
atccggaccgttagggagcccaatgggcgtcgccgccaggccccgttgcagagcgcgtctagccaataggcagcggcggcgggcgggcgcgggcgacaggcggcgcagctgaggcggagcaggcgctgcggcaggagggaagatggcggacgaggagaagctgccgcccggctgggagaagcgcatgagccgcagctcaggccgagtgtactacttcaaccacatcactaacgccagccagtgggagcggcccagcggcaacagcagcagtggtggcaaaaacgggcagggggagcctgccagggtccgctgctcgcacctgctggtgaagcacagccagtcacggcggccctcgtcctggcggcaggagaagatcacccggaccaaggaggaggccctggagctgatcaacggctacatccagaagatcaagtcgggagaggaggactttgagtctctggcctcacagttcagcgactgcagctcagccaaggccaggggagacctgggtgccttcagcagaggtgcgcaaggaatgggcctcaccaggttgggggacccttaccaccctgaggggtagaggccaggagggtctgggcattgggctcccaggtgccacaccggccttcggggtccagcaggtggcagcacagccccttcctcaggcttcagaggctgctctgctgggcagggccagggccacacagggaggggggctgcagcactttcttcctggcatcatctctaccctggggggcatggtctcttgtgtgtctgtgcacagatgtcctcatcccaggcccaccaaggtgggtacatcctgtcctctgcctcttcctttttgtggtttaaggttgagggccctgagagtcccagggcctgtcccccagaatccctctcaaaggtggggaaaccaggggtgagaggaggtggccctgagtttaggcctgtctggccaggacagtggaaatcagggacagaggggactaggcctcctc

SEQ ID NO: 308295 - DNA, 672 bp, Homo sapiens
atccggaccgttagggagcccaatgggcgtcgccgccaggccccgttgcagagcgcgtctagccaataggcagcggcggcgggcgggcgcgggcgacaggcggcgcagctgaggcggagcaggcgctgcggcaggagggaagatggcggacgaggagaagctgccgcccggctgggagaagcgcatgagccgcagctcaggccgagtgtactacttcaaccacatcactaacgccagccagtgggagcggcccagcggcaacagcagcagtggtggcaaaaacgggcagggggagcctgccagggtccgctgctcgcacctgctggtgaagcacagccagtcacggcggccctcgtcctggcggcaggagaagatcacccggaccaaggaggaggccctggagctgatcaacggctacatccagaagatcaagtcgggagaggaggactttgagtctctggcctcacagttcagcgactgcagctcagccaaggtcagcagagccgccccgtgtccccccaggtgctggaggcagactcgagggccgaattgtttctagttaggccacgctcctctgttcagtcgcaaaggtgaacactcatgcggcccagccatgggccctctgagcaactgtgcagcaccctttcacccccaattaaacccagaaccact

SEQ ID NO: 308296 - DNA, 1733 bp, Homo sapiens
atccggaccgttagggagcccaatgggcgtcgccgccaggccccgttgcagagcgcgtctagccaataggcagcggcggcgggcgggcgcgggcgacaggcggcgcagctgaggcggagcaggcgctgcggcaggagggaagatggcggacgaggagaagctgccgcccggctgggagaagcgcatgagccgcagctcaggtgccgcgggggtcggggctggggcgggactgcgcgggcccgcgtaagcagggctcgagctcgccccttgggcgcggcggcagcgctgcctccctcccatggggtcctggctcttccgcgtcgtccccggggtaacggccccggcccgccctgttgtggggactgcgagcctcaggagccgccgggaagcctgaggaagctgaggcagggggctgggcgggtgagggtccggggagtccggggcgatggccctggccctgccggcccggctgatacctctcggcctaatgcacctgacaccccgggggacgtctctgcaccttgctgggcccgggggcacccctgggagggagacaccccagtaccctgcaaagggcgtagggtgttgcccggcctcgggtccacaacctacccctgctaacacccctactgtgtacacctaatgctgagtctgcgacatcgcccgtgacattctgccagacgatggcccctgtgcttaggcccgatttaagggttagccacaatgataatattgccagtaacagggcatgtttttctctgtgtcaagcgctttaagttctctctgaattgccgcaactctgggagccaggtagttattacttccaccttaccagcaaggaaactgaggtcagaaaactgaaggaactcgtccaagatcattcatttcaggggccgggggttggattaggacctaggcagtttgcctacaaatccccctccccgtgtcactgcaaactcctgaggagcaggcccagcatctgtgggcaggtcccgagtcactctgctgcctctagagcccatagcaatcgcatttgcaataataattctccttggttgagtgccaggttctggtgaactgtttggatacatggactctcctcattaaccccatgaggtttgatctccttattctctattccccatttttcagatgagaaaactgaggtgcagggagattagagcccattgccaaggttttagagtgagtcagtagctcagctgcatttgcacctggaacccgcgctctcgcccaccctgctctagccctggcctgtggctgggacctccagcataaaccggatgctctgcccagctctgggcccatttctgctgtttctgctcagttcaaccctgatggcttcctttatgggtgacactccatgtcacccaggcgaactgtcagcctttggagtggcacccagtagggtctttacttccagtttcttgttcacagtcttcactccttcatacccctcactccctgggtaacatcgggccaccagtaatgctggttcctagctctgcaacaccatgcacggtgtagtagctaagagcagagctttcgggtgtgaagtacctgagtacagttcctgccttcccctgtgtgtgcctggaacagagtaaacactcaggaagcgttacccactgctgccattcccagagatgcaaaaggtgaggtctccgttttgccatctatacaatagagataataaaggctatcccactcttaat

SEQ ID NO: 308297 - DNA, 839 bp, Homo sapiens
atccggaccgttagggagcccaatgggcgtcgccgccaggccccgttgcagagcgcgtctagccaataggcagcggcggcgggcgggcgcgggcgacaggcggcgcagctgaggcggagcaggcgctgcggcaggagggaagatggcggacgaggagaagctgccgcccggctgggagaagcgcatgagccgcagctcagagtaaacactcaggaagcgttacccactgctgccattcccagagatgcaaaaggccgagtgtactacttcaaccacatcactaacgccagccagtgggagcggcccagcggcaacagcagcagtggtggcaaaaacgggcagggggagcctgccagggtccgctgctcgcacctgctggtgaagcacagccagtcacggcggccctcgtcctggcggcaggagaagatcacccggaccaaggaggaggccctggagctgatcaacggctacatccagaagatcaagtcgggagaggaggactttgagtctctggcctcacagttcagcgactgcagctcagccaaggccaggggagacctgggtgccttcagcagaggtcagatgcagaagccatttgaagacgcctcgtttgcgctgcggacgggggagatgagcgggcccgtgttcacggattccggcatccacatcatcctccgcactgagtgagggtgctggaggcagactcgagggccgaattgtttctagttaggccacgctcctctgttcagtcgcaaaggtgaacactcatgcggcccagccatgggccctctgagcaactgtgcagcaccctttcacccccaattaaacccagaaccact

SEQ ID NO: 308298 - DNA, 652 bp, Homo sapiens
  misc_feature (481)..(481): n is a, c, g, or t
ggtggccatgggaaaacatgtgtacagctgagtgggcagcacagcctgctggagcagccccagtgggattcagctgtggccatgggaaaacatgtgtacatctttggtggaatgactcctgcaggagcactggacacaatgtaccagtatcacacagaagagcagcattggaccttgcttaaatttgatactcttctaccccctggacgattggaccattccatgtgtatcattccatggccagtgacgtgtgcttctgagaaagaagattccaactctctcactctgaaccatgaagctgagaaagaggattcagctgacaaagtaatgagccacagtggtgactcacatgaggaaagccagactgctacactgctctgtttggtgtttggtgggatgaatacagaaggggaaatctatgacgattgtattgtgactgtagtggactaataaaacccacatttttaaaaaaaaaaaaaanaaaaaaaaaaaaaaaaaaacgggggctttttttggggggggggaaaaaggggtttgaaaggggcaggggctagggtttcctggaccccattttttgggcacaagggggaaattgggggggccccaaagggggggggataaatggaaaccggttaccgttgttctgggaaaa

SEQ ID NO: 308299 - DNA, 732 bp, Homo sapiens
aggcagggggtgaatcggcacgagggcgactggcctaagtcgccgcagaactgccacgtggggatgagatttgctgggctggtagcggcggctgctgcgggaggtcccgcccacgtgaagccagcctaactgagctctggactttggggacagctgtcagtggcctaggccgcaggacaccatgaagcaactgccagtcttggaacctggagacaagcccaggaaagcaacatggtacaccttgactgtccctggagacagcccctgtgctcgagttggccacagctgttcatatttacccccagttggtaatgccaagagagggaaggtcttcattgttgggggagcaaatccaaacagaagcttctcagacgtgcacaccatggatctggaaaccaggacgtggaccacgccagaagtgaccagccccccaccatccccaagaacattccacacatcatcggcagccattggaaaccagctatatgtctttgggggcggagagagaggtgcccagcccgtgcaggacacgaagctgcatgtgtttgacgcaagtatggactggtgggcaccttggggctggtcagggccatcccagtttacacattacctaatataggaagcagaagttagaaaaggaaagcctgactaagtgtctcacttctagacttctttgttatatctcttagctgatatctttttcccacagcaaaattggcatttaaaaaggga

SEQ ID NO: 308300 - DNA, 1713 bp, Homo sapiens
  misc_feature (1542)..(1542): n is a, c, g, or t
tgcagtccggggctggagggtaggggcgagggtccccggataccgggtctatcacagtctcgggcagggagtctgaatcttttaggggagtgggcccaagccgggtgcaaagaacggggaagggccttccctggctccgtcccggccactttgaccgaatcagcctgttctttcccgaccccgtctcctatcccctagaactgccacgtggggatgagatttgctgggctggtagcggcggctgctgcgggaggtcccgcccacgtgaagccagcctaactgagctctggactttggggacagctgtcagtggcctaggccgcaggacaccatgaagcaactgccagtcttggaacctggagacaagcccaggaaagcaacatggtacaccttgactgtccctggagacagcccctgtgctcgagttggccacagctgttcatatttacccccagttggtaatgccaagagagggaaggtcttcattgttgggggagcaaatccaaacagaagcttctcagacgtgcacaccatggatctgggaaaacaccagtgggacttagatacctgcaagggcctcttgccccggtatgaacatgctagcttcattccctcctgcacacctgaccgtatctgggtatttggaggtgccaaccaatcaggaaatcgaaattgtctacaagtcctgaatcctgaaaccaggacgtggaccacgccagaagtgaccagccccccaccatccccaagaacattccacacatcatcggcagccattggaaaccagctatatgtctttgggggcggagagagaggtgcccagcccgtgcaggacacgaagctgcatgtgtttgacgcaaacactctgacctggtcacagccagagacacttggaaatcctccatctccccggcatggtcatgtgatggtggcagcagggacaaagctcttcatccacggaggcttggcgggggacagattctatgatgacctccactgcattgatataagtgacatgaaatggcagaagctaaatcccactggggctgctccagcaggctgtgctgcccactcagctgtggccatgggaaaacatgtgtacatctttggtggaatgactcctgcaggagcactggacacaatgtaccagtatcacacagaagagcagcattggaccttgcttaaatttgatactcttctaccccctggacgattggaccattccatgtgtatcattccatggccagtgacgtgtgcttctgagaaagaagattccaactctctcactctgaaccatgaagctgagaaagaggattcagctgacaaagtaatgagccacagtggtgactcacatgaggaaagccagactgctacactgctctgtttggtgtttggtgggatgaatacagaaggggaaatctatgacgattgtattgtgactgtagtggactaataaaacccacatttttattacctgtcagttactttcagaatagttaagtaaaacattagctgttttatacctccaaaaaaaaaaaaaaaaanaaaaaaaaaaaaaaaaaaacgggggctttttttggggggggggaaaaaggggtttgaaaggggcaggggctagggtttcctggaccccattttttgggcacaagggggaaattgggggggccccaaagggggggggataaatggaaaccggttaccgttgttctgggaaaa

SEQ ID NO: 308301 - DNA, 1721 bp, Homo sapiens
  misc_feature (8)..(8): n is a, c, g, or t
  misc_feature (1550)..(1550): n is a, c, g, or t
agaggcgnagaacttaggctaggtcgggctggggcgagggtccccggataccgggtctatcacagtctcgggcagggagtctgaatcttttaggggagtgggcccaagccgggtgcaaagaacggggaagggccttccctggctccgtcccggccactttgaccgaatcagcctgttctttcccgaccccgtctcctatcccctagaactgccacgtggggatgagatttgctgggctggtagcggcggctgctgcgggaggtcccgcccacgtgaagccagcctaactgagctctggactttggggacagctgtcagtggcctaggccgcaggacaccatgaagcaactgccagtcttggaacctggagacaagcccaggaaagcaacatggtacaccttgactgtccctggagacagcccctgtgctcgagttggccacagctgttcatatttacccccagttggtaatgccaagagagggaaggtcttcattgttgggggagcaaatccaaacagaagcttctcagacgtgcacaccatggatctgggaaaacaccagtgggacttagatacctgcaagggcctcttgccccggtatgaacatgctagcttcattccctcctgcacacctgaccgtatctgggtatttggaggtgccaaccaatcaggaaatcgaaattgtctacaagtcctgaatcctgaaaccaggacgtggaccacgccagaagtgaccagccccccaccatccccaagaacattccacacatcatcggcagccattggaaaccagctatatgtctttgggggcggagagagaggtgcccagcccgtgcaggacacgaagctgcatgtgtttgacgcaaacactctgacctggtcacagccagagacacttggaaatcctccatctccccggcatggtcatgtgatggtggcagcagggacaaagctcttcatccacggaggcttggcgggggacagattctatgatgacctccactgcattgatataagtgacatgaaatggcagaagctaaatcccactggggctgctccagcaggctgtgctgcccactcagctgtggccatgggaaaacatgtgtacatctttggtggaatgactcctgcaggagcactggacacaatgtaccagtatcacacagaagagcagcattggaccttgcttaaatttgatactcttctaccccctggacgattggaccattccatgtgtatcattccatggccagtgacgtgtgcttctgagaaagaagattccaactctctcactctgaaccatgaagctgagaaagaggattcagctgacaaagtaatgagccacagtggtgactcacatgaggaaagccagactgctacactgctctgtttggtgtttggtgggatgaatacagaaggggaaatctatgacgattgtattgtgactgtagtggactaataaaacccacatttttattacctgtcagttactttcagaatagttaagtaaaacattagctgttttatacctccaaaaaaaaaaaaaaaaanaaaaaaaaaaaaaaaaaaacgggggctttttttggggggggggaaaaaggggtttgaaaggggcaggggctagggtttcctggaccccattttttgggcacaagggggaaattgggggggccccaaagggggggggataaatggaaaccggttaccgttgttctgggaaaa

SEQ ID NO: 308302 - DNA, 1570 bp, Homo sapiens
  misc_feature (1399)..(1399): n is a, c, g, or t
agccccgcccctccggggtggagtcacggctcgcgactggcctaagtcgccgcagaactgccacgtggggatgagatttgctgggctggtagcggcggctgctgcgggaggtcccgcccacgtgaagccagcctaactgagctctggactttggggacagctgtcagtggcctaggccgcaggacaccatgaagcaactgccagtcttggaacctggagacaagcccaggaaagcaacatggtacaccttgactgtccctggagacagcccctgtgctcgagttggccacagctgttcatatttacccccagttggtaatgccaagagagggaaggtcttcattgttgggggagcaaatccaaacagaagcttctcagacgtgcacaccatggatctgggaaaacaccagtgggacttagatacctgcaagggcctcttgccccggtatgaacatgctagcttcattccctcctgcacacctgaccgtatctgggtatttggaggtgccaaccaatcaggaaatcgaaattgtctacaagtcctgaatcctgaaaccaggacgtggaccacgccagaagtgaccagccccccaccatccccaagaacattccacacatcatcggcagccattggaaaccagctatatgtctttgggggcggagagagaggtgcccagcccgtgcaggacacgaagctgcatgtgtttgacgcaaacactctgacctggtcacagccagagacacttggaaatcctccatctccccggcatggtcatgtgatggtggcagcagggacaaagctcttcatccacggaggcttggcgggggacagattctatgatgacctccactgcattgatataagtgacatgaaatggcagaagctaaatcccactggggctgctccagcaggctgtgctgcccactcagctgtggccatgggaaaacatgtgtacatctttggtggaatgactcctgcaggagcactggacacaatgtaccagtatcacacagaagagcagcattggaccttgcttaaatttgatactcttctaccccctggacgattggaccattccatgtgtatcattccatggccagtgacgtgtgcttctgagaaagaagattccaactctctcactctgaaccatgaagctgagaaagaggattcagctgacaaagtaatgagccacagtggtgactcacatgaggaaagccagactgctacactgctctgtttggtgtttggtgggatgaatacagaaggggaaatctatgacgattgtattgtgactgtagtggactaataaaacccacatttttattacctgtcagttactttcagaatagttaagtaaaacattagctgttttatacctccaaaaaaaaaaaaaaaaanaaaaaaaaaaaaaaaaaaacgggggctttttttggggggggggaaaaaggggtttgaaaggggcaggggctagggtttcctggaccccattttttgggcacaagggggaaattgggggggccccaaagggggggggataaatggaaaccggttaccgttgttctgggaaaa

SEQ ID NO: 308303 - DNA, 1563 bp, Homo sapiens
  misc_feature (1392)..(1392): n is a, c, g, or t
aggcagggggtgaatcggcacgagggcgactggcctaagtcgccgcagaactgccacgtggggatgagatttgctgggctggtagcggcggctgctgcgggaggtcccgcccacgtgaagccagcctaactgagctctggactttggggacagctgtcagtggcctaggccgcaggacaccatgaagcaactgccagtcttggaacctggagacaagcccaggaaagcaacatggtacaccttgactgtccctggagacagcccctgtgctcgagttggccacagctgttcatatttacccccagttggtaatgccaagagagggaaggtcttcattgttgggggagcaaatccaaacagaagcttctcagacgtgcacaccatggatctgggaaaacaccagtgggacttagatacctgcaagggcctcttgccccggtatgaacatgctagcttcattccctcctgcacacctgaccgtatctgggtatttggaggtgccaaccaatcaggaaatcgaaattgtctacaagtcctgaatcctgaaaccaggacgtggaccacgccagaagtgaccagccccccaccatccccaagaacattccacacatcatcggcagccattggaaaccagctatatgtctttgggggcggagagagaggtgcccagcccgtgcaggacacgaagctgcatgtgtttgacgcaaacactctgacctggtcacagccagagacacttggaaatcctccatctccccggcatggtcatgtgatggtggcagcagggacaaagctcttcatccacggaggcttggcgggggacagattctatgatgacctccactgcattgatataagtgacatgaaatggcagaagctaaatcccactggggctgctccagcaggctgtgctgcccactcagctgtggccatgggaaaacatgtgtacatctttggtggaatgactcctgcaggagcactggacacaatgtaccagtatcacacagaagagcagcattggaccttgcttaaatttgatactcttctaccccctggacgattggaccattccatgtgtatcattccatggccagtgacgtgtgcttctgagaaagaagattccaactctctcactctgaaccatgaagctgagaaagaggattcagctgacaaagtaatgagccacagtggtgactcacatgaggaaagccagactgctacactgctctgtttggtgtttggtgggatgaatacagaaggggaaatctatgacgattgtattgtgactgtagtggactaataaaacccacatttttattacctgtcagttactttcagaatagttaagtaaaacattagctgttttatacctccaaaaaaaaaaaaaaaaanaaaaaaaaaaaaaaaaaaacgggggctttttttggggggggggaaaaaggggtttgaaaggggcaggggctagggtttcctggaccccattttttgggcacaagggggaaattgggggggccccaaagggggggggataaatggaaaccggttaccgttgttctgggaaaa

SEQ ID NO: 308304 - DNA, 1512 bp, Homo sapiens
  misc_feature (8)..(8): n is a, c, g, or t
agaggcgnagaacttaggctaggtcgggctggggcgagggtccccggataccgggtctatcacagtctcgggcagggagtctgaatcttttaggggagtgggcccaagccgggtgcaaagaacggggaagggccttccctggctccgtcccggccactttgaccgaatcagcctgttctttcccgaccccgtctcctatcccctagaactgccacgtggggatgagatttgctgggctggtagcggcggctgctgcgggaggtcccgcccacgtgaagccagcctaactgagctctggactttggggacagctgtcagtggcctaggccgcaggacaccatgaagcaactgccagtcttggaacctggagacaagcccaggaaagcaacatggtacaccttgactgtccctggagacagcccctgtgctcgagttggccacagctgttcatatttacccccagttggtaatgccaagagagggaaggtcttcattgttgggggagcaaatccaaacagaagcttctcagacgtgcacaccatggatctgggaaaacaccagtgggacttagatacctgcaagggcctcttgccccggtatgaacatgctagcttcattccctcctgcacacctgaccgtatctgggtatttggaggtgccaaccaatcaggaaatcgaaattgtctacaagtcctgaatcctgaaaccaggacgtggaccacgccagaagtgaccagccccccaccatccccaagaacattccacacatcatcggcagccattggaaaccagctatatgtctttgggggcggagagagaggtgcccagcccgtgcaggacacgaagctgcatgtgtttgacgcaaacactctgacctggtcacagccagagacacttggaaatcctccatctccccggcatggtcatgtgatggtggcagcagggacaaagctcttcatccacggaggcttggcgggggacagattctatgatgacctccactgcattgatataagtgacatgaaatggcagaagctaaatcccactggggctgctccagcaggctgtgctgcccactcagctgtggccatgggaaaacatgtgtacatctttggtggaatgactcctgcaggagcactggacacaatgtaccagtatcacacagagacggggtttcaccgtgttagccaggatggtctccatctcctgacctcgtgatccacccgcttcggcctcccaaagtgctgggattacaggcgtgagccaccgtgcccggcctatctggaaatttcttaacatgaagccttttccctccccaacataaagagcagcattggaccttgcttaaatttgatactcttctaccccctggacgattggaccattccatgtgtatcattccatggggcgcggactggggcttttgtaaaaaaaaattccccttttttactcttaaccttgagagtgaagaagaggttttctttgacaaattatggtgcaactggaggacta

SEQ ID NO: 308305 - DNA, 1662 bp, Homo sapiens
  misc_feature (8)..(8): n is a, c, g, or t
  misc_feature (1491)..(1491): n is a, c, g, or t
agaggcgnagaacttaggctaggtcgggctggggcgagggtccccggataccgggtctatcacagtctcgggcagggagtctgaatcttttaggggagtgggcccaagccgggtgcaaagaacggggaagggccttccctggctccgtcccggccactttgaccgaatcagcctgttctttcccgaccccgtctcctatcccctagaactgccacgtggggatgagatttgctgggctggtagcggcggctgctgcgggaggtcccgcccacgtgaagccagcctaactgagctctggactttggggacagctgtcagtggcctaggccgcaggtacaccttgactgtccctggagacagcccctgtgctcgagttggccacagctgttcatatttacccccagttggtaatgccaagagagggaaggtcttcattgttgggggagcaaatccaaacagaagcttctcagacgtgcacaccatggatctgggaaaacaccagtgggacttagatacctgcaagggcctcttgccccggtatgaacatgctagcttcattccctcctgcacacctgaccgtatctgggtatttggaggtgccaaccaatcaggaaatcgaaattgtctacaagtcctgaatcctgaaaccaggacgtggaccacgccagaagtgaccagccccccaccatccccaagaacattccacacatcatcggcagccattggaaaccagctatatgtctttgggggcggagagagaggtgcccagcccgtgcaggacacgaagctgcatgtgtttgacgcaaacactctgacctggtcacagccagagacacttggaaatcctccatctccccggcatggtcatgtgatggtggcagcagggacaaagctcttcatccacggaggcttggcgggggacagattctatgatgacctccactgcattgatataagtgacatgaaatggcagaagctaaatcccactggggctgctccagcaggctgtgctgcccactcagctgtggccatgggaaaacatgtgtacatctttggtggaatgactcctgcaggagcactggacacaatgtaccagtatcacacagaagagcagcattggaccttgcttaaatttgatactcttctaccccctggacgattggaccattccatgtgtatcattccatggccagtgacgtgtgcttctgagaaagaagattccaactctctcactctgaaccatgaagctgagaaagaggattcagctgacaaagtaatgagccacagtggtgactcacatgaggaaagccagactgctacactgctctgtttggtgtttggtgggatgaatacagaaggggaaatctatgacgattgtattgtgactgtagtggactaataaaacccacatttttattacctgtcagttactttcagaatagttaagtaaaacattagctgttttatacctccaaaaaaaaaaaaaaaaanaaaaaaaaaaaaaaaaaaacgggggctttttttggggggggggaaaaaggggtttgaaaggggcaggggctagggtttcctggaccccattttttgggcacaagggggaaattgggggggccccaaagggggggggataaatggaaaccggttaccgttgttctgggaaaa

SEQ ID NO: 308306 - DNA, 1342 bp, Homo sapiens
  misc_feature (1171)..(1171): n is a, c, g, or t
agccccgcccctccggggtggagtcacggctcgcgactggcctaagtcgccgcagaactgccacgtggggatgagatttgctgggctggtagcggcggctgctgcgggaggtcccgcccacgtgaagccagcctaactgaggcttctcagacgtgcacaccatggatctgggaaaacaccagtgggacttagatacctgcaagggcctcttgccccggtatgaacatgctagcttcattccctcctgcacacctgaccgtatctgggtatttggaggtgccaaccaatcaggaaatcgaaattgtctacaagtcctgaatcctgaaaccaggacgtggaccacgccagaagtgaccagccccccaccatccccaagaacattccacacatcatcggcagccattggaaaccagctatatgtctttgggggcggagagagaggtgcccagcccgtgcaggacacgaagctgcatgtgtttgacgcaaacactctgacctggtcacagccagagacacttggaaatcctccatctccccggcatggtcatgtgatggtggcagcagggacaaagctcttcatccacggaggcttggcgggggacagattctatgatgacctccactgcattgatataagtgacatgaaatggcagaagctaaatcccactggggctgctccagcaggctgtgctgcccactcagctgtggccatgggaaaacatgtgtacatctttggtggaatgactcctgcaggagcactggacacaatgtaccagtatcacacagaagagcagcattggaccttgcttaaatttgatactcttctaccccctggacgattggaccattccatgtgtatcattccatggccagtgacgtgtgcttctgagaaagaagattccaactctctcactctgaaccatgaagctgagaaagaggattcagctgacaaagtaatgagccacagtggtgactcacatgaggaaagccagactgctacactgctctgtttggtgtttggtgggatgaatacagaaggggaaatctatgacgattgtattgtgactgtagtggactaataaaacccacatttttattacctgtcagttactttcagaatagttaagtaaaacattagctgttttatacctccaaaaaaaaaaaaaaaaanaaaaaaaaaaaaaaaaaaacgggggctttttttggggggggggaaaaaggggtttgaaaggggcaggggctagggtttcctggaccccattttttgggcacaagggggaaattgggggggccccaaagggggggggataaatggaaaccggttaccgttgttctgggaaaa

SEQ ID NO: 308307 - DNA, 1667 bp, Homo sapiens
  misc_feature (8)..(8): n is a, c, g, or t
  misc_feature (1496)..(1496): n is a, c, g, or t
agaggcgnagaacttaggctaggtcgggctggggcgagggtccccggataccgggtctatcacagtctcgggcagggagtctgaatcttttaggggagtgggcccaagccgggtgcaaagaacggggaagggccttccctggctccgtcccggccactttgaccgaatcagcctgttctttcccgaccccgtctcctatcccctagaactgccacgtggggatgagatttgctgggctggtagcggcggctgctgcgggaggtcccgcccacgtgaagccagcctaactgagctctggactttggggacagctgtcagtggcctaggccgcaggacaccatgaagcaactgccagtcttggaacctggagacaagcccaggaaagcaacatggtacaccttgactgtccctggagacagcccctgtgctcgagttggccacagctgttcatatttacccccagttggtaatgccaagagagggaaggtcttcattgttgggggagcaaatccaaacagaagcttctcagacgtgcacaccatggatctggatgctagcttcattccctcctgcacacctgaccgtatctgggtatttggaggtgccaaccaatcaggaaatcgaaattgtctacaagtcctgaatcctgaaaccaggacgtggaccacgccagaagtgaccagccccccaccatccccaagaacattccacacatcatcggcagccattggaaaccagctatatgtctttgggggcggagagagaggtgcccagcccgtgcaggacacgaagctgcatgtgtttgacgcaaacactctgacctggtcacagccagagacacttggaaatcctccatctccccggcatggtcatgtgatggtggcagcagggacaaagctcttcatccacggaggcttggcgggggacagattctatgatgacctccactgcattgatataagtgacatgaaatggcagaagctaaatcccactggggctgctccagcaggctgtgctgcccactcagctgtggccatgggaaaacatgtgtacatctttggtggaatgactcctgcaggagcactggacacaatgtaccagtatcacacagaagagcagcattggaccttgcttaaatttgatactcttctaccccctggacgattggaccattccatgtgtatcattccatggccagtgacgtgtgcttctgagaaagaagattccaactctctcactctgaaccatgaagctgagaaagaggattcagctgacaaagtaatgagccacagtggtgactcacatgaggaaagccagactgctacactgctctgtttggtgtttggtgggatgaatacagaaggggaaatctatgacgattgtattgtgactgtagtggactaataaaacccacatttttattacctgtcagttactttcagaatagttaagtaaaacattagctgttttatacctccaaaaaaaaaaaaaaaaanaaaaaaaaaaaaaaaaaaacgggggctttttttggggggggggaaaaaggggtttgaaaggggcaggggctagggtttcctggaccccattttttgggcacaagggggaaattgggggggccccaaagggggggggataaatggaaaccggttaccgttgttctgggaaaa

SEQ ID NO: 308308 - DNA, 1568 bp, Homo sapiens
  misc_feature (8)..(8): n is a, c, g, or t
  misc_feature (1397)..(1397): n is a, c, g, or t
agaggcgnagaacttaggctaggtcgggctggggcgagggtccccggataccgggtctatcacagtctcgggcagggagtctgaatcttttaggggagtgggcccaagccgggtgcaaagaacggggaagggccttccctggctccgtcccggccactttgaccgaatcagcctgttctttcccgaccccgtctcctatcccctagaactgccacgtggggatgagatttgctgggctggtagcggcggctgctgcgggaggtcccgcccacgtgaagccagcctaactgagctctggactttggggacagctgtcagtggcctaggccgcaggacaccatgaagcaactgccagtcttggaacctggagacaagcccaggaaagcaacatggtacaccttgactgtccctggagacagcccctgtgctcgagttggccacagctgttcatatttacccccagttggtaatgccaagagagggaaggtcttcattgttgggggagcaaatccaaacagaagcttctcagacgtgcacaccatggatctggaaaccaggacgtggaccacgccagaagtgaccagccccccaccatccccaagaacattccacacatcatcggcagccattggaaaccagctatatgtctttgggggcggagagagaggtgcccagcccgtgcaggacacgaagctgcatgtgtttgacgcaaacactctgacctggtcacagccagagacacttggaaatcctccatctccccggcatggtcatgtgatggtggcagcagggacaaagctcttcatccacggaggcttggcgggggacagattctatgatgacctccactgcattgatataagtgacatgaaatggcagaagctaaatcccactggggctgctccagcaggctgtgctgcccactcagctgtggccatgggaaaacatgtgtacatctttggtggaatgactcctgcaggagcactggacacaatgtaccagtatcacacagaagagcagcattggaccttgcttaaatttgatactcttctaccccctggacgattggaccattccatgtgtatcattccatggccagtgacgtgtgcttctgagaaagaagattccaactctctcactctgaaccatgaagctgagaaagaggattcagctgacaaagtaatgagccacagtggtgactcacatgaggaaagccagactgctacactgctctgtttggtgtttggtgggatgaatacagaaggggaaatctatgacgattgtattgtgactgtagtggactaataaaacccacatttttattacctgtcagttactttcagaatagttaagtaaaacattagctgttttatacctccaaaaaaaaaaaaaaaaanaaaaaaaaaaaaaaaaaaacgggggctttttttggggggggggaaaaaggggtttgaaaggggcaggggctagggtttcctggaccccattttttgggcacaagggggaaattgggggggccccaaagggggggggataaatggaaaccggttaccgttgttctgggaaaa

SEQ ID NO: 308309 - DNA, 1551 bp, Homo sapiens
  misc_feature (1380)..(1380): n is a, c, g, or t
tgcagtccggggctggagggtaggggcgagggtccccggataccgggtctatcacagtctcgggcagggagtctgaatcttttaggggagtgggcccaagccgggtgcaaagaacggggaagggccttccctggctccgtcccggccactttgaccgaatcagcctgttctttcccgaccccgtctcctatcccctagaactgccacgtggggatgagatttgctgggctggtagcggcggctgctgcgggaggtcccgcccacgtgaagccagcctaactgagctctggactttggggacagctgtcagtggcctaggccgcaggacaccatgaagcaactgccagtcttggaacctggagacaagcccaggaaagcaacatggtacaccttgactgtccctggagacagcccctgtgctcgagttggccacagctgttcatatttacccccagttggtaatgccaagagagggaaggtcttcattgttgggggagcaaatccaaacagaagcttctcagacgtgcacaccatggatctgggaaaacaccagtgggacttagatacctgcaagggcctcttgccccggtatgaacatgctagcttcattccctcctgcacacctgaccgtatctgggtatttggaggtgccaaccaatcaggaaatcgaaattgtctacaagtcctgaatcctgacactctgacctggtcacagccagagacacttggaaatcctccatctccccggcatggtcatgtgatggtggcagcagggacaaagctcttcatccacggaggcttggcgggggacagattctatgatgacctccactgcattgatataagtgacatgaaatggcagaagctaaatcccactggggctgctccagcaggctgtgctgcccactcagctgtggccatgggaaaacatgtgtacatctttggtggaatgactcctgcaggagcactggacacaatgtaccagtatcacacagaagagcagcattggaccttgcttaaatttgatactcttctaccccctggacgattggaccattccatgtgtatcattccatggccagtgacgtgtgcttctgagaaagaagattccaactctctcactctgaaccatgaagctgagaaagaggattcagctgacaaagtaatgagccacagtggtgactcacatgaggaaagccagactgctacactgctctgtttggtgtttggtgggatgaatacagaaggggaaatctatgacgattgtattgtgactgtagtggactaataaaacccacatttttattacctgtcagttactttcagaatagttaagtaaaacattagctgttttatacctccaaaaaaaaaaaaaaaaanaaaaaaaaaaaaaaaaaaacgggggctttttttggggggggggaaaaaggggtttgaaaggggcaggggctagggtttcctggaccccattttttgggcacaagggggaaattgggggggccccaaagggggggggataaatggaaaccggttaccgttgttctgggaaaa

SEQ ID NO: 308310 - DNA, 1410 bp, Homo sapiens
  misc_feature (8)..(8): n is a, c, g, or t
  misc_feature (1239)..(1239): n is a, c, g, or t
agaggcgnagaacttaggctaggtcgggctggggcgagggtccccggataccgggtctatcacagtctcgggcagggagtctgaatcttttaggggagtgggcccaagccgggtgcaaagaacggggaagggccttccctggctccgtcccggccactttgaccgaatcagcctgttctttcccgaccccgtctcctatcccctagaactgccacgtggggatgagatttgctgggctggtagcggcggctgctgcgggaggtcccgcccacgtgaagccagcctaactgagctctggactttggggacagctgtcagtggcctaggccgcaggacaccatgaagcaactgccagtcttggaacctggagacaagcccaggaaagcaacatgaaaccaggacgtggaccacgccagaagtgaccagccccccaccatccccaagaacattccacacatcatcggcagccattggaaaccagctatatgtctttgggggcggagagagaggtgcccagcccgtgcaggacacgaagctgcatgtgtttgacgcaaacactctgacctggtcacagccagagacacttggaaatcctccatctccccggcatggtcatgtgatggtggcagcagggacaaagctcttcatccacggaggcttggcgggggacagattctatgatgacctccactgcattgatataagtgacatgaaatggcagaagctaaatcccactggggctgctccagcaggctgtgctgcccactcagctgtggccatgggaaaacatgtgtacatctttggtggaatgactcctgcaggagcactggacacaatgtaccagtatcacacagaagagcagcattggaccttgcttaaatttgatactcttctaccccctggacgattggaccattccatgtgtatcattccatggccagtgacgtgtgcttctgagaaagaagattccaactctctcactctgaaccatgaagctgagaaagaggattcagctgacaaagtaatgagccacagtggtgactcacatgaggaaagccagactgctacactgctctgtttggtgtttggtgggatgaatacagaaggggaaatctatgacgattgtattgtgactgtagtggactaataaaacccacatttttattacctgtcagttactttcagaatagttaagtaaaacattagctgttttatacctccaaaaaaaaaaaaaaaaanaaaaaaaaaaaaaaaaaaacgggggctttttttggggggggggaaaaaggggtttgaaaggggcaggggctagggtttcctggaccccattttttgggcacaagggggaaattgggggggccccaaagggggggggataaatggaaaccggttaccgttgttctgggaaaa

SEQ ID NO: 308311 - DNA, 1406 bp, Homo sapiens
  misc_feature (8)..(8): n is a, c, g, or t
  misc_feature (1235)..(1235): n is a, c, g, or t
agaggcgnagaacttaggctaggtcgggctggggcgagggtccccggataccgggtctatcacagtctcgggcagggagtctgaatcttttaggggagtgggcccaagccgggtgcaaagaacggggaagggccttccctggctccgtcccggccactttgaccgaatcagcctgttctttcccgaccccgtctcctatcccctagaactgccacgtggggatgagatttgctgggctggtagcggcggctgctgcgggaggtcccgcccacgtgaagccagcctaactgagctctggactttggggacagctgtcagtggcctaggccgcaggacaccatgaagcaactgccagtcttggaacctggagacaagcccaggaaagcaacatggtacaccttgactgtccctggagacagcccctgtgctcgagttggccacagctgttcatatttacccccagttggtaatgccaagagagggaaggtcttcattgttgggggagcaaatccaaacagaagcttctcagacgtgcacaccatggatctggacactctgacctggtcacagccagagacacttggaaatcctccatctccccggcatggtcatgtgatggtggcagcagggacaaagctcttcatccacggaggcttggcgggggacagattctatgatgacctccactgcattgatataagtgacatgaaatggcagaagctaaatcccactggggctgctccagcaggctgtgctgcccactcagctgtggccatgggaaaacatgtgtacatctttggtggaatgactcctgcaggagcactggacacaatgtaccagtatcacacagaagagcagcattggaccttgcttaaatttgatactcttctaccccctggacgattggaccattccatgtgtatcattccatggccagtgacgtgtgcttctgagaaagaagattccaactctctcactctgaaccatgaagctgagaaagaggattcagctgacaaagtaatgagccacagtggtgactcacatgaggaaagccagactgctacactgctctgtttggtgtttggtgggatgaatacagaaggggaaatctatgacgattgtattgtgactgtagtggactaataaaacccacatttttattacctgtcagttactttcagaatagttaagtaaaacattagctgttttatacctccaaaaaaaaaaaaaaaaanaaaaaaaaaaaaaaaaaaacgggggctttttttggggggggggaaaaaggggtttgaaaggggcaggggctagggtttcctggaccccattttttgggcacaagggggaaattgggggggccccaaagggggggggataaatggaaaccggttaccgttgttctgggaaaa

SEQ ID NO: 308312 - DNA, 1248 bp, Homo sapiens
  misc_feature (8)..(8): n is a, c, g, or t
  misc_feature (1077)..(1077): n is a, c, g, or t
agaggcgnagaacttaggctaggtcgggctggggcgagggtccccggataccgggtctatcacagtctcgggcagggagtctgaatcttttaggggagtgggcccaagccgggtgcaaagaacggggaagggccttccctggctccgtcccggccactttgaccgaatcagcctgttctttcccgaccccgtctcctatcccctagaactgccacgtggggatgagatttgctgggctggtagcggcggctgctgcgggaggtcccgcccacgtgaagccagcctaactgagctctggactttggggacagctgtcagtggcctaggccgcaggacaccatgaagcaactgccagtcttggaacctggagacaagcccaggaaagcaacatgacactctgacctggtcacagccagagacacttggaaatcctccatctccccggcatggtcatgtgatggtggcagcagggacaaagctcttcatccacggaggcttggcgggggacagattctatgatgacctccactgcattgatataagtgacatgaaatggcagaagctaaatcccactggggctgctccagcaggctgtgctgcccactcagctgtggccatgggaaaacatgtgtacatctttggtggaatgactcctgcaggagcactggacacaatgtaccagtatcacacagaagagcagcattggaccttgcttaaatttgatactcttctaccccctggacgattggaccattccatgtgtatcattccatggccagtgacgtgtgcttctgagaaagaagattccaactctctcactctgaaccatgaagctgagaaagaggattcagctgacaaagtaatgagccacagtggtgactcacatgaggaaagccagactgctacactgctctgtttggtgtttggtgggatgaatacagaaggggaaatctatgacgattgtattgtgactgtagtggactaataaaacccacatttttattacctgtcagttactttcagaatagttaagtaaaacattagctgttttatacctccaaaaaaaaaaaaaaaaanaaaaaaaaaaaaaaaaaaacgggggctttttttggggggggggaaaaaggggtttgaaaggggcaggggctagggtttcctggaccccattttttgggcacaagggggaaattgggggggccccaaagggggggggataaatggaaaccggttaccgttgttctgggaaaa

SEQ ID NO: 308313 - DNA, 1204 bp, Homo sapiens
  misc_feature (8)..(8): n is a, c, g, or t
  misc_feature (1033)..(1033): n is a, c, g, or t
agaggcgnagaacttaggctaggtcgggctggggcgagggtccccggataccgggtctatcacagtctcgggcagggagtctgaatcttttaggggagtgggcccaagccgggtgcaaagaacggggaagggccttccctggctccgtcccggccactttgaccgaatcagcctgttctttcccgaccccgtctcctatcccctagaactgccacgtggggatgagatttgctgggctggtagcggcggctgctgcgggaggtcccgcccacgtgaagccagcctaactgagctctggactttggggacagctgtcagtggcctaggccgcaggacaccatgaagcaactgccagtcttggaacctggagacaagcccaggaaagcaacatggtacaccttgactgtccctggagacagcccctgtgctcgagttggccacagctgttcatatttacccccagttggtaatgccaagagagggaaggtcttcattgttgggggagcaaatccaaacagaagcttctcagacgtgcacaccatggatctgggaaaacaccagtgggacttagatacctgcaagggcctcttgccccggtatgaacatgctagcttcattccctcctgcacacctgaccgtatctgggtatttggaggtgccaaccaatcaggaaatcgaaattgtctacaagtcctgaatcctgaaaccaggacgtggaccacgccagaagtgaccagccccccaccatccccaagaacaattccaactctctcactctgaaccatgaagctgagaaagaggattcagctgacaaagtaatgagccacagtggtgactcacatgaggaaagccagactgctacactgctctgtttggtgtttggtgggatgaatacagaaggggaaatctatgacgattgtattgtgactgtagtggactaataaaacccacatttttattacctgtcagttactttcagaatagttaagtaaaacattagctgttttatacctccaaaaaaaaaaaaaaaaanaaaaaaaaaaaaaaaaaaacgggggctttttttggggggggggaaaaaggggtttgaaaggggcaggggctagggtttcctggaccccattttttgggcacaagggggaaattgggggggccccaaagggggggggataaatggaaaccggttaccgttgttctgggaaaa

SEQ ID NO: 308314 - DNA, 1009 bp, Homo sapiens
  misc_feature (8)..(8): n is a, c, g, or t
  misc_feature (838)..(838): n is a, c, g, or t
agaggcgnagaacttaggctaggtcgggctggggcgagggtccccggataccgggtctatcacagtctcgggcagggagtctgaatcttttaggggagtgggcccaagccgggtgcaaagaacggggaagggccttccctggctccgtcccggccactttgaccgaatcagcctgttctttcccgaccccgtctcctatcccctagaactgccacgtggggatgagatttgctgggctggtagcggcggctgctgcgggaggtcccgcccacgtgaagccagcctaactgagctctggactttggggacactgttcatatttacccccagttggtaatgccaagagagggaaggtcttcattgttgggggagcaaatccaaacagaaatgtgtacatctttggtggaatgactcctgcaggagcactggacacaatgtaccagtatcacacagaagagcagcattggaccttgcttaaatttgatactcttctaccccctggacgattggaccattccatgtgtatcattccatggccagtgacgtgtgcttctgagaaagaagattccaactctctcactctgaaccatgaagctgagaaagaggattcagctgacaaagtaatgagccacagtggtgactcacatgaggaaagccagactgctacactgctctgtttggtgtttggtgggatgaatacagaaggggaaatctatgacgattgtattgtgactgtagtggactaataaaacccacatttttattacctgtcagttactttcagaatagttaagtaaaacattagctgttttatacctccaaaaaaaaaaaaaaaaanaaaaaaaaaaaaaaaaaaacgggggctttttttggggggggggaaaaaggggtttgaaaggggcaggggctagggtttcctggaccccattttttgggcacaagggggaaattgggggggccccaaagggggggggataaatggaaaccggttaccgttgttctgggaaaa

SEQ ID NO: 308315 - DNA, 1155 bp, Homo sapiens
  misc_feature (8)..(8): n is a, c, g, or t
agaggcgnagaacttaggctaggtcgggctggggcgagggtccccggataccgggtctatcacagtctcgggcagggagtctgaatcttttaggggagtgggcccaagccgggtgcaaagaacggggaagggccttccctggctccgtcccggccactttgaccgaatcagcctgttctttcccgaccccgtctcctatcccctagaactgccacgtggggatgagatttgctgggctggtagcggcggctgctgcgggaggtcccgcccacgtgaagccagcctaactgagctctggactttggggacactgttcatatttacccccagttggtaatgccaagagagggaaggtcttcattgttgggggagcaaatccaaacagaaatgtgtacatctttggtggaatgactcctgcaggagcactggacacaatgtaccagtatcacacagaagagcagcattggaccttgcttaaatttgatactcttctaccccctggacgattggaccattccatgtgtatcattccatggccagtgacgtgtgcttctgagaaagaagattccaactctctcactctgaaccatgaagctgagaaagaggattcagctgacaaagtaatgagccacagtggtgactcacatgaggaaagccagactgctacactgctctgtttggtgtttggtgggatgaatacagaaggggaaatctatgacgattgtattgtgactgtagtggactaataaaacccacatttttaaaaaacacaccccaaccaaaacccaaaacacacttttggggcccctgggcccctggaaaactcttttgaagaacaattccgtttgggcacgccgggccaccaaaaggaaaggagacacagtgcaaaagcgtggtacccaaagaggggaaccaccccgggcgagacgacaggacatgagaagcgagtcggaaaactctacacacacgcaagtaaagaaaaacggcccgccgggtggggaaaacacgagcccgagctgtctaccgacaaaaccgaaacaccaccaagcaaagggggaatcaagagaggaggtgcacacaaaaggggggccacgaagaacaaacaggggacgcaccaaagagcagaacgctccggattaccaaaatatcacgacc

SEQ ID NO: 308316 - DNA, 918 bp, Homo sapiens
  misc_feature (747)..(747): n is a, c, g, or t
aggcagggggtgaatcggcacgagggcgactggcctaagtcgccgcagaactgccacgtggggatgagatttgctgggctggtagcggcggctgctgcgggaggtcccgcccacgtgaagccagcctaactgagctctggactttggggacagctgtcagtggcctaggccgcaggacaccatgaagcaactgccagtcttggaacctggagacaagcccaggaaagcaacatggtacaccttgactgtccctggagacagcccctgtgctcgagttggccacagctgttcatatttacccccagttggtaatgccaagagagggaaggtcttcattgttgggggagcaaatccaaacagaaaagagcagcattggaccttgcttaaatttgatactcttctaccccctggacgattggaccattccatgtgtatcattccatggccagtgacgtgtgcttctgagaaagaagattccaactctctcactctgaaccatgaagctgagaaagaggattcagctgacaaagtaatgagccacagtggtgactcacatgaggaaagccagactgctacactgctctgtttggtgtttggtgggatgaatacagaaggggaaatctatgacgattgtattgtgactgtagtggactaataaaacccacatttttattacctgtcagttactttcagaatagttaagtaaaacattagctgttttatacctccaaaaaaaaaaaaaaaaanaaaaaaaaaaaaaaaaaaacgggggctttttttggggggggggaaaaaggggtttgaaaggggcaggggctagggtttcctggaccccattttttgggcacaagggggaaattgggggggccccaaagggggggggataaatggaaaccggttaccgttgttctgggaaaa

SEQ ID NO: 308317 - DNA, 1051 bp, Homo sapiens
  misc_feature (8)..(8): n is a, c, g, or t
  misc_feature (880)..(880): n is a, c, g, or t
agaggcgnagaacttaggctaggtcgggctggggcgagggtccccggataccgggtctatcacagtctcgggcagggagtctgaatcttttaggggagtgggcccaagccgggtgcaaagaacggggaagggccttccctggctccgtcccggccactttgaccgaatcagcctgttctttcccgaccccgtctcctatcccctagaactgccacgtggggatgagatttgctgggctggtagcggcggctgctgcgggaggtcccgcccacgtgaagccagcctaactgagctctggactttggggacagctgtcagtggcctaggccgcaggacaccatgaagcaactgccagtcttggaacctggagacaagcccaggaaagcaacatggtacaccttgactgtccctggagacagcccctgtgctcgagttggccacagctgttcatatttacccccagttggtaatgccaagagagggaaggtcttcattgttgggggagcaaatccaaacagaagcttctcagacgtgcacaccatggatctggaaaccaggacgtggaccacgccagaagtgaccagccccccaccatccccaagaacaattccaactctctcactctgaaccatgaagctgagaaagaggattcagctgacaaagtaatgagccacagtggtgactcacatgaggaaagccagactgctacactgctctgtttggtgtttggtgggatgaatacagaaggggaaatctatgacgattgtattgtgactgtagtggactaataaaacccacatttttattacctgtcagttactttcagaatagttaagtaaaacattagctgttttatacctccaaaaaaaaaaaaaaaaanaaaaaaaaaaaaaaaaaaacgggggctttttttggggggggggaaaaaggggtttgaaaggggcaggggctagggtttcctggaccccattttttgggcacaagggggaaattgggggggccccaaagggggggggataaatggaaaccggttaccgttgttctgggaaaa

SEQ ID NO: 308318 - DNA, 1237 bp, Homo sapiens
  misc_feature (8)..(8): n is a, c, g, or t
  misc_feature (955)..(956): n is a, c, g, or t
  misc_feature (999)..(999): n is a, c, g, or t
  misc_feature (1006)..(1006): n is a, c, g, or t
  misc_feature (1167)..(1167): n is a, c, g, or t
  misc_feature (1216)..(1216): n is a, c, g, or t
  misc_feature (1227)..(1227): n is a, c, g, or t
agaggcgnagaacttaggctaggtcgggctggggcgagggtccccggataccgggtctatcacagtctcgggcagggagtctgaatcttttaggggagtgggcccaagccgggtgcaaagaacggggaagggccttccctggctccgtcccggccactttgaccgaatcagcctgttctttcccgaccccgtctcctatcccctagaactgccacgtggggatgagatttgctgggctggtagcggcggctgctgcgggaggtcccgcccacgtgaagccagcctaactgagctctggactttggggacagctgtcagtggcctaggccgcaggacaccatgaagcaactgccagtcttggaacctggagacaagcccaggaaagcaacatggaaaacaccagtgggacttagatacctgcaagggcctcttgccccggtatgaacatgctagcttcattccctcctgcacacctgaccgtatctgggtatttggaggtgccaaccaatcaggaaatcgaaattgtctacaagtcctgaatcctgcttttaaatcttggggattttggactgtcttggcaaatcctaagtatcatcttcattcttccttgatgtttaaaccaggacgtggaccacgccagaagtgaccagccccccaccatccccaagaacattccacacatcatcggcagccattggaaaccagctatatgtctttgggggcggagagagaggtgcccagcccgtgcaggacacgaagctgcatgtgtttgacgcaaacactctgacctggtcacagccagagacacttggaaatcctccatctccccggcatggtcatgtgatggtggcagcagggacaaagctcttcatccacggaggcttggcgggggacagattctatgatgacctccactgcattgatataatgcatgaatgcagagctaatccactgnngctgtcagcagctggctgccactagctgggcatggaaacatgngcatctngtggatgactctgagacctgaacatgtcagttacaagagacagatggactgtaaatgtactttaccctgacatgacatcatggtatcatgcctgcgtgtttgaagaatcacttattgactactgaaagtactcatatggcaggctactgacacatctgttngttggaacaagtatgcattgtggctacattctgaccggcccccttcctnataaccccccnacccaaccat

SEQ ID NO: 308319 - DNA, 779 bp, Homo sapiens
  misc_feature (8)..(8): n is a, c, g, or t
agaggcgnagaacttaggctaggtcgggctggggcgagggtccccggataccgggtctatcacagtctcgggcagggagtctgaatcttttaggggagtgggcccaagccgggtgcaaagaacggggaagggccttccctggctccgtcccggccactttgaccgaatcagcctgttctttcccgaccccgtctcctatcccctagaactgccacgtggggatgagatttgctgggctggtagcggcggctgctgcgggaggtcccgcccacgtgaagccagcctaactgagctctggactttggggacagctgtcagtggcctaggccgcaggacaccatgaagcaactgccagtcttggaacctggagacaagcccaggaaagcaacatggtctgtaaggaaggatccagacacagaaaagcatgagtttttgtttcatttataagtagtttatttacatatttgatcatcaacaaaaaggggtagagatgaaactgtctgcagtttctggtaattagactcaaactgtctgagaaagtcttcagaggaaagataggggggcagtaattatcacagagcagatgttaattttattaaaatccatttaccagaaagagtaaggcactgaccatctggcatcctcagctccaatgctgtgtcttcccccgagctctgactcatttttaagatttttaggaaattagatttggattaaactggcttcactgtttcttggctgtttgttcaaacaaccctttattcaacaactaacattgg

SEQ ID NO: 308320 - DNA, 261 bp, Homo sapiens
ccagcctgactccattcttgtgcttacagcttttaaatcttggggattttggactgtcttggcaaatcctaagtatcatcttcattcttccttgatgtttgtgagtatgagatccctgcccaaaactatgctggcccccctggggattggagtttggaaactgacttcactcagccccagagtcaaggtcagaagcccctctacctggatattttaagtgcctgcattctctctggcccagaaaccaggacgtggaccacg

SEQ ID NO: 308321 - DNA, 691 bp, Homo sapiens
aaccaatataataattggcagccccaatctaggaactgggtgaaatgttttccaggaaaacaccagtgggacttagatacctgcaagggcctcttgccccggtatgaacatgctagcttcattccctcctgcacacctgaccgtatctgggtatttggaggtgccaaccaatcaggaaatcgaaattgtctacaagtcctgaatcctggtaagtagccaaaggttattttatttacgtacatacaaataaactttcatgcacacacacacacatatatataaatccaattataattccagtacatttggattatactaattaccatttaactttgctgacatagaaaataggaattttaacttgtagcataatctgaaaacaacagaataaaaacaattgttggtaacacatacaatttttaacttgttaaatgtcaaagctggaagggacttcagagaacagctatatcaagtgggctactcaggtttatcaagggcaaagtgactttcctaaagtcacaagaggccgggcatggtggcccatgcctgtaatcccagtactttgggaggctgaagaaggcagatcacttgaggtcaggagtttgagattggcctggccagcatggtaaaacccccatctctattaaaaatagaaaaattagctgggtgtagtggtgggcgcctataatcc

SEQ ID NO: 308322 - DNA, 2130 bp, Homo sapiens
ggctcttttaaatgaccccaggcgtcgtgtattgaatcctagactcacgtccgtctcgcccggcgcccgagccagtccgcgcgcacgcgcgtctgcgtccccgaaagccccgcccgcaaggcgctgccctgcctacctggtctccgacgtgctcgctggagggcggtgcgaggggccgagccgacaagatgttcttgctgcctcttccggctgcggggcgagtagtcgtccgacgtctggccgtgagacgtttcgggagccggagtctctccaccgcagacatgacgaagggccttgttttaggaatctattccaaagaaaaagaagatgatgtgccacagttcacaagtgcaggagagaattttgataaattgttagctggaaagctgagagagactttgaacatatctggaccacctctgaaggcagggaagactcgaaccttttatggtctgcatcaggacttccccagcgtggtgctagttggcctcggcaaaaaggcagctggaatcgacgaacaggaaaactggcatgaaggcaaagaaaacatcagagctgctgttgcagcggggtgcaggcagattcaagacctggagctctcgtctgtggaggtggatccctgtggagacgctcaggctgctgcggagggagcggtgcttggtctctatgaatacgatgacctaaagcaaaaaaagaagatggctgtgtcggcaaagctctatggaagtggggatcaggaggcctggcagaaaggagtcctgtttgcttctgggcagaacttggcacgccaattgatggagacgccagccaatgagatgacgccaaccagatttgccgaaattattgagaagaatctcaaaagtgctagtagtaaaaccgaggtccatatcagacccaagtcttggattgaggaacaggcaatgggatcattcctcagtgtggccaaaggatctgacgagcccccagtcttcttggaaattcactacaaaggcagccccaatgcaaacgaaccacccctggtgtttgttgggaaaggaattacctttgacagtggtggtatctccatcaaggcttctgcaaatatggacctcatgagggctgacatgggaggagctgcaactatatgctcagccatcgtgtctgctgcaaagcttaatttgcccattaatattataggtctggcccctctttgtgaaaatatgcccagcggcaaggccaacaagccgggggatgttgttagagccaaaaacgggaagaccatccaggttgataacactgatgctgaggggaggctcatactggctgatgcgctctgttacgcacacacgtttaacccgaaggtcatcctcaatgccgccaccttaacaggtgccatggatgtagctttgggatcaggtgccactggggtctttaccaattcatcctggctctggaacaaactcttcgaggccagcattgaaacaggggaccgtgtctggaggatgcctctcttcgaacattatacaagacaggttgtagattgccagcttgctgatgttaacaacattggaaaatacagatctgcaggagcatgtacagctgcagcattcctgaaagaattcgtaactcatcctaagtgggcacatttagacatagcaggcgtgatgaccaacaaagatgaagttccctatctacggaaaggcatgactgggaggcccacaaggactctcattgagttcttacttcgtttcagtcaagacaatgcttagttcagatactcaaaaatgtcttcactctgtcttaaattggacagttgaacttaaaaggtttttgaataaatggatgaaaatcttttaacggagacaaaggatggtatttaaaaatgtagaacacaatgaaatttgtatgccttgatttttttttcatttcacacaaagatttataaaggtaaagttaatatcttacttgataaggatttttaagatactctataaatgattaaaatttttagaacttcctaatcacttttcagagtatatgtttttcattgagaagcaaaattgtaactcagatttgtgatgctaggaacatgagcaaactgaaaattactatgcacttgtcagaaacaataaatgcaacttgttgtgctct

SEQ ID NO: 308323 - DNA, 2283 bp, Homo sapiens
cgcacacgaatgcgggcgcacacgaatgcgggcgcacacgaatgcgggcgcacacgaatgcgggcgcacacgaatgcgggcgcacacgaatgcgggcgcacacgaatgcgggcgcacccttgagtcccctccacaaccgcggtttgatcccagcggtccagtcggccggtgctgcccatccgtcccgccccctagactcacgtccgtctcgcccggcgcccgagccagtccgcgcgcacgcgcgtctgcgtccccgaaagccccgcccgcaaggcgctgccctgcctacctggtctccgacgtgctcgctggagggcggtgcgaggggccgagccgacaagatgttcttgctgcctcttccggctgcggggcgagtagtcgtccgacgtctggccgtgagacgtttcgggagccggagtctctccaccgcagacatgacgaagggccttgttttaggaatctattccaaagaaaaagaagatgatgtgccacagttcacaagtgcaggagagaattttgataaattgttagctggaaagctgagagagactttgaacatatctggaccacctctgaaggcagggaagactcgaaccttttatggtctgcatcaggacttccccagcgtggtgctagttggcctcggcaaaaaggcagctggaatcgacgaacaggaaaactggcatgaaggcaaagaaaacatcagagctgctgttgcagcggggtgcaggcagattcaagacctggagctctcgtctgtggaggtggatccctgtggagacgctcaggctgctgcggagggagcggtgcttggtctctatgaatacgatgacctaaagcaaaaaaagaagatggctgtgtcggcaaagctctatggaagtggggatcaggaggcctggcagaaaggagtcctgtttgcttctgggcagaacttggcacgccaattgatggagacgccagccaatgagatgacgccaaccagatttgccgaaattattgagaagaatctcaaaagtgctagtagtaaaaccgaggtccatatcagacccaagtcttggattgaggaacaggcaatgggatcattcctcagtgtggccaaaggatctgacgagcccccagtcttcttggaaattcactacaaaggcagccccaatgcaaacgaaccacccctggtgtttgttgggaaaggaattacctttgacagtggtggtatctccatcaaggcttctgcaaatatggacctcatgagggctgacatgggaggagctgcaactatatgctcagccatcgtgtctgctgcaaagcttaatttgcccattaatattataggtctggcccctctttgtgaaaatatgcccagcggcaaggccaacaagccgggggatgttgttagagccaaaaacgggaagaccatccaggttgataacactgatgctgaggggaggctcatactggctgatgcgctctgttacgcacacacgtttaacccgaaggtcatcctcaatgccgccaccttaacaggtgccatggatgtagctttgggatcaggtgccactggggtctttaccaattcatcctggctctggaacaaactcttcgaggccagcattgaaacaggggaccgtgtctggaggatgcctctcttcgaacattatacaagacaggttgtagattgccagcttgctgatgttaacaacattggaaaatacagatctgcaggagcatgtacagctgcagcattcctgaaagaattcgtaactcatcctaagtgggcacatttagacatagcaggcgtgatgaccaacaaagatgaagttccctatctacggaaaggcatgactgggaggcccacaaggactctcattgagttcttacttcgtttcagtcaagacaatgcttagttcagatactcaaaaatgtcttcactctgtcttaaattggacagttgaacttaaaaggtttttgaataaatggatgaaaatcttttaacggagacaaaggatggtatttaaaaatgtagaacacaatgaaatttgtatgccttgatttttttttcatttcacacaaagatttataaaggtaaagttaatatcttacttgataaggatttttaagatactctataaatgattaaaatttttagaacttcctaatcacttttcagagtatatgtttttcattgagaagcaaaattgtaactcagatttgtgatgctaggaacatgagcaaactgaaaattactatgcacttgtcagaaacaataaatgcaacttgttgtgctct

SEQ ID NO: 308324 - DNA, 2229 bp, Homo sapiens
cgcacacgaatgcgggcgcacacgaatgcgggcgcacacgaatgcgggcgcacacgaatgcgggcgcacacgaatgcgggcgcacacgaatgcgggcgcacacgaatgcgggcgcacccttgagtcccctccacaaccgcggtttgatcccagcggtccagtcggccggtgctgcccatccgtcccgccccctagactcacgtccgtctcgcccggcgcccgagccagtccgcgcgcacgcgcgtctgcgtccccgaaagccccgcccgcaaggcgctgccctgcctacctggtctccgacgtgctcgctggagggcggtgcgaggggccgagccgacaagatgttcttgctgcctcttccggctgcggggcgagtagtcgtccgacgtctggccgtgagacgtttcgggagccggagtctctccaccgcagacatgacgaagggccttgttttaggaatctattccaaagaaaaagaagatgatgtgccacagttcacaagtgcaggagagaattttgataaattgttagctggaaagctgagagagactttgaacatatctggaccacctctgaaggcagggaagactcgaaccttttatggtctgcatcaggacttccccagcgtggtgctagttggcctcggcaaaaaggcagctggaatcgacgaacaggaaaactggcatgaaggcaaagaaaacatcagagctgctgttgcagcggggtgcaggcagattcaagacctggagctctcgtctgtggaggtggatccctgtggagacgctcaggctgctgcggagggagcggtgcttggtctctatgaatacgatgacctaaagcaaaaaaagaagatggctgtgtcggcaaagctctatggaagtggggatcaggaggcctggcagaaaggagtcctgtttgcttctgggcagaacttggcacgccaattgatggagacgccagccaatgagatgacgccaaccagatttgccgaaattattgagaagaatctcaaaagtgctagtagtaaaaccgaggtccatatcagacccaagtcttggattgaggaacaggcaatgggatcattcctcagtgtggccaaaggatctgacgagcccccagtcttcttggaaattcactacaaaggcagccccaatgcaaacgaaccacccctggtgtttgttgggaaaggaattacctttgacagtggtggtatctccatcaaggcttctgcaaatatggacctcatgagggctgacatgggaggagctgcaactatatgctcagccatcgtgtctgctgcaaagcttaatttgcccattaatattataggtctggcccctctttgtgaaaatatgcccagcggcaaggccaacaagccgggggatgttgttagagccatggctgatgcgctctgttacgcacacacgtttaacccgaaggtcatcctcaatgccgccaccttaacaggtgccatggatgtagctttgggatcaggtgccactggggtctttaccaattcatcctggctctggaacaaactcttcgaggccagcattgaaacaggggaccgtgtctggaggatgcctctcttcgaacattatacaagacaggttgtagattgccagcttgctgatgttaacaacattggaaaatacagatctgcaggagcatgtacagctgcagcattcctgaaagaattcgtaactcatcctaagtgggcacatttagacatagcaggcgtgatgaccaacaaagatgaagttccctatctacggaaaggcatgactgggaggcccacaaggactctcattgagttcttacttcgtttcagtcaagacaatgcttagttcagatactcaaaaatgtcttcactctgtcttaaattggacagttgaacttaaaaggtttttgaataaatggatgaaaatcttttaacggagacaaaggatggtatttaaaaatgtagaacacaatgaaatttgtatgccttgatttttttttcatttcacacaaagatttataaaggtaaagttaatatcttacttgataaggatttttaagatactctataaatgattaaaatttttagaacttcctaatcacttttcagagtatatgtttttcattgagaagcaaaattgtaactcagatttgtgatgctaggaacatgagcaaactgaaaattactatgcacttgtcagaaacaataaatgcaacttgttgtgctct

SEQ ID NO: 308325 - DNA, 2526 bp, Homo sapiens
cgcacacgaatgcgggcgcacacgaatgcgggcgcacacgaatgcgggcgcacacgaatgcgggcgcacacgaatgcgggcgcacacgaatgcgggcgcacacgaatgcgggcgcacccttgagtcccctccacaaccgcggtttgatcccagcggtccagtcggccggtgctgcccatccgtcccgccccctagactcacgtccgtctcgcccggcgcccgagccagtccgcgcgcacgcgcgtctgcgtccccgaaagccccgcccgcaaggcgctgccctgcctacctggtctccgacgtgctcgctggagggcggtgcgaggggccgagccgacaagatgttcttgctgcctcttccggctgcggggcgagtagtcgtccgacgtctggccgtgagacgtttcgggagccggagtctctccaccgcagacatgacgaagggccttgttttaggaatctattccaaagaaaaagaagatgatgtgccacagttcacaagtgcaggagagaattttgataaattgttagctggaaagctgagagagactttgaacatatctggaccacctctgaaggcagggaagactcgaaccttttatggtctgcatcaggacttccccagcgtggtgctagttggcctcggcaaaaaggcagctggaatcgacgaacaggaaaactggcatgaaggcaaagaaaacatcagagctgctgttgcagcggggtgcaggcagattcaagacctggagctctcgtctgtggaggtggatccctgtggagacgctcaggctgctgcggagggagcggtgcttggtctctatgaatacgatgacctaaagcaaaaaaagaagatggctgtgtcggcaaagctctatggaagtggggatcaggaggcctggcagaaaggagtcctgtttgcttctgggcagaacttggcacgccaattgatggagacgccagccaatgagatgacgccaaccagatttgccgaaattattgagaagaatctcaaaagtgctagtagtaaaaccgaggtccatatcagacccaagtcttggattgaggaacaggcaatgggatcattcctcagtgtggccaaaggatctgacgagcccccagtcttcttggaaattcactacaaaggcagccccaatgcaaacgaaccacccctggtgtttgttgggaaaggaattacctttgacagtggtggtatctccatcaaggcttctgcaaatatggacctcatgagggctgacatgggaggagctgcaactatatgctcagccatcgtgtctgctgcaaagcttaatttgcccattaatattataggtctggcccctctttgtgaaaatatgcccagcggcaaggccaacaagccgggggatgttgttagagccaaaaacgggaagaccatccaggttgataacactgatgctgaggggaggctcatactggctgatgcgctctgttacgcacacacgtttaacccgaaggtcatcctcaatgccgccaccttaacaggtgccatggatgtagctttgggatcaggtgccactggggtctttaccaattcatcctggctctggaacaaactcttcgaggccagcattgaaacaggggaccgtgtctggaggatgcctctcttcgaacattatacaagacaggttgtagattgccagcttgctgatgttaacaacattggaaaatacagatctgcaggagcatgtacagctgcagcattcctgaaagaattcgtaactcatcctaagtgggcacatttagacatagcaggcgtgatgaccaacaaagatgaagttccctatctacggaaaggcatgactgggaggcccacaaggactctcattgagttcttacttcgtttcagtcaagacaatgcttagttcagatactcaaaaatgtcttcactctgtcttaaattggacagttgaacttaaaaggtttttgaataaatggatgaaaatcttttaacggagacaaaggatggtatttaaaaatgtagaacacaatgaaatttgtatgccttgatttttttttcatttcacacaaagatttataaaggtaaagttaatatcttacttgataaggatttttaagatactctataaatgattaaaatttttagaacttcctaatcacttttcagagtatatgtttttcattgagaagcaaaattgtaactcagatttgtgatgctaggaacatgagcaaactgaaaattactatgcacttgtcagaaacaataaatgcaacttgttgtgctctaaaaaaaaaaaaaaacaaaagggggggggtataaaaaatccttggggggccaagttaaggttaccagtttttgggagaagggggccttaaggggcgaatataaggaaggtggcggcgtataaaactcggacgggaaatggtaacttgggattgggaggacctattctggggggagcataggccaaccacgagagaaggtcggataaatttaggtgttgggaacgcatggggaatgaggtttaa

SEQ ID NO: 308326 - DNA, 1645 bp, Homo sapiens
ggtggatccctgtggagacgctcaggctgctgcggagggagcgggcttggtctctatgaatacatcagagctgctgttgcagcggggtgcaggcagattcaagacctggagctctcgtctgtggaggtggatccctgtggagacgctcaggctgctgcggagggagcggtgcttggtctctatgaatacgatgacctaaagcaaaaaaagaagatggctgtgtcggcaaagctctatggaagtggggatcaggaggcctggcagaaaggagtcctgtttgcttctgggcagaacttggcacgccaattgatggagacgccagccaatgagatgacgccaaccagatttgccgaaattattgagaagaatctcaaaagtgctagtagtaaaaccgaggtccatatcagacccaagtcttggattgaggaacaggcaatgggatcattcctcagtgtggccaaaggatctgacgagcccccagtcttcttggaaattcactacaaaggcagccccaatgcaaacgaaccacccctggtgtttgttgggaaaggaattacctttgacagtggtggtatctccatcaaggcttctgcaaatatggacctcatgagggctgacatgggaggagctgcaactatatgctcagccatcgtgtctgctgcaaagcttaatttgcccattaatattataggtctggcccctctttgtgaaaatatgcccagcggcaaggccaacaagccgggggatgttgttagagccaaaaacgggaagaccatccaggttgataacactgatgctgaggggaggctcatactggctgatgcgctctgttacgcacacacgtttaacccgaaggtcatcctcaatgccgccaccttaacaggtgccatggatgtagctttgggatcaggtgccactggggtctttaccaattcatcctggctctggaacaaactcttcgaggccagcattgaaacaggggaccgtgtctggaggatgcctctcttcgaacattatacaagacaggttgtagattgccagcttgctgatgttaacaacattggaaaatacagatctgcaggagcatgtacagctgcagcattcctgaaagaattcgtaactcatcctaagtgggcacatttagacatagcaggcgtgatgaccaacaaagatgaagttccctatctacggaaaggcatgactgggaggcccacaaggactctcattgagttcttacttcgtttcagtcaagacaatgcttagttcagatactcaaaaatgtcttcactctgtcttaaattggacagttgaacttaaaaggtttttgaataaatggatgaaaatcttttaacggagacaaaggatggtatttaaaaatgtagaacacaatgaaatttgtatgccttgatttttttttcatttcacacaaagatttataaaggtaaagttaatatcttacttgataaggatttttaagatactctataaatgattaaaatttttagaacttcctaatcacttttcagagtatatgtttttcattgagaagcaaaattgtaactcagatttgtgatgctaggaacatgagcaaactgaaaattactatgcacttgtcagaaacaataaatgcaacttgttgtgctct

SEQ ID NO: 308327 - DNA, 1935 bp, Homo sapiens
tcatcatttccctgtcatttttaatcagagaagctcttggcaattgggaagcttcatcaggaaatcatagtgtttcagaaataatcctaggaataattgccacttcctgagagcctgtacggctctgggaggagctattcattctctccatcagcctgtcctcaccaccacctgggagtgaggtacttgctgtaaaatgcactcacgtcttcattttacagaagaggaaatgaggctcagaacattcgggtatcagggctgggatttgaaccccagggctgttttctcagcacatcacatcatgcctctgctgtctgctctttgagttgtcttggactgactccagttttctgattcctctgtcttttcaagcggggtgcaggcagattcaagacctggagctctcgtctgtggaggtggatccctgtggagacgctcaggctgctgcggagggagcggtgcttggtctctatgaatacgatgacctaaagcaaaaaaagaagatggctgtgtcggcaaagctctatggaagtggggatcaggaggcctggcagaaaggagtcctgtttgcttctgggcagaacttggcacgccaattgatggagacgccagccaatgagatgacgccaaccagatttgccgaaattattgagaagaatctcaaaagtgctagtagtaaaaccgaggtccatatcagacccaagtcttggattgaggaacaggcaatgggatcattcctcagtgtggccaaaggatctgacgagcccccagtcttcttggaaattcactacaaaggcagccccaatgcaaacgaaccacccctggtgtttgttgggaaaggaattacctttgacagtggtggtatctccatcaaggcttctgcaaatatggacctcatgagggctgacatgggaggagctgcaactatatgctcagccatcgtgtctgctgcaaagcttaatttgcccattaatattataggtctggcccctctttgtgaaaatatgcccagcggcaaggccaacaagccgggggatgttgttagagccaaaaacgggaagaccatccaggttgataacactgatgctgaggggaggctcatactggctgatgcgctctgttacgcacacacgtttaacccgaaggtcatcctcaatgccgccaccttaacaggtgccatggatgtagctttgggatcaggtgccactggggtctttaccaattcatcctggctctggaacaaactcttcgaggccagcattgaaacaggggaccgtgtctggaggatgcctctcttcgaacattatacaagacaggttgtagattgccagcttgctgatgttaacaacattggaaaatacagatctgcaggagcatgtacagctgcagcattcctgaaagaattcgtaactcatcctaagtgggcacatttagacatagcaggcgtgatgaccaacaaagatgaagttccctatctacggaaaggcatgactgggaggcccacaaggactctcattgagttcttacttcgtttcagtcaagacaatgcttagttcagatactcaaaaatgtcttcactctgtcttaaattggacagttgaacttaaaaggtttttgaataaatggatgaaaatcttttaacggagacaaaggatggtatttaaaaatgtagaacacaatgaaatttgtatgccttgatttttttttcatttcacacaaagatttataaaggtaaagttaatatcttacttgataaggatttttaagatactctataaatgattaaaatttttagaacttcctaatcacttttcagagtatatgtttttcattgagaagcaaaattgtaactcagatttgtgatgctaggaacatgagcaaactgaaaattactatgcacttgtcagaaacaataaatgcaacttgttgtgctct

SEQ ID NO: 308328 - DNA, 2020 bp, Homo sapiens
cgcacacgaatgcgggcgcacacgaatgcgggcgcacacgaatgcgggcgcacacgaatgcgggcgcacacgaatgcgggcgcacacgaatgcgggcgcacacgaatgcgggcgcacccttgagtcccctccacaaccgcggtttgatcccagcggtccagtcggccggtgctgcccatccgtcccgccccctagactcacgtccgtctcgcccggcgcccgagccagtccgcgcgcacgcgcgtctgcgtccccgaaagccccgcccgcaaggcgctgccctgcctacctggtctccgacgtgctcgctggagggcggtgcgaggggccgagccgacaagatgttcttgctgcctcttccggctgcggggcgagtagtcgtccgacgtctggccgtgagacgtttcgggagccggagtctctccaccgcagacatgacgaagggccttgttttaggaatctattccaaagaaaaagaagatgatgtgccacagttcacaagtgcaggagagaattttgataaattgttagctggaaagctgagagagactttgaacatatctggaccacctctgaaggcagggaagactcgaaccttttatggtctgcatcaggacttccccagcgtggtgctagttggcctcggcaaaaaggcagctggaatcgacgaacaggaaaactggcatgaaggcaaagaaaacatcagagctgctgttgcagcggggtgcaggcagattcaagacctggagctctcgtctgtggaggtggatccctgtggagacgctcaggctgctgcggagggagcggtgcttggtctctatgaatacgatgacctaaagcaaaaaaagaagatggctgtgtcggcaaagctctatggaagtggggatcaggaggcctggcagaaaggagtcctgtttgcttctgggcagaacttggcacgccaattgatggagacgccagccaatgagatgacgccaaccagatttgccgaaattattgagaagaatctcaaaagtgctagtagtaaaaccgaggtccatatcagacccaagtcttggattgaggaacaggcaatgggatcattcctcagtgtggccaaaggatctgacgagcccccagtcttcttggaaattcactacaaaggcagccccaatgcaaacgaaccacccctggtgtttgttgggaaaggaattacctttgacagtggtggtatctccatcaaggcttctgcaaatatggacctcatgagggctgacatgggaggagctgcaactatatgctcagccatcgtgtctgctgcaaagcttaatttgcccattaatattataggtctggcccctctttgtgaaaatatgcccagcggcaaggccaacaagccgggggatgttgttagagccaaaaacgggaagaccatccaggttgataacactgatgctgaggggaggctcatactggctgatgcgctctgttacgcacacacgtttaacccgaaggtcatcctcaatgccgccaccttaacaggtgccatggatgtagctttgggatcaggtgccactggggtctttaccaattcatcctggctctggaacaaactcttcgaggtaggaataatatttgtatatctaaattgtagagatggtgaataaattattctagccttagaaggatagacttcttcaaccctgtgttaaagtgatttttatgccgcaggtttgcctttgaattgaaaatgaaccacagcaatagattgagttcagtggcattgggttttccacaaatgctcctaaaggaggggatgatgccccctgctcccctccggtagcctcagcgtcctgtgaaaatatctcacgaacactgtggtcatagttttagaatccctgaggtagaaatggttttgaagatggctttgtggagcagcgtttgtgactgcgtgtcgtgagtcatataagggagttcaccctgcatcgatgaggatgtcttcagaccgctgtgctctgtgcctccctccatgcccttcaca

SEQ ID NO: 308329 - DNA, 674 bp, Homo sapiens
cttgactcttgttctttggttatagaatgtacttagcaaaaatgtgggatctcagtgcacatttacatggggttgtaaagtgctttttgtctttctcttcagatctgcaggagcatgtacagctgcagcattcctgaaagaattcgtaactcatcctaagtgggcacatttagacatagcaggcgtgatgaccaacaaagatgaagttccctatctacggaaaggcatgactgggaggcccacaaggactctcattgagttcttacttcgtttcagtcaagacaatgcttagttcagatactcaaaaatgtcttcactctgtcttaaattggacagttgaacttaaaaggtttttgaataaatggatgaaaatcttttaacggagacaaaggatggtatttaaaaatgtagaacacaatgaaatttgtatgccttgatttttttttcatttcacacaaagatttataaaggtaaagttaatatcttacttgataaggatttttaagatactctataaatgattaaaatttttagaacttcctaatcacttttcagagtatatgtttttcattgagaagcaaaattgtaactcagatttgtgatgctaggaacatgagcaaactgaaaattactatgcacttgtcagaaacaataaatgcaacttgttgtgctct

SEQ ID NO: 308330 - DNA, 870 bp, Homo sapiens
ggctcttttaaatgaccccaggcgtcgtgtattgaatcctagactcacgtccgtctcgcccggcgcccgagccagtccgcgcgcacgcgcgtctgcgtccccgaaagccccgcccgcaaggcgctgccctgcctacctggtctccgacgtgctcgctggagggcggtgcgaggggccgagccgacaagatgttcttgctgcctcttccggctgcggggcgagtagtcgtccgacgtctggccgtgagacgtttcgggagccggagtctctccaccgcagacatgacgaagggccttgttttaggaatctattccaaagaaaaagaagatgatgtgccacagttcacaagtgcaggagagaattttgataaattgttagctggaaagctgagagagactttgaacatatctggaccacctctgaaggcagggaagactcgaaccttttatggtctgcatcaggacttccccagcgtggtgctagttggcctcggcaaaaaggcagctggaatcgacgaacaggaaaactggcatgaaggcaaagaaaacatcagagctgctgttgcaggttatttcactttttaagtttaaagaatcctgaggatccactctttttgatgacctctctttcccctttttgtccttttaccagttgccaccccttaccacgttcacacagaaataattcatcttaacaaaaattcagttcctcttgctgaatatggttggccttatgataaatacagaaggttagctaatggaattttatttttaatatatctatatctcatttgggtgttttactaccatttgttcgctcttgtcatattagagctgtgtttcccagaacctgtagtgtatagattttttg

SEQ ID NO: 308331 - DNA, 4585 bp, Homo sapiens
attacaggtgtgaccgcgcctgtaatcccggcacggacgcgtgggcagcgatcgatgcggccttcagccgcgggggactaggcaaggaagaaggaaggagagggcagcggggccgcctgcagcaggaggctcggcggggccggcggggcagaggcgagaccgagtatagccagcggctcccagcctcggtggctttgggacagacacgcgaggcgcccgggaggtgccaccacaggtggagatccaagtggaggtgggagcggagctacatcacacgtttattgtgcattgattatgtgccagggaccatgctgccgataaacaccttgcatcatttaattctctgagcctctcctggaaagtatgatgctacccggttccacagacagggaaacaagcccagagagggcgacgaatgcactcaaggacagcagctagtgatgctgatgctgctggtccggggaacacactatgagaacctccggtctaaagtggtgctgccaacacccctaggagggaggagcactgaaacctttgtgagcgagttcccgggccccgacaccgggatccgctggcggcgaagcgacgaggcgctgcgcgtgaacgtgggtggcgtgcggcggcagctgagcgcgcgcgccctggcgcgcttcccgggcacgcggctgggccgcctgcaggccgcggcgtcggaggagcaggcgcggcgcctgtgcgacgactacgacgaggcggcgcgcgaattctacttcgaccggcacccgggcttcttcctgagcctgctgcacttctaccgcactggccacctgcacgtgctcgacgagctgtgcgtcttcgcctttggccaggaggccgactactggggcctaggcgagaacgcgcttgccgcgtgctgccgcgcgcgctacctggagaggcggctgacccagccgcacgcctgggacgaggacagcgacacgccgagcagcgtggacccgtgccccgacgagatctccgacgtgcagcgagaactggcgcgctatggcgcggcgcgctgtggccgcctgcgccgccgcctctggctgaccatggagaacccgggctactcgctgccgagcaagctcttcagctgcgtctccatcagcgtggtgctcgcctccatcgccgccatgtgcatccacagcctgcccgagtaccaggcccgcgaggcggcggccgccgtggctgcggtggccgcgggccgcagcccggaaggcgtgcgcgacgacccggtgctgcgacgcctcgagtacttctgcatcgcctggttcagcttcgaggtgtcgtcgcgcctcctgctggcgcccagtacgcgcaacttcttctgccacccgctcaacctcatcgacattgtgtctgtgctgcccttctatctcacgctgctggctggtgtggcactgggcgaccagggcggcaaggagttcggccacctgggcaaggtggtgcaggtgttccgcctcatgcgcatcttccgcgtactcaagttggcgcgccattccaccgggctgcgctcgctgggagccacgctcaagcacagctaccgtgaggtgggcatcttgctgctgtacctggctgtgggtgtgtcagtgttctctggtgtggcctacacagctgaaaaggaggaggacgtgggctttaacaccatcccagcctgctggtggtggggcacagtgagcatgaccaccgtgggctatggggatgtggtgccagtgacggtggctggcaagctggcagcctcaggctgcatcctagggggcatcctggtggtagcactccccatcaccatcatcttcaacaagttctcccacttctaccggcgccagaaggctctggaggcagccgtgcgcaacagcaaccaccaagagtttgaggacttgctgagcagcattgatggggtgtcggaggcatctctggagacatcccgagaaacctctcaggagggacagtctgcagatctagagagccaggcccccagtgagcctccacaccctcagatgtattaaaaccagggatccgtgaccccctgccatgcccctacagtagagattcctcccctgctaaagttcttcatggtagtgagcctcccaggatcactcatgctgtcctgagaaatgagattcaaaagctgcattccttcctccaaaggcccaggacaggacagtgctaccctagattctgtgagattctgcaagcaactcagaaagctttataaacctgcctccaagccattcatgaagcaggcatgaagccagaggggaggaagttgaaaggatactaatgattcctgagcacctcctgtacatgaaccaggtcatgtttggccttgtgttggagaaagagaattatccccacttcacagatgaggaaaccaaggctaagagatgagcgatgcctctcccagatgtcacaattagaagtggcagagtcaggtttggaatctgggcttgttggtgtgcctggagcaatgctccatcaactccatctttcttctgccctcatgaagtttgcgtgtgttttttggtgattcatggatccccagagttgatccacaagataagaaatccctttcagagccagggaagggtccagacaggagatttggatataggagctctggatctcagctgtggttcctttctaggagcatccaacaggagtcagcaatcaaagatgagtcctggagggaaggaggatgagtcctgggaggaagtaccatagcattgtacttgcctctttagctggtatgcaagatttgctaagcaataatcttccgaccttcctcccagggctgatgtgagagaaagaaaatctgaagggcccctggcctgagatctagacaacctagctgcgccaagacctgctgtgtaaagtggtccaatccctgcccccaagtccagattccagcccctctgtcaaatggtcagaatctgtgacccagaaggcaatgaaagccaaggagagcagaggggtctctaacttaaagccagctcagctctgaaatgttcagagggctgacatatatgaatactggcttctaagaccctcccccaacagtctgaccttggcagttcctttctgcccatcacacagacgtccagccctacattgtccagccctacctagagtacccatccaggcccatgtgtgagagtcctctcccttctggccagctccagccccctcacccttgctgggggcatatctctcatacccacctgctgaatcttctcttcacttgctgagaaagtcagaggaggggatccagtagccctttccacatactgtggctacagcacccagcactgtgctgttgttgtctgactgtggctatctctgtcccatcaccctgagcctcaagatggaagacattgtctgcttgaactctgggcttggtgcagagtaggtatttggtaaatgttgaatagatcaaccaattcctacagcccactgggtgccaagctcagagggggaaaaaaagatagccagagagagacctggacctcaaaaaggtgtgaacaagactgaaaaggaggtccgttcagctccgcctgccctgtccctgcttggttcttgaagtttttacaatatattccttgtaggttcttcactcactcactcaacaaatacccgttggaagagtcttaaactggggcttcatgtgtggcctgcagtcatgtttcggcttagtccaacagtgtttttattatattttaagaatctgaatgcctttgcgtgaggcatgcactctcaggttccccatagtgtctcccccgctgccacccacaaacagacacacatgccgttgtgttatgcccagccactctgatatactggcttctgacttatgggctgcttactagtctcaagagatacagtggtggaaaaatatatccctatactcatgaagcttaccgactagtagggaagatagactctaatgcaataatcacataaatatagcgagctctactaagtacaggtgtgtataatgtatcagggaccatggcccgagaaagtgagaaagctttcctgagcaagtgacaatctaacctgccatccaaatgataaattgctaattaagcaaatgaggttccaggggggagtactccaagcagagagaatggcatgtgtgaaggtgtgtgtcatacacagggcctagtacatagtgggccccctacatacgcatggattctgggtctccagattggaacagaggatggagctaagcagcaaagggcctcccttgaattcaccacacacataccagcccttctgcacactctgctccttacatctaggcccagctgaacccaggttaggggcagatcagaagggctgcgtgtagcacccttatggtcttgcagaacacaccaagaaacccgacggcttccatattttctgaccctacaaacaggtccctaatactgatgtggagaaagctcaagagggaatcatctggcctgagcctaccatgaggctgtttgtggttcctggcagaaaagcaacaactcgctccccttcccatgtatcagtgaaaaccattatgcaaataaagagctggcccccg

SEQ ID NO: 308332 - DNA, 2561 bp, Homo sapiens
cggagttaaggccggggggaggcggcgagtcccgcggcggcggcgacgatggggctgcgtgcaggaggaacgctgggcagggccggcgcgggtcggggggcgcccgaggggcccgggccgagcggcggcgcgcagggcggcagcatccactcgggccgcatcgccgcggtgcacaacgtgccgctgagcgtgctcatccggccgctgccgtccgtgttggaccccgccaaggtgcagagcctcgtggacacgatccgggaggacccagacagcgtgccccccatcgatgtcctctggatcaaaggggcccagggaggtgactacttctactcctttgggggctgccaccgctacgcggcctaccagcaactgcagcgagagaccatccccgccaagcttgtccagtccactctctcagacctaagggtgtacctgggagcatccacaccagacttgcagtagcagcctccttggcacctgctgccaccttcaagagcccagaagacacacctggcctccagcaggctgggccatgcagaagggatagcaggggtgcattctctttgcacctggcgagagggtctgactctgggcacccctctcaccagctacaaggccttggactcactgtacagtgtgggagccccagttcccacctctgtgacaataggatcatggccttacccttgaagcattaccgagaaggagaacagagatgggcttgaagagccacgtgctgccggctccaaattcccaaggacaaggatccctctgcatttttgtctatgtaacctcttatatggactacattcagctgcaaggaaaggaaaaccttgattgcagtggtttaaacaaacagaagattgtttttccacatagcatggattctggagatgggtggctaatggtattggttcaacaactccacgaaggtaggggtcacgtcttggatccttttgccttaatctcagtgctcgttacttcatggtcccaagatggctgctgtatccccaagaatcatgtctgcgttcaaggaaggaggggtggaggaagaggaagggccaaactagctggacccgtcaccttctatcagaaagtaaaacctcgtcagaagtctgtttcctgctctctccctctgcatatcttcacttagatgcccttggcccgagccagctaccattgcacctctagctgcaaacaaagctaagacagcagggaacagaattgtcatggctgaatagaccaatcgtgttccatctactgagactggcacactgcctcctgcaataaaactgggatcccattaccaagagagaaatgcagaattgtgtaccagttagcttttgctgtgtaacaaaccatccccaaacttggcagctagaaacaaaccctgtattttcccacaatcctatgggttggcaatttgggctgggctcaacagggcagttctgctgctcacacctgggatccctcatggagctaaggtcagctgttacctcagctgggcctggatggtctaggatagccttactcacttgcctggcaggtgacaggctgttggctggaattgcttggttctcctccatgtggcctctccagcaggctagctcaggcttattcacatgatggcttcaggattccaaagagagtgagagtagaagctgaaagacttcttgagttcttggcctggaactgggactaggacagtgtcacttctgctaagttcttttggtcagagcaaatcacaaggctttacccagattcaagggatgagaaacagactacatgtcttgatgaggggaaccacaaagagcttgtggccatttttcacctatcacaaataattttggatgggtatttatttggataaaggtatttccctcttccccctttctctctgtctcatggggcctcactctgccaagttggaaggcactaagacattgtcctggccctcagggtctaggggaagaggtgttggggcaggaagtgagtctctccatgggctggacccactgtagtaggagtgcctccttgtctgcactgctggtatggggttaggccaggtaggacattccagaggggcttctgaaaaccaagagtccctggggaaagggaacagagtaaggcaggccttgttctcactgccctctaagggaacttggtcactcggcacttttaagcctcagtttctccagttcaataataaggacaagagcttttcccatgcattctctttccccgggaaagttgactgaggtgaccagtaatagaattgaaaagggagagtgtcttcagtgcaatgtggcatcctggattgggtcttggaacaaaaacaggacattagtgggaaaattggaaatctgaaaaaagtctgaattttagttaatataccaatttcagtctcttggttttgacagatgtaccatggtgatgtaagatgttgaccttggggtaggctgggtgaagggtatacaggaactctttgtactatctctgcaacttctctgtaaatctagtatcattccaaaataaaagtttatttaatttaaaaaaaaaaa

SEQ ID NO: 308333 - DNA, 1658 bp, Homo sapiens
actgagattaaggcaaaaggatccaagacgtgacccctaccttcgtgctcgttacttcattggtcgcctaacgatggctgtcgtgtccaccaatgaagtaacgagcactgagaatcatgtctgcgttcaaggaaggaggggtggaggaagaggaagggccaaactagctggacccgtcaccttctatcagaaagtaaaacctcgtcagaagtctgtttcctgctctctccctctgcatatcttcacttagatgcccttggcccgagccagctaccattgcacctctagctgcaaacaaagctaagacagcagggaacagaattgtcatggctgaatagaccaatcgtgttccatctactgagactggcacactgcctcctgcaataaaactgggatcccattaccaagagagaaatgcagaattgtgtaccagttagcttttgctgtgtaacaaaccatccccaaacttggcagctagaaacaaaccctgtattttcccacaatcctatgggttggcaatttgggctgggctcaacagggcagttctgctgctcacacctgggatccctcatggagctaaggtcagctgttacctcagctgggcctggatggtctaggatagccttactcacttgcctggcaggtgacaggctgttggctggaattgcttggttctcctccatgtggcctctccagcaggctagctcaggcttattcacatgatggcttcaggattccaaagagagtgagagtagaagctgaaagacttcttgagttcttggcctggaactgggactaggacagtgtcacttctgctaagttcttttggtcagagcaaatcacaaggctttacccagattcaagggatgagaaacagactacatgtcttgatgaggggaaccacaaagagcttgtggccatttttcacctatcacaaataattttggatgggtatttatttggataaaggtatttccctcttccccctttctctctgtctcatggggcctcactctgccaagttggaaggcactaagacattgtcctggccctcagggtctaggggaagaggtgttggggcaggaagtgagtctctccatgggctggacccactgtagtaggagtgcctccttgtctgcactgctggtatggggttaggccaggtaggacattccagaggggcttctgaaaaccaagagtccctggggaaagggaacagagtaaggcaggccttgttctcactgccctctaagggaacttggtcactcggcacttttaagcctcagtttctccagttcaataataaggacaagagcttttcccatgcattctctttccccgggaaagttgactgaggtgaccagtaatagaattgaaaagggagagtgtcttcagtgcaatgtggcatcctggattgggtcttggaacaaaaacaggacattagtgggaaaattggaaatctgaaaaaagtctgaattttagttaatataccaatttcagtctcttggttttgacagatgtaccatggtgatgtaagatgttgaccttggggtaggctgggtgaagggtatacaggaactctttgtactatctctgcaacttctctgtaaatctagtatcattccaaaataaaagtttatttaatttaaaaaaaaaaa

SEQ ID NO: 308334 - DNA, 2771 bp, Homo sapiens
cggagttaaggccggggggaggcggcgagtcccgcggcggcggcgacgatggggctgcgtgcaggaggaacgctgggcagggccggcgcgggtcggggggcgcccgaggggcccgggccgagcggcggcgcgcagggcggcagcatccactcgggccgcatcgccgcggtgcacaacgtgccgctgagcgtgctcatccggccgctgccgtccgtgttggaccccgccaaggtgcagagcctcgtggacacgatccgggaggacccagacagcgtgccccccatcgatgtcctctggatcaaaggggcccagggaggtgactacttctactcctttgggggctgccaccgctacgcggcctaccagcaactgcagcgagagaccatccccgccaagcttgtccagtccactctctcagacctaagggtgtacctgggagcatccacaccagacttgcagtagcagcctccttggcacctgctgccaccttcaagagcccagaagacacacctggcctccagcaggctgggccatgcagaagggatagcaggggtgcattctctttgcacctggcgagagggtctgactctgggcacccctctcaccagctacaaggccttggactcactgtacagtgtgggagccccagttcccacctctgtgacaataggatcatggccttacccttgaagcattaccgagaaggagaacagagatgggcttgaagagccacgtgctgccggctccaaattcccaaggacaaggatccctctgcatttttgtctatgtaacctcttatatggactacattcagctgcaaggaaaggaaaaccttgattgcagtggtttaaacaaacagaagattgtttttccacatagcatggattctggagatgggtggctaatggtattggttcaacaactccacgaaggtaggggtcacgtcttggatccttttgccttaatctcagtgctcgttacttcatggtcccaagatggctgctgtatccccaagaatcatgtctgcgttcaaggaaggaggggtggaggaagaggaagggccaaactagctggacccgtcaccttctatcagaaagtaaaacctcgtcagaagtctgtttcctgctctctccctctgcatatcttcacttagatgcccttggcccgagccagctaccattgcacctctagctgcaaacaaagctaagacagcagggaacagaattgtcatggctgaatagaccaatcgtgttccatctactgagactggcacactgcctcctgcaataaaactgggatcccattaccaagagagaaatgcagaattgtgtaccagttagcttttgctgtgtaacaaaccatccccaaacttggcagctagaaacaaaccctgtattttcccacaatcctatgggttggcaatttgggctgggctcaacagggcagttctgctgctcacacctgggatccctcatggagctaaggtcagctgttacctcagctgggcctggatggtctaggatagccttactcacttgcctggcaggtgacaggctgttggctggaattgcttggttctcctccatgtggcctctccagcaggctagctcaggcttattcacatgatggcttcaggattccaaagagagtgagagtagaagctgaaagacttcttgagttcttggcctggaactgggactaggacagtgtcacttctgctaagttcttttggtcagagcaaatcacaaggctttacccagattcaagggatgagaaacagactacatgtcttgatgaggggaaccacaaagagcttgtggccatttttcacctatcacaaataattttggatgggtatttatttggataaaggtatttccctcttccccctttctctctgtctcatggggcctcactctgccaagttggaaggcactaagacattgtcctggccctcagggtctaggggaagaggtgttggggcaggaagtgagtctctccatgggctggacccactgtagtaggagtgcctccttgtctgcactgctggtatggggttaggccaggtaggacattccagaggggcttctgaaaaccaagagtccctggggaaagggaacagagtaaggcaggccttgttctcactgccctctaagggaacttggtcactcggcacttttaagcctcagtttctccagttcaataataaggacaagagcttttcccatgcattctctttccccgggaaagttgactgaggtgaccagtaatagaattgaaaagggagagtgtcttcagtgcaatgtggcatcctggattgggtcttggaacaaaaacaggacattagtgggaaaattggaaatctgaaaaaagtctgaattttagttaatataccaatttcagtctcttggttttgacagatgtaccatggtgatgtaagatgttgaccttggggtaggctgggtgaagggtatacaggaactctttgtactatctctgcaacttctctgtaaatctagtatcattccaaaataaaagtttatttaatttaaaaaaaaaaaaaaaaaaaaaaaaaaatacaaaacaaaaaacaaaaaatcacatagaacaacaaagaacatcaaagaacaacaaaaacacacactggtgtgcggcggcgcgcgctgggcggccgcccgggagaagactttctgcagaaaccccttggggggggggggcggggcccccatgggtatacgagcacgcggggcacagggggccccagaggaacg

SEQ ID NO: 308335 - DNA, 2367 bp, Homo sapiens
  misc_feature (2348)..(2348): n is a, c, g, or t
  misc_feature (2361)..(2361): n is a, c, g, or t
cggagttaaggccggggggaggcggcgagtcccgcggcggcggcgacgatggggctgcgtgcaggaggaacgctgggcagggccggcgcgggtcggggggcgcccgaggggcccgggccgagcggcggcgcgcagggcggcagcatccactcgggccgcatcgccgcggtgcacaacgtgccgctgagcgtgctcatccggccgctgccgtccgtgttggaccccgccaaggtgcagagcctcgtggacacgatccgggaggacccagacagcgtgccccccatcgatgtcctctggatcaaaggggcccagggaggtgactacttctactcctttgggggctgccaccgctacgcggcctaccagcaactgcagcgagagaccatccccgccaagcttgtccagtccactctctcagacctaagggtgtacctgggagcatccacaccagacttgcagtagcagcctccttggcacctgctgccaccttcaagagcccagaagacacacctggcctccagcaggctgggccatgcagaagggatagcaggggtgcattctctttgcacctggcgagagggtctgactctgggcacccctctcaccagctacaaggccttggactcactgtacagtgtgggagccccagttcccacctctgtgacaataggatcatggccttacccttgaagcattaccgagaaggagaacagagatgggcttgaagagccacgtgctgccggctccaaattcccaaggacaaggatccctctgcatttttgtctatgtaacctcttatatggactacattcagctgcaaggaaaggaaaaccttgattgcagtggtttaaacaaacagaagattgtttttccacatagcatggattctggagatgggtggctaatggtattggttcaacaactccacgaaggtaggggtcacgtcttggatccttttgccttaatctcagtgctcgttacttcatggtcccaagatggctgctgtatccccaagaatcatgtctgcgttcaaggaaggaggggtggaggaagaggaagggccaaactagctggacccgtcaccttctatcagaaagtaaaacctcgtcagaagtctgtttcctgctctctccctctgcatatcttcacttagatgcccttggcccgagccagctaccattgcacctctagctgcaaacaaagctaagacagcagggaacagaattgtcatggctgaatagaccaatcgtgttccatctactgagactggcacactgcctcctgcaataaaactgggatcccattaccaagagagaaatgcagaattgtgtaccagttagcttttgctgtgtaacaaaccatccccaaacttggcagctagaaacaaaccctgtattttcccacaatcctatgggttggcaatttgggctgggctcaacagggcagttctgctgctcacacctgggatccctcatggagctaaggtcagctgttacctcagctgggcctggatggtctaggatagccttactcacttgcctggcaggtgacaggctgttggctggaattgcttggttctcctccatgtggcctctccagcaggctagctcaggcttattcacatgatggcttcaggattccaaagagagtgagagtagaagctgaaagacttcttgagttcttggcctggaactgggactaggacagtgtcacttctgctaagttcttttggtcagagcaaatcacaaggctttacccagattcaagggatgagaaacagactacatgtcttgatgaggggaaccacaaagagcttgtggccatttttcacctatcacaaataattttggatgggtatttatttggataaaggtatttccctcttccccctttctctctgtctcatggggcctcactctgccaagttggaaggcactaagacattgtcctggccctcagggtctaggggaagaggtgttggggcaggaagtgagtctctccatgggctggacccactgtagtaggagtgcctccttgtctgcactgctggtatggggttaggccaggtaggacattccagaggggcttctgaaaaccaagagtccctggggaaagggaacagagtaaggcaggccttgttctcactgccctctaagggaacttggtcactcggcacttttaagcctcagtttctccagttcaataataaggacaagagcttttcccatgcattctctttccccgggaaagttgactgaggtgaccagtaatagaattgaaaagggagagtgtcttcagtgcaatgtggcacgttttcgggtgttttttttttttttttttttgggttnggttttcggaganctttcc

SEQ ID NO: 308336 - DNA, 2538 bp, Homo sapiens
cggagttaaggccggggggaggcggcgagtcccgcggcggcggcgacgatggggctgcgtgcaggaggaacgctgggcagggccggcgcgggtcggggggcgcccgaggggcccgggccgagcggcggcgcgcagggcggcagcatccactcgggccgcatcgccgcggtgcacaacgtgccgctgagcgtgctcatccggccgctgccgtccgtgttggaccccgccaaggtgcagagcctcgtggacacgatccgggaggacccagacagcgtgccccccatcgatgtcctctggatcaaaggggcccagggaggtgactacttctactcctttgggggctgccaccgctacgcggcctaccagcaactgcagcgagagaccatccccgccaagcttgtccagtccactctctcagacctaagggtgtacctgggagcatccacaccagacttgcagtagcagcctccttggcacctgctgccaccttcaagagcccagaagacacacctggcctccagcaggctgggccatgcagaagggatagcaggggtgcattctctttgcacctggcgagagggtctgactctgggcacccctctcaccagctacaaggccttggactcactgtacagtgtgggagccccagttcccacctctgtgacaataggatcatggccttacccttgaagcattaccgagaaggagaacagagatgggcttgaagagccacgtgctgccggctccaaattcccaaggacaaggatccctctgcatttttgtctatgtaacctcttatatggactacattcagctgcaaggaaaggaaaaccttgattgcagtggtttaaacaaacagaagattgtttttccacatagcatggattctggagatgggtggctaatggtattggttcaacaactccacgaaggtaggggtcacgtcttggatccttttgccttaatctcagtgctcgttacttcatggtcccaagatggctgctgtatccccaagaatcatgtctgcgttcaaggaaggaggggtggaggaagaggaagggccaaactagctggacccgtcaccttctatcagaaagtaaaacctcgtcagaagtctgtttcctgctctctccctctgcatatcttcacttagatgcccttggcccgagccagctaccattgcacctctagctgcaaacaaagctaagacagcagggaacagaattgtcatggctgaatagaccaatcgtgttccatctactgagactggcacactgcctcctgcaataaaactgggatcccattaccaagagagaaatgcagaattgtgtaccagttagcttttgctgtgtaacaaaccatccccaaacttggcagctagaaacaaaccctgtattttcccacaatcctatgggttggcaatttgggctgggctcaacagggcagttctgctgctcacacctgggatccctcatggagctaaggtcagctgttacctcagctgggcctggatggtctaggatagccttactcacttgcctggcaggtgacaggctgttggctggaattgcttggttctcctccatgtggcctctccagcaggctagctcaggcttattcacatgatggcttcaggattccaaagagagtgagagtagaagctgaaagacttcttgagttcttggcctggaactgggactaggacagtgtcacttctgctaagttcttttggtcagagcaaatcacaaggctttacccagattcaagggatgagaaacagactacatgtcttgatgaggggaaccacaaagagcttgtggccatttttcacctatcacaaataattttggatgggtatttatttggataaaggtatttccctcttccccctttctctctgtctcatggggcctcactctgccaagttggaaggcactaagacattgtcctggccctcagggtctaggggaagaggtgttggggcaggaagtgagtctctccatgggctggacccactgtagtaggagtgcctccttgtctgcactgctggtatggggttaggccaggtaggacattccagaggggcttctgaaaaccaagagtccctggggaaagggaacagagtaaggcaggccttgttctcactgccctctaagggaacttggtcactcggcacttttaagcctcagtttctccagttcaataataaggacaagagcttttcccatgcattctctttccccgggaaagttgactgaggtgaccatgtcttcagtgcaatgtggcatcctggattgggtcttggaacaaaaacaggacattagtgggaaaattggaaatctgaaaaaagtctgaattttagttaatataccaatttcagtctcttggttttgacagatgtaccatggtgatgtaagatgttgaccttggggtaggctgggtgaagggtatacaggaactctttgtactatctctgcaacttctctgtaaatctagtatcattccaaaataaaagtttatttaatttaaaaaaaaaaa

SEQ ID NO: 308337 - DNA, 1513 bp, Homo sapiens
cggagttaaggccggggggaggcggcgagtcccgcggcggcggcgacgatggggctgcgtgcaggaggaacgctgggcagggccggcgcgggtcggggggcgcccgaggggcccgggccgagcggcggcgcgcagggcggcagcatccactcgggccgcatcgccgcggtgcacaacgtgccgctgagcgtgctcatccggccgctgccgtccgtgttggaccccgccaaggtgcagagcctcgtggacacgatccgggaggacccagacagcgtgccccccatcgatgtcctctggatcaaaggggcccagggaggtgactacttctactcctttgggggctgccaccgctacgcggcctaccagcaactgcagcgagagaccatccccgccaagcttgtccagtccactctctcagacctaagggtgtacctgggagcatccacaccagacttgcagtagcagcctccttggcacctgctgccaccttcaagagcccagaagacacacctggcctccagcaggctgggccatgcagaagggatagcaggggtgcattctctttgcacctggcgagagggtctgactctgggcacccctctcaccagctacaaggccttggactcactgtacagtgtgggagccccagttcccacctctgtgacaataggatcatggccttacccttgaagcattaccgagaaggagaacagagatgggcttgaagagccacgtgctgccggctccaaattcccaaggacaaggatccctctgcatttttgtctatgtaacctcttatatggactacattcagctgcaaggaaaggaaaaccttgattgcagtggtttaaacaaacagaagattgtttttccacatagcatggattctggagatgggtggctaatggtattggttcaacaactccacgaaggtaggggtcacgtcttggatccttttgccttaatctcagtgctcgttacttcatggtcccaagatggctgctgtatccccagccaggtaggacattccagaggggcttctgaaaaccaagagtccctggggaaagggaacagagtaaggcaggccttgttctcactgccctctaagggaacttggtcactcggcacttttaagcctcagtttctccagttcaataataaggacaagagcttttcccatgcattctctttccccgggaaagttgactgaggtgaccagtaatagaattgaaaagggagagtgtcttcagtgcaatgtggcatcctggattgggtcttggaacaaaaacaggacattagtgggaaaattggaaatctgaaaaaagtctgaattttagttaatataccaatttcagtctcttggttttgacagatgtaccatggtgatgtaagatgttgaccttggggtaggctgggtgaagggtatacaggaactctttgtactatctctgcaacttctctgtaaatctagtatcattccaaaataaaagtttatttaatttaaaaaaaaaaa

SEQ ID NO: 308338 - DNA, 465 bp, Homo sapiens
gcctgtcttctgagtgctgtcgggctagtcgggcggggcttgtcttcagtggccttgcagggatgttggtttgtcggtggtcgtcgtcctcagtttctccagttcaataataaggacaagagcttttcccatgcattctctttccccgggaaagttgactgaggtgaccagtaatagaattgaaaagggagagtgtcttcagtgcaatgtggcatcctggattgggtcttggaacaaaaacaggacattagtgggaaaattggaaatctgaaaaaagtctgaattttagttaatataccaatttcagtctcttggttttgacagatgtaccatggtgatgtaagatgttgaccttggggtaggctgggtgaagggtatacaggaactctttgtactatctctgcaacttctctgtaaatctagtatcattccaaaataaaagtttatttaatttaaaaaaaaaaa

SEQ ID NO: 308339 - DNA, 1612 bp, Homo sapiens
ccgcccacggggtgcgggtcccaggaggaccagcagagaggagcataggagagcaaaggagatcagtgacccatggcttccccggtggcgcggaacagcccggagccgcctgtgatttgcatacccatggtgcaccacgaaaagataccctcaagatgcttgcactccctctgtgcgcgcatttctgcactgttttagagcatgatgcctcttacacgcatctgtgtgcataaactacatatagggagtgcgtaccacgcaggcatccaacaaccataagtgtgttaagtgttagttctccctgcgaggttcgaagcggaagtcacgaatatactcgggtttctcttcaaagcgcataaatctttcgccttttactaaagatttccgtggagagaaagttgtgagtttttattcaattttttgaggcctcttatttcctgaggctacatttttaagtattaaaagttaggcaactacaaccaaggaacttggtcatttgttatttgtaccaaatgttcacaaacttattcgggcgtggtggtgcctgtttgcaatcccacctattggagaagctggggcgggagagtctcttgactctagaagacggaggttgtagtgatccgagatcgcgccactgccctctagtcagagtggcagagactcctggggcgggagagtctcttgactctagaagacggaggttgtagtgatccgagatcgcgccactgccctctagtcagagtgacagagattcagtgtaaaacaaaaaaaaaaatcagaagtttgcgtgacaccttgttttgagctacatttggggtttattggcttctgcagtgtgcagtaagactggcttctattgtttatttcttgcgtttttgttgcatttcgttgcagatttaagagataaacagtggaaggcgctttcaagtcgtccggtcattaattaagccttattgtggctagaggttcaggggcggtatatcgcgccaaccaaactccttgttctattcccagagacagtagctgttagcggtttggtgtggctcttccagactgatttttttttcccaactcgattgcgaatccaaacacagtttatgtggtgaagagacaaggttccttctcctatggagcttttttcttttgagatggagtctcactttgtcacccaggctggagtgcagtggctcaatctcggctggagtgcagtggcgcgatctcggctcactgcaacctccacctcccgggttcaagcgattctcctcctcagcctcccaagtagctgggactacaggtgcccaccaccatgcccggctaattttgttgccctctttttaatgggattatttgttaagttgtttgagttttcgtgtattttggtattagtcccctgctaaataaatagtttgtagatattttctcccattttacaagttgtctgttcactctgttgattatttcttgggctgtgcagaagcttcttgtttaataattcccatttgcctactttttaaattgcctatgcttttgatgttttagtgacaaattttttgccccgaccaatgcttataagagttatccttagatcttttcttagtatttattgaaatgg

SEQ ID NO: 308340 - DNA, 1202 bp, Homo sapiens
ccggtggggcgggaagcccggcttctggggaggtgccgcccctccactggcgcaggccgccgagacccccagacggacctcctagggctaatctgatagtgcctctgaggtcgataggactccacgtgccactccctgcagggtcatccagcaagtaattcctagacccgtaggtggccgcagagccggttacctctggttctgcgccagcgtgccccacccgcaggacggccgggttctttgatttgtacactttctaaaaccaaacccgagaggaagggcaggctcagggtggggatgccctgaaatattcgagagcaggaccgtttctactgaagagaagtttacaagaacgctctgtctggggcgggcgaggcctctgcgaggcgggtccgggagcgagggcagggcgtgggccgcgcgcccggggtcgggggagtcgggggcaggaagagggggaggagacagggctgggggagcgccctgccgagcgcccgccaggctcctcccgctcccgcaccgcctccctctacccacccgccgcacgtactaaggaaggcgcacagcccgccgcgctcgcctctccgccccgcgtccagctcgcccagctcgcccagcgtccgccgcgcctcggccaaggcttcaacggaccacaccaaaatgccatctcaaatggaacacgccatggaaaccatgatgtttacatttcacaaattcgctggggataaaggctacttaacaaaggaggacctgagagtactcatggaaaaggagttccctggatttttggaaaatcaaaaagaccctctggctgtggacaaaataatgaaggacctggaccagtgtagagatggcaaagtgggcttccagagcttcttttccctaattgcgggcctcaccattgcatgcaatgactattttgtagtacacatgaagcagaagggaaagaagtaggcagaaatgagcagttcgctcctccctgataagagttgtcccaaagggtcgcttaaggaatctgccccacagcttcccccatagaaggatttcatgagcagatcaggacacttagcaaatgtaaaaataaaatctaactctcatttgacaagcagagaaagaaaagttaaataccagataagcttttgatttttgtattgtttgcatccccttgccctcaataaataaagttcttttttagttccaaa

SEQ ID NO: 308341 - DNA, 623 bp, Homo sapiens
agtgagtcacacctggtctggctgccagtctgcaggagaggtttctcgactgaactgccggcttcaacggaccacaccaaaatgccatctcaaatggaacacgccatggaaaccatgatgtttacatttcacaaattcgctggggataaaggctacttaacaaaggaggacctgagagtactcatggaaaaggagttccctggatttttggaaaatcaaaaagaccctctggctgtggacaaaataatgaaggacctggaccagtgtagagatggcaaagtgggcttccagagcttcttttccctaattgcgggcctcaccattgcatgcaatgactattttgtagtacacatgaagcagaagggaaagaagtaggcagaaatgagcagttcgctcctccctgataagagttgtcccaaagggtcgcttaaggaatctgccccacagcttcccccatagaaggatttcatgagcagatcaggacacttagcaaatgtaaaaataaaatctaactctcatttgacaagcagagaaagaaaagttaaataccagataagcttttgatttttgtattgtttgcatccccttgccctcaataaataaagttcttttttagttccaaa

SEQ ID NO: 308342 - DNA, 1333 bp, Homo sapiens
  misc_feature (1234)..(1234): n is a, c, g, or t
  misc_feature (1239)..(1239): n is a, c, g, or t
  misc_feature (1243)..(1243): n is a, c, g, or t
  misc_feature (1245)..(1245): n is a, c, g, or t
ccggtggggcgggaagcccggcttctggggaggtgccgcccctccactggcgcaggccgccgagacccccagacggacctcctagggctaatctgatagtgcctctgaggtcgataggactccacgtgccactccctgcagggtcatccagcaagtaattcctagacccgtaggtggccgcagagccggttacctctggttctgcgccagcgtgccccacccgcaggacggccgggttctttgatttgtacactttctaaaaccaaacccgagaggaagggcaggctcagggtggggatgccctgaaatattcgagagcaggaccgtttctactgaagagaagtttacaagaacgctctgtctggggcgggcgaggcctctgcgaggcgggtccgggagcgagggcagggcgtgggccgcgcgcccggggtcgggggagtcgggggcaggaagagggggaggagacagggctgggggagcgccctgccgagcgcccgccaggctcctcccgctcccgcaccgcctccctctacccacccgccgcacgtactaaggaaggcgcacagcccgccgcgctcgcctctccgccccgcgtccagctcgcccagctcgcccagcgtccgccgcgcctcggccaaggcttcaacggaccacaccaaaatgccatctcaaatggaacacgccatggaaaccatgatgtttacatttcacaaattcgctggggataaaggctacttaacaaaggaggacctgagagtactcatggaaaaggagttccctggatttttggaaaatcaaaaagaccctctggctgtggacaaaataatgaaggacctggaccagtgtagagatggcaaagtgggcttccagagcttcttttccctaattgcgggcctcaccattgcatgcaatgactattttgtagtacacatgaagcagaagggaaagaagtaggcagaaatgagcagttcgctcctccctgataagagttgtcccaaagggtcgcttaaggaatctgccccacagcttcccccatagaaggatttcatgagcagatcaggacacttagcaaatgtaaaaataaaatctaactctcatttgacaagcagagaaagaaaagttaaataccagataagcttttgatttttgtattgtttgcatccccttgccctcaataaataaagttcttttttagttccaaaaaaaaaaaacaaaaacaacacacaacacaacncaccncatnanacatcaaaacacgaacagtgagacaaagacagagcacagcaacagtcgaaaatcaagaagaagcccagcacaccacgcagggaacagc

SEQ ID NO: 308343 - DNA, 379 bp, Homo sapiens
  misc_feature (78)..(78): n is a, c, g, or t
  misc_feature (81)..(81): n is a, c, g, or t
  misc_feature (84)..(84): n is a, c, g, or t
  misc_feature (87)..(87): n is a, c, g, or t
  misc_feature (111)..(111): n is a, c, g, or t
gggggtattaaaaggggttttaacaccccaaacccccaaacttgtggtaaaaaaagggcccaacggataaaaaaaggnggnggnaanaaaaagaaataagggttgaagggnggccacgaaaaatataggagggcagagtttcgcgctcctctcccctagataaaagttgtcccaaagggtcgcttaaggaatctgccccacagcttcccccatagaaggatttcatgagcagatcaggacacttagcaaatgtaaaaataaaatctaactctcatttgacaagcagagaaagaaaagttaaataccagataagcttttgatttttgtattgtttgcatccccttgccctcaataaataaagttcttttttagttccaaa

SEQ ID NO: 308344 - DNA, 898 bp, Homo sapiens
  misc_feature (809)..(809): n is a, c, g, or t
  misc_feature (842)..(843): n is a, c, g, or t
  misc_feature (871)..(871): n is a, c, g, or t
  misc_feature (881)..(881): n is a, c, g, or t
ccggtggggcgggaagcccggcttctggggaggtgccgcccctccactggcgcaggccgccgagacccccagacggacctcctagggctaatctgatagtgcctctgaggtcgataggactccacgtgccactccctgcagggtcatccagcaagtaattcctagacccgtaggtggccgcagagccggttacctctggttctgcgccagcgtgccccacccgcaggacggccgggttctttgatttgtacactttctaaaaccaaacccgagaggaagggcaggctcagggtggggatgccctgaaatattcgagagcaggaccgtttctactgaagagaagtttacaagaacgctctgtctggggcgggcgaggcctctgcgaggcgggtccgggagcgagggcagggcgtgggccgcgcgcccggggtcgggggagtcgggggcaggaagagggggaggagacagggctgggggagcgccctgccgagcgcccgccaggctcctcccgctcccgcaccgcctccctctacccacccgccgcacgtactaaggaaggcgcacagcccgccgcgctcgcctctccgccccgcgtccagctcgcccagctcgcccagcgtccgccgcgcctcggccaaggcttcaacggaccacaccaaaatgccatctcaaatggaacacgccatggaaaccatgatgtttacatttcacaaattcgctggggataaaggctacttaacaaaggaggacctgagagtactcatggaaaaggagttccctggatttttggaaaatcaaaaaagaccctntggtttgtggacaaaaataaatgaagggacctnntaccaattgttaaagatggccaaaagtngggcctttcnagaagattttttttttc

SEQ ID NO: 308345 - DNA, 1388 bp, Homo sapiens
ccggtggggcgggaagcccggcttctggggaggtgccgcccctccactggcgcaggccgccgagacccccagacggacctcctagggctaatctgatagtgcctctgaggtcgataggactccacgtgccactccctgcagggtcatccagcaagtaattcctagacccgtaggtggccgcagagccggttacctctggttctgcgccagcgtgccccacccgcaggacggccgggttctttgatttgtacactttctaaaaccaaacccgagaggaagggcaggctcagggtggggatgccctgaaatattcgagagcaggaccgtttctactgaagagaagtttacaagaacgctctgtctggggcgggcgaggcctctgcgaggcgggtccgggagcgagggcagggcgtgggccgcgcgcccggggtcgggggagtcgggggcaggaagagggggaggagacagggctgggggagcgccctgccgagcgcccgccaggctcctcccgctcccgcaccgcctccctctacccacccgccgcacgtactaaggaaggcgcacagcccgccgcgctcgcctctccgccccgcgtccagctcgcccagctcgcccagcgtccgccgcgcctcggccaaggtgagctccgcccggcccacgcgcccctcctgggtagtccccaggcccggacctgctgcccggggaaaaccctgcacccggcttcgcggggcgtccggagcaccgcggggctgggcggggagcggctggtggggaatccgctgctcagtgctccgggccacacccaaacgaggccagcagcgcccctccccggcccgggcgcggccgcccccagacccacgcggaccagaggagggggcacttgttctttaggaggggaccgtggtattggtgcgcctgaacctcttccctcctccctttatgtttgcgttgctttactcccacctttcctactttcccactcgtctctcgggttaccgaatccctcctacacgcccctgccctggctggcgtgtttcttggtgggttccgctcgcaggccgggtctgcatgttcgtagcctgctcccggctgtaccgcccaagtaggcgcgggtaggacgagtaggcagctggggcgtcccttccgtaacccttagtccgtcggccaaacaggcgtttctggtcggggcttcctgttgtctgctcgacggaaagggtcttcctgctgagggagggaggtccacttgttttctttctacagcagtttggctggggtttgtgggagagggccctgtgtgacgtggtttctctactgaaagggttcccttgctgtcttaataagtggaaccagaaagagatggaggaagagcaggcttgatgaaggatctt

SEQ ID NO: 308346 - DNA, 696 bp, Homo sapiens
ccgacaaaccaccgcgggcacacatacggctaggtcgagctggtggaatcggacgaggagcccgccgcgctcgcctctccgccccgcgtccagctcgcccagctcgcccagcgtccgccgcgcctcggccaaggcttcaacggaccacaccaaaatgccatctcaaatggaacacgccatggaaaccatgatgtttacatttcacaaattcgctggggataaaggctacttaacaaaggaggacctgagagtactcatggaaaaggagttccctggatttttggaaaatcaaaaagaccctctggctgtggacaaaataatgaaggacctggaccagtgtagagatggcaaagtgggcttccagagcttcttttccctaattgcgggcctcaccattgcatgcaatgactattttgtagtacacatgaagcagaagggaaagaagtaggcagaaatgagcagttcgctcctccctgataagagttgtcccaaagggtcgcttaaggaatctgccccacagcttcccccatagaaggatttcatgagcagatcaggacacttagcaaatgtaaaaataaaatctaactctcatttgacaagcagagaaagaaaagttaaataccagataagcttttgatttttgtattgtttgcatccccttgccctcaataaataaagttcttttttagttccaaa

SEQ ID NO: 308347 - DNA, 615 bp, Homo sapiens
ctgctagtgatcccggatacaggcaccctgcccgcggtagcgcgcctcggcagcttcaacggaccacaccaaaatgccatctcaaatggaacacgccatggaaaccatgatgtttacatttcacaaattcgctggggataaaggctacttaacaaaggaggacctgagagtactcatggaaaaggagttccctggatttttggaaaatcaaaaagaccctctggctgtggacaaaataatgaaggacctggaccagtgtagagatggcaaagtgggcttccagagcttcttttccctaattgcgggcctcaccattgcatgcaatgactattttgtagtacacatgaagcagaagggaaagaagtaggcagaaatgagcagttcgctcctccctgataagagttgtcccaaagggtcgcttaaggaatctgccccacagcttcccccatagaaggatttcatgagcagatcaggacacttagcaaatgtaaaaataaaatctaactctcatttgacaagcagagaaagaaaagttaaataccagataagcttttgatttttgtattgtttgcatccccttgccctcaataaataaagttcttttttagttccaaa

SEQ ID NO: 308348 - DNA, 789 bp, Homo sapiens
tttatggtgttgacagcacgagcttgaaggtagcatagcacttgcgaaagatcatcttgacgcagttgtatttctagggcaagctggtcggagagaaggctcaataatgccacctcgcaggcgcaacaccaggtgcagggtggactctttctggatgttgtagtctgagagagtgcggccatcctccagctgtttgccggcaaatatcagacgctgctggtcagctgggataccctccttgtcttgaattttggctttgacagccatttaggtacatggctgtacgtttacatttcacaaattcgctggggataaaggctacttaacaaaggaggacctgagagtactcatggaaaaggagttccctggatttttggaaaatcaaaaagaccctctggctgtggacaaaataatgaaggacctggaccagtgtagagatggcaaagtgggcttccagagcttcttttccctaattgcgggcctcaccattgcatgcaatgactattttgtagtacacatgaagcagaagggaaagaagtaggcagaaatgagcagttcgctcctccctgataagagttgtcccaaagggtcgcttaaggaatctgccccacagcttcccccatagaaggatttcatgagcagatcaggacacttagcaaatgtaaaaataaaatctaactctcatttgacaagcagagaaagaaaagttaaataccagataagcttttgatttttgtattgtttgcatccccttgccctcaataaataaagttcttttttagttccaaa

SEQ ID NO: 308349 - DNA, 1385 bp, Homo sapiens
ccggtggggcgggaagcccggcttctggggaggtgccgcccctccactggcgcaggccgccgagacccccagacggacctcctagggctaatctgatagtgcctctgaggtcgataggactccacgtgccactccctgcagggtcatccagcaagtaattcctagacccgtaggtggccgcagagccggttacctctggttctgcgccagcgtgccccacccgcaggacggccgggttctttgatttgtacactttctaaaaccaaacccgagaggaagggcaggctcagggtggggatgccctgaaatattcgagagcaggaccgtttctactgaagagaagtttacaagaacgctctgtctggggcgggcgaggcctctgcgaggcgggtccgggagcgagggcagggcgtgggccgcgcgcccggggtcgggggagtcgggggcaggaagagggggaggagacagggctgggggagcgccctgccgagcgcccgccaggctcctcccgctcccgcaccgcctccctctacccacccgccgcacgtactaaggaaggcgcacagcccgccgcgctcgcctctccgccccgcgtccagctcgcccagctcgcccagcgtccgccgcgcctcggccaaggcttcaacggaccacaccaaaatgccatctcaaatggaacacgccatggaaaccatgatgtttacatttcacaaattcgctggggataaaggctacttaacaaaggaggacctgagagtactcatggaaaaggagttccctggatttttggaaaatcaaaaagaccctctggctgtggacaaaataatgaaggacctggaccagtgtagagatggcaaagtgggcttccagagcttcttttccctaattgcgggcctcaccattgcatgcaatgactattttgtagtacacatgaagcagaagggaaagaagtaggcagaaatgagcagttcgctcctccctgataagagttgtcccaaagggtcgcttaaggaatctgccccacagcttcccccatagaaggatttcatgagcagatcaggacacttagcaaatgtaaaaataaaatctaactctcatttgacaagcagagaaagaaaagttaaataccagataagcttttgatttttgtattgtttgcatccccttgccctcaataaataaagttcttttttagttccaaaaaaaaaaaaaaaacaaaaaaaaaaaaaaaaaaaaaaaaaaaaaacaaaaaaacttcagagggactataatggcgggcgtgcggaaacagcacgtactgaacatgggggactagggccaaaggcaagtccctggacccaagttctatggcccaaagggggaaaactttgcagggtcaccataag

SEQ ID NO: 308350 - DNA, 1590 bp, Homo sapiens
ccggtggggcgggaagcccggcttctggggaggtgccgcccctccactggcgcaggccgccgagacccccagacggacctcctagggctaatctgatagtgcctctgaggtcgataggactccacgtgccactccctgcagggtcatccagcaagtaattcctagacccgtaggtggccgcagagccggttacctctggttctgcgccagcgtgccccacccgcaggacggccgggttctttgatttgtacactttctaaaaccaaacccgagaggaagggcaggctcagggtggggatgccctgaaatattcgagagcaggaccgtttctactgaagagaagtttacaagaacgctctgtctggggcgggcgaggcctctgcgaggcgggtccgggagcgagggcagggcgtgggccgcgcgcccggggtcgggggagtcgggggcaggaagagggggaggagacagggctgggggagcgccctgccgagcgcccgccaggctcctcccgctcccgcaccgcctccctctacccacccgccgcacgtactaaggaaggcgcacagcccgccgcgctcgcctctccgccccgcgtccagctcgcccagctcgcccagcgtccgccgcgcctcggccaaggcttcaacggaccacaccaaaatgccatctcaaatggaacacgccatggaaaccatgatgtttacatttcacaaattcgctggggataaaggctacttaacaaaggaggacctgagagtactcatggaaaaggagttccctggatttttggaaaatcaaaaagaccctctggctgtggacaaaataatgaaggacctggaccagtgtagagatggcaaagtgggcttccagagcttcttttccctaattgcgggcctcaccattgcatgcaatgactattttgtagtacacatgaagcagaagggaaagaagtaggcagaaatgagcagttcgctcctccctgataagagttgtcccaaagggtcgcttaaggaatctgccccacagcttcccccatagaaggatttcatgagcagatcaggacacttagcaaatgtaaaaataaaatctaactctcatttgacaagcagagaaagaaaagttaaataccagataagcttttgatttttgtattgtttgcatccccttgccctcaataaataaagttcttttttagttccaaaaaaaaaaaaaaaacaaaaaaaaaaaaaaaaaaaaaaaaaagaaaaacaaagacaagaaaaacaaaaaaaaaaaaaaaaaaaaaaaaacacggggggggggttaaaagttatccttgggggggccaaagtttagggggtaccaggttttttggtaaaaagggggccccatatgggggggggaataaaaagctaggacagggccgtggtttaaacacggtcggggagggggaaacgggtagtgggatcttgggagggacccttatctctgggggggggcctatgggcaaattacctaggagattaaggtccaaaggtaatataacttttaagtgtttcgtggtacagcggatagtgcgctggatattggtacgagtttgtttgacctgtc

SEQ ID NO: 308351 - DNA, 1356 bp, Homo sapiens
ccggtggggcgggaagcccggcttctggggaggtgccgcccctccactggcgcaggccgccgagacccccagacggacctcctagggctaatctgatagtgcctctgaggtcgataggactccacgtgccactccctgcagggtcatccagcaagtaattcctagacccgtaggtggccgcagagccggttacctctggttctgcgccagcgtgccccacccgcaggacggccgggttctttgatttgtacactttctaaaaccaaacccgagaggaagggcaggctcagggtggggatgccctgaaatattcgagagcaggaccgtttctactgaagagaagtttacaagaacgctctgtctggggcgggcgaggcctctgcgaggcgggtccgggagcgagggcagggcgtgggccgcgcgcccggggtcgggggagtcgggggcaggaagagggggaggagacagggctgggggagcgccctgccgagcgcccgccaggctcctcccgctcccgcaccgcctccctctacccacccgccgcacgtactaaggaaggcgcacagcccgccgcgctcgcctctccgccccgcgtccagctcgcccagctcgcccagcgtccgccgcgcctcggccaaggcttcaacggaccacaccaaaatgccatctcaaatggaacacgccatggaaaccatgatgtttacatttcacaaattcgctggggataaaggctacttaacaaaggaggacctgagagtactcatggaaaaggagttccctggatttttggaaaatcaaaaagaccctctggctgtggacaaaataatgaaggacctggaccagtgtagagatggcaaagtgggcttccagagcttcttttccctaattgcgggcctcaccattgcatgcaatgactattttgtagtacacatgaagcagaagggaaagaagtaggcagaaatgagcagttcgctcctccctgataagagttgtcccaaagggtcgcttaaggaatctgccccacagcttcccccatagaaggatttcatgagcagatcaggacacttagcaaatgtaaaaataaaatctaactctcatttgacaagcagagaaagaaaagttaaataccagataagcttttgatttttgtattgtttgcatccccttgccctcaataaataaagttcttttttagttccaaaaaaaaaaaaaaaaaacaaaaaaacttcagagggactataatggcgggcgtgcggaaacagcacgtactgaacatgggggactagggccaaaggcaagtccctggacccaagttctatggcccaaagggggaaaactttgcagggtcaccataag

SEQ ID NO: 308352 - DNA, 1528 bp, Homo sapiens
ccggtggggcgggaagcccggcttctggggaggtgccgcccctccactggcgcaggccgccgagacccccagacggacctcctagggctaatctgatagtgcctctgaggtcgataggactccacgtgccactccctgcagggtcatccagcaagtaattcctagacccgtaggtggccgcagagccggttacctctggttctgcgccagcgtgccccacccgcaggacggccgggttctttgatttgtacactttctaaaaccaaacccgagaggaagggcaggctcagggtggggatgccctgaaatattcgagagcaggaccgtttctactgaagagaagtttacaagaacgctctgtctggggcgggcgaggcctctgcgaggcgggtccgggagcgagggcagggcgtgggccgcgcgcccggggtcgggggagtcgggggcaggaagagggggaggagacagggctgggggagcgccctgccgagcgcccgccaggctcctcccgctcccgcaccgcctccctctacccacccgccgcacgtactaaggaaggcgcacagcccgccgcgctcgcctctccgccccgcgtccagctcgcccagctcgcccagcgtccgccgcgcctcggccaaggcttcaacggaccacaccaaaatgccatctcaaatggaacacgccatggaaaccatgatgtttacatttcacaaattcgctggggataaaggctacttaacaaaggaggacctgagagtactcatggaaaaggagttccctggatttttggaaaatcaaaaagaccctctggctgtggacaaaataatgaaggacctggaccagtgtagagatggcaaagtgggcttccagagcttcttttccctaattgcgggcctcaccattgcatgcaatgactattttgtagtacacatgaagcagaagggaaagaagtaggcagaaatgagcagttcgctcctccctgataagagttgtcccaaagggtcgcttaaggaatctgccccacagcttcccccatagaaggatttcatgagcagatcaggacacttagcaaatgtaaaaataaaatctaactctcatttgacaagcagagaaagaaaagttaaataccagataagcttttgatttttgtattgtttgcatccccttgccctcaataaataaagttcttttttagttccaaaaaaaaaaaaaaaaaaaaaaaaaaaacacggggggggggttaaaagttatccttgggggggccaaagtttagggggtaccaggttttttggtaaaaagggggccccatatgggggggggaataaaaagctaggacagggccgtggtttaaacacggtcggggagggggaaacgggtagtgggatcttgggagggacccttatctctgggggggggcctatgggcaaattacctaggagattaaggtccaaaggtaatataacttttaagtgtttcgtggtacagcggatagtgcgctggatattggtacgagtttgtttgacctgtc

SEQ ID NO: 308353 - DNA, 1203 bp, Homo sapiens
  misc_feature (1182)..(1182): n is a, c, g, or t
ccggtggggcgggaagcccggcttctggggaggtgccgcccctccactggcgcaggccgccgagacccccagacggacctcctagggctaatctgatagtgcctctgaggtcgataggactccacgtgccactccctgcagggtcatccagcaagtaattcctagacccgtaggtggccgcagagccggttacctctggttctgcgccagcgtgccccacccgcaggacggccgggttctttgatttgtacactttctaaaaccaaacccgagaggaagggcaggctcagggtggggatgccctgaaatattcgagagcaggaccgtttctactgaagagaagtttacaagaacgctctgtctggggcgggcgaggcctctgcgaggcgggtccgggagcgagggcagggcgtgggccgcgcgcccggggtcgggggagtcgggggcaggaagagggggaggagacagggctgggggagcgccctgccgagcgcccgccaggctcctcccgctcccgcaccgcctccctctacccacccgccgcacgtactaaggaaggcgcacagcccgccgcgctcgcctctccgccccgcgtccagctcgcccagctcgcccagcgtccgccgcgcctcggccaaggcttcaacggaccacaccaaaatgccatctcaaatggaacacgccatggaaaccatgatgtttacatttcacaaattcgctggggataaaggctacttaacaaaggaggacctgagagtactcatggaaaaggagttccctggatttttggaaaatcaaaaagaccctctggctgtggacaaaataatgaaggacctggaccagtgtagagatggcaaagtgggcttccagagcttcttttccctaattgcgggcctcaccattgcatgcaatgactattttgtagtacacatgaagcagaagggaaagaagtaggcagaaatgagcagttcgctcctccctgataagagttgtcccaaagggtcgcttaaggaatctgccccacagcttcccccatagaaggatttcatgagcagatcaggacacttagcaaatgtaaaaataaaatctaactctcatttgacaagcagagaaagaaaagttaaataccagataagcttttgatttttgtattgtttgcatccccttgcccttccagagctngggatacctcaggagtcgacc

SEQ ID NO: 308354 - DNA, 1276 bp, Homo sapiens
ccggtggggcgggaagcccggcttctggggaggtgccgcccctccactggcgcaggccgccgagacccccagacggacctcctagggctaatctgatagtgcctctgaggtcgataggactccacgtgccactccctgcagggtcatccagcaagtaattcctagacccgtaggtggccgcagagccggttacctctggttctgcgccagcgtgccccacccgcaggacggccgggttctttgatttgtacactttctaaaaccaaacccgagaggaagggcaggctcagggtggggatgccctgaaatattcgagagcaggaccgtttctactgaagagaagtttacaagaacgctctgtctggggcgggcgaggcctctgcgaggcgggtccgggagcgagggcagggcgtgggccgcgcgcccggggtcgggggagtcgggggcaggaagagggggaggagacagggctgggggagcgccctgccgagcgcccgccaggctcctcccgctcccgcaccgcctccctctacccacccgccgcacgtactaaggaaggcgcacagcccgccgcgctcgcctctccgccccgcgtccagctcgcccagctcgcccagcgtccgccgcgcctcggccaaggcttcaacggaccacaccaaaatgccatctcaaatggaacacgccatggaaaccatgatgtttacatttcacaaattcgctggggataaaggctacttaacaaaggaggacctgagagtactcatggaaaaggagttccctggatttttggaaaatcaaaaagaccctctggctgtggacaaaataatgaaggacctggaccagtgtagagatggcaaagtgggcttccagagcttcttttccctaattgcgggcctcaccattgcatgcaatgactattttgtagtacacatgaagcagaagggaaagaagtaggcagaaatgagcagttcgctcctccctgataagagttgtcccaaagggtcgcttaaggaatctgccccacagcttcccccatagaaggatttcatgagcagatcaggacacttagcaaatgtaaaaataaaatctaactctcatttgacaagcagagaaagaaaagttaaataccagataagcttttgatttttgtattgtttgcatccccttgccctaagtttttgcggggtggtgtggtcccgagaggcggggagagggagggggggggggcgggggagggggggggagaggtgaggagggggaggggtggcgggcgggc

SEQ ID NO: 308355 - DNA, 2061 bp, Homo sapiens
ccggtggggcgggaagcccggcttctggggaggtgccgcccctccactggcgcaggccgccgagacccccagacggacctcctagggctaatctgatagtgcctctgaggtcgataggactccacgtgccactccctgcagggtcatccagcaagtaattcctagacccgtaggtggccgcagagccggttacctctggttctgcgccagcgtgccccacccgcaggacggccgggttctttgatttgtacactttctaaaaccaaacccgagaggaagggcaggctcagggtggggatgccctgaaatattcgagagcaggaccgtttctactgaagagaagtttacaagaacgctctgtctggggcgggcgaggcctctgcgaggcgggtccgggagcgagggcagggcgtgggccgcgcgcccggggtcgggggagtcgggggcaggaagagggggaggagacagggctgggggagcgccctgccgagcgcccgccaggctcctcccgctcccgcaccgcctccctctacccacccgccgcacgtactaaggaaggcgcacagcccgccgcgctcgcctctccgccccgcgtccagctcgcccagctcgcccagcgtccgccgcgcctcggccaaggcttcaacggaccacaccaaaatgccatctcaaatggaacacgccatggaaaccatgatgtttacatttcacaaattcgctggggataaaggctacttaacaaaggaggacctgagagtactcatggaaaaggagttccctggatttttggaagccatatttctctctctggttgatggcatggaccctacaggaaaaaccacaccttaccgcttctgaccagcatcactacaaaaaggagtgctgaagccaatcaccatgtaagcaagataaaagcaaagggggtcttgcctgcccatctctgttccatacattcttaccaggcactgagagtcatggggagtttaagactccatcccacatactccttttgaaactggtccagtgtacaacatccagtgaagagtataggatggcatagacttaccaactcaaagaatggaaggattctagaaacattatagtccaacctcctcaattcatcgttgatacacaaaggcccactaagctgtgtggttcactcagcatcacgtggctaatatgatatgaagccacactagcttgtcctcagctgtgccaagaatgagagctgccttctccaaacctaaaaccaacccatggcatcattaacacctctttaaaatccataggacagtgatccaaaacttattccctaaatcataaatatcttttcataaggagtttcctttgtaagggatttgaccatgccattaggaataaaattttaataagagaatgtaagtttaaaccataaaatgaggagcttagggtggttcttaggcagaatctaaatatgaaattactgaaatgctcccacaaggcaaaaaaaaaaaaaaatacatttagatgaactccaaaggttgcttatgacctaaaacaagagctcaagtaattgggagatatatacacagttctcagcagtacaaatcaaataagctcctcattgcaacctttgacttctatttcttgcctttgttcttttttttttcagaatcaaaaagaccctctggctgtggacaaaataatgaaggacctggaccagtgtagagatggcaaagtgggcttccagagcttcttttccctaattgcgggcctcaccattgcatgcaatgactattttgtagtacacatgaagcagaagggaaagaagtaggcagaaatgagcagttcgctcctccctgataagagttgtcccaaagggtcgcttaaggaatctgccccacagcttcccccatagaaggatttcatgagcagatcaggacacttagcaaatgtaaaaataaaatctaactctcatttgacaagcagagaaagaaaagttaaataccagataagcttttgatttttgtattgtttgcatccccttgccctcaataaataaagttcttttttagttccaaa

SEQ ID NO: 308356 - DNA, 1301 bp, Homo sapiens
gtttacctgagccctttaacaacctcaaataggccatatttctctctctggttgatggcatggaccctacaggaaaaaccacaccttaccgcttctgaccagcatcactacaaaaaggagtgctgaagccaatcaccatgtaagcaagataaaagcaaagggggtcttgcctgcccatctctgttccatacattcttaccaggcactgagagtcatggggagtttaagactccatcccacatactccttttgaaactggtccagtgtacaacatccagtgaagagtataggatggcatagacttaccaactcaaagaatggaaggattctagaaacattatagtccaacctcctcaattcatcgttgatacacaaaggcccactaagctgtgtggttcactcagcatcacgtggctaatatgatatgaagccacactagcttgtcctcagctgtgccaagaatgagagctgccttctccaaacctaaaaccaacccatggcatcattaacacctctttaaaatccataggacagtgatccaaaacttattccctaaatcataaatatcttttcataaggagtttcctttgtaagggatttgaccatgccattaggaataaaattttaataagagaatgtaagtttaaaccataaaatgaggagcttagggtggttcttaggcagaatctaaatatgaaattactgaaatgctcccacaaggcaaaaaaaaaaaaaaatacatttagatgaactccaaaggttgcttatgacctaaaacaagagctcaagtaattgggagatatatacacagttctcagcagtacaaatcaaataagctcctcattgcaacctttgacttctatttcttgcctttgttcttttttttttcagaatcaaaaagaccctctggctgtggacaaaataatgaaggacctggaccagtgtagagatggcaaagtgggcttccagagcttcttttccctaattgcgggcctcaccattgcatgcaatgactattttgtagtacacatgaagcagaagggaaagaagtaggcagaaatgagcagttcgctcctccctgataagagttgtcccaaagggtcgcttaaggaatctgccccacagcttcccccatagaaggatttcatgagcagatcaggacacttagcaaatgtaaaaataaaatctaactctcatttgacaagcagagaaagaaaagttaaataccagataagcttttgatttttgtattgtttgcatccccttgccctcaataaataaagttcttttttagttccaaa

SEQ ID NO: 308357 - DNA, 1309 bp, Homo sapiens
ccggtggggcgggaagcccggcttctggggaggtgccgcccctccactggcgcaggccgccgagacccccagacggacctcctagggctaatctgatagtgcctctgaggtcgataggactccacgtgccactccctgcagggtcatccagcaagtaattcctagacccgtaggtggccgcagagccggttacctctggttctgcgccagcgtgccccacccgcaggacggccgggttctttgatttgtacactttctaaaaccaaacccgagaggaagggcaggctcagggtggggatgccctgaaatattcgagagcaggaccgtttctactgaagagaagtttacaagaacgctctgtctggggcgggcgaggcctctgcgaggcgggtccgggagcgagggcagggcgtgggccgcgcgcccggggtcgggggagtcgggggcaggaagagggggaggagacagggctgggggagcgccctgccgagcgcccgccaggctcctcccgctcccgcaccgcctccctctacccacccgccgcacgtactaaggaaggcgcacagcccgccgcgctcgcctctccgccccgcgtccagctcgcccagctcgcccagcgtccgccgcgcctcggccaaggcttcaacggaccacaccaaaatgccatctcaaatggaacacgccatggaaaccatgatgtttacatttcacaaattcgctggggataaaggctacttaacaaaggaggacctgagagtactcatggaaaaggagttccctggatttttggaagccatatttctctctctggttgatggcatggaccctacaggaaaaaccacaccttaccgcttctgaccagcatcactacaaaaaggagtgctgaagccaatcaccataatcaaaaagaccctctggctgtggacaaaataatgaaggacctggaccagtgtagagatggcaaagtgggcttccagagcttcttttccctaattgcgggcctcaccattgcatgcaatgactattttgtagtacacatgaagcagaagggaaagaagtaggcagaaatgagcagttcgctcctccctgataagagttgtcccaaagggtcgcttaaggaatctgccccacagcttcccccatagaaggatttcatgagcagatcaggacacttagcaaatgtaaaaataaaatctaactctcatttgacaagcagagaaagaaaagttaaataccagataagcttttgatttttgtattgtttgcatccccttgccctcaataaataaagttcttttttagttccaaa

SEQ ID NO: 308358 - DNA, 498 bp, Homo sapiens
agctcggtacccatcaggcgaagactgtggatcaggggaagactgtggatcagcgaagactgtggatcaggcgaagactgtggtggaaaatcaaaaagaccctctggctgtggacaaaataatgaaggacctggaccagtgtagagatggcaaagtgggcttccagagcttcttttccctaattgcgggcctcaccattgcatgcaatgactattttgtagtacacatgaagcagaagggaaagaagtaggcagaaatgagcagttcgctcctccctgataagagttgtcccaaagggtcgcttaaggaatctgccccacagcttcccccatagaaggatttcatgagcagatcaggacacttagcaaatgtaaaaataaaatctaactctcatttgacaagcagagaaagaaaagttaaataccagataagcttttgatttttgtattgtttgcatccccttgccctcaataaataaagttcttttttagttccaaa

SEQ ID NO: 308359 - DNA, 1144 bp, Homo sapiens
ccggtggggcgggaagcccggcttctggggaggtgccgcccctccactggcgcaggccgccgagacccccagacggacctcctagggctaatctgatagtgcctctgaggtcgataggactccacgtgccactccctgcagggtcatccagcaagtaattcctagacccgtaggtggccgcagagccggttacctctggttctgcgccagcgtgccccacccgcaggacggccgggttctttgatttgtacactttctaaaaccaaacccgagaggaagggcaggctcagggtggggatgccctgaaatattcgagagcaggaccgtttctactgaagagaagtttacaagaacgctctgtctggggcgggcgaggcctctgcgaggcgggtccgggagcgagggcagggcgtgggccgcgcgcccggggtcgggggagtcgggggcaggaagagggggaggagacagggctgggggagcgccctgccgagcgcccgccaggctcctcccgctcccgcaccgcctccctctacccacccgccgcacgtactaaggaaggcgcacagcccgccgcgctcgcctctccgccccgcgtccagctcgcccagctcgcccagcgtccgccgcgcctcggccaaggcttcaacggaccacaccaaaatgccatctcaaatggaacacgccatggaaaccatgatgtttacatttcacaaattcgctggggataaaggctacttaacaaaggaggacctgagagtactcatggaaaaggagttccctggatttttggaaaatcaaaaagaccctctggctgtggacaaaataatgaaggacctggaccagtgtagagatggcaaagtgggcttccagagcttcttttccctaattgcgggcctcaccattgcatgcaatgactattttgtagtacacatgaagcagaagggaaagaagtaggcagaaatgagcagttcgctcctccctgataagagttgtcccaaagggtcgcttaaggaatctgccccacagcttcccccatagaaggatttcatgagcagatcaggacacttagcaaatgtaaaaataaaatctaactctcatttgacaagcagagaatcaataaataaagttcttttttagttccaaa

SEQ ID NO: 308360 - DNA, 1200 bp, Homo sapiens
ccggtggggcgggaagcccggcttctggggaggtgccgcccctccactggcgcaggccgccgagacccccagacggacctcctagggctaatctgatagtgcctctgaggtcgataggactccacgtgccactccctgcagggtcatccagcaagtaattcctagacccgtaggtggccgcagagccggttacctctggttctgcgccagcgtgccccacccgcaggacggccgggttctttgatttgtacactttctaaaaccaaacccgagaggaagggcaggctcagggtggggatgccctgaaatattcgagagcaggaccgtttctactgaagagaagtttacaagaacgctctgtctggggcgggcgaggcctctgcgaggcgggtccgggagcgagggcagggcgtgggccgcgcgcccggggtcgggggagtcgggggcaggaagagggggaggagacagggctgggggagcgccctgccgagcgcccgccaggctcctcccgctcccgcaccgcctccctctacccacccgccgcacgtactaaggaaggcgcacagcccgccgcgctcgcctctccgccccgcgtccagctcgcccagctcgcccagcgtccgccgcgcctcggccaaggcttcaacggaccacaccaaaatgccatctcaaatggaacacgccatggaaaccatgatgtttacatttcacaaattcgctggggataaaggctacttaacaaaggaggacctgagagtactcatggaaaaggagttccctggatttttggaaaatcaaaaagaccctctggctgtggacaaaataatgaaggacctggaccagtgtagagatggcaaagtgggcttccagagcttcttttccctaattgcgggcctcaccattgcatgcaatgactattttgtagtacacatgaagcagaagggaaagaagtaggcagaaatgagcagttcgctcctccctgataagagttgtcccaaagggtcgcttaaggaatctgccccacagcttcccccatcgcgcgtttttcgtgccctcaccgaaccttcccctctttacatcccacctcctccccctcctttccctggctgcgagaaaagttaaataccagataagcttttgatttttgtattgtttgcatccccttgccctcaataaataaagttcttttttagttccaaa

SEQ ID NO: 308361 - DNA, 1894 bp, Homo sapiens
ccggtggggcgggaagcccggcttctggggaggtgccgcccctccactggcgcaggccgccgagacccccagacggacctcctagggctaatctgatagtgcctctgaggtcgataggactccacgtgccactccctgcagggtcatccagcaagtaattcctagacccgtaggtggccgcagagccggttacctctggttctgcgccagcgtgccccacccgcaggacggccgggttctttgatttgtacactttctaaaaccaaacccgagaggaagggcaggctcagggtggggatgccctgaaatattcgagagcaggaccgtttctactgaagagaagtttacaagaacgctctgtctggggcgggcgaggcctctgcgaggcgggtccgggagcgagggcagggcgtgggccgcgcgcccggggtcgggggagtcgggggcaggaagagggggaggagacagggctgggggagcgccctgccgagcgcccgccaggctcctcccgctcccgcaccgcctccctctacccacccgccgcacgtactaaggaaggcgcacagcccgccgcgctcgcctctccgccccgcgtccagctcgcccagctcgcccagcgtccgccgcgcctcggccaaggcttcaacggaccacaccaaaatgccatctcaaatggaacacgccatggaaaccatgatgtttacatttcacaaattcgctggggataaaggctacttaacaaaggaggacctgagagtactcatggaaaaggagttccctggatttttggaagccatatttctctctctggttgatggcatggaccctacaggaaaaaccacaccttaccgcttctgaccagcatcactacaaaaaggagtgctgaagccaatcaccatgtaagcaagataaaagcaaagggggtcttgcctgcccatctctgttccatacattcttaccaggcactgagagtcatggggagtttaagactccatcccacatactccttttgaaactggtccagtgtacaacatccagtgaagagtataggatggcatagacttaccaactcaaagaatggaaggattctagaaacattatagtccaacctcctcaattcatcgttgatacacaaaggcccactaagctgtgtggttcactcagcatcacgtggctaatatgatatgaagccacactagcttgtcctcagctgtgccaagaatgagagctgccttctccaaacctaaaaccaacccatggcatcattaacacctctttaaaatccataggacagtgatccaaaacttattccctaaatcataaatatcttttcataaggagtttcctttgtaagggatttgaccatgccattaggaataaaattttaataagagaatgtaagtttaaaccataaaatgaggagcttagggtggttcttaggcagaatctaaatatgaaattactgaaatgctcccacaaggcaaaaaaaaaaaaaaatacatttagatgaactccaaaggttgcttatgacctaaaacaagagctcaagtaattgggagatatatacacagttctcagcagtacaaatcaaataagctcctcattgcaacctttgacttctatttcttgcctttgttcttttttttttcagaatcaaaaagaccctctggctgtggacaaaataatgaaggacctggaccagtgtagagatggcaaagtgggcttccagagcttcttttccctaattgcgggcctcaccattgcatgcaatgactattttgtagtacacatgaagcagaagggaaagtagacagttcgtctcctgataagagttgtcccaaaggtctgacatcccccatagaaggatttcatgacagatcacgctctcagtccc

SEQ ID NO: 308362 - DNA, 1353 bp, Homo sapiens
ccggtggggcgggaagcccggcttctggggaggtgccgcccctccactggcgcaggccgccgagacccccagacggacctcctagggctaatctgatagtgcctctgaggtcgataggactccacgtgccactccctgcagggtcatccagcaagtaattcctagacccgtaggtggccgcagagccggttacctctggttctgcgccagcgtgccccacccgcaggacggccgggttctttgatttgtacactttctaaaaccaaacccgagaggaagggcaggctcagggtggggatgccctgaaatattcgagagcaggaccgtttctactgaagagaagtttacaagaacgctctgtctggggcgggcgaggcctctgcgaggcgggtccgggagcgagggcagggcgtgggccgcgcgcccggggtcgggggagtcgggggcaggaagagggggaggagacagggctgggggagcgccctgccgagcgcccgccaggctcctcccgctcccgcaccgcctccctctacccacccgccgcacgtactaaggaaggcgcacagcccgccgcgctcgcctctccgccccgcgtccagctcgcccagctcgcccagcgtccgccgcgcctcggccaaggcttcaacggaccacaccaaaatgccatctcaaatggaacacgccatggaaaccatgatgtttacatttcacaaattcgctggggataaaggctacttaacaaaggaggacctgagagtactcatggaaaaggagttccctggatttttggaagtaagtgttgaaaagcttacaaagaaccagacataaaagtcaatgcttctaggccttggttccttttccttcttgtttccatcccttccctgtggaggtcaccactagtgaataaatgaatgtagtcacctgaaggaatgaatgaatgacctcattcattcatttattaaatagtattgagtacctgctatttgtaagatactgttgaggaaacaaagtaatgaagacacagccccaaccttcaaggagcttacagtctgcaggtgaaataagactgcatacaaataaccacaatatgagctgtttgttggaaaattccatcgggttatctgtgtctgttgtgacgatgttggggacagagttgggagaaagaaagcttttcacaaaagagtagtcaaccagaaaatggctaccttcaggtccaaaaacctggtggtggagatgccacatcctggtcacattccattttgagcaactcgaatctcccttcttaaatctcttcagataaagggattgttttttctttttctaatactacaaaggagcagtgtcagtcatcta

SEQ ID NO: 308363 - DNA, 1033 bp, Homo sapiens
ccggtggggcgggaagcccggcttctggggaggtgccgcccctccactggcgcaggccgccgagacccccagacggacctcctagggctaatctgatagtgcctctgaggtcgataggactccacgtgccactccctgcagggtcatccagcaagtaattcctagacccgtaggtggccgcagagccggttacctctggttctgcgccagcgtgccccacccgcaggacggccgggttctttgatttgtacactttctaaaaccaaacccgagaggaagggcaggctcagggtggggatgccctgaaatattcgagagcaggaccgtttctactgaagagaagtttacaagaacgctctgtctggggcgggcgaggcctctgcgaggcgggtccgggagcgagggcagggcgtgggccgcgcgcccggggtcgggggagtcgggggcaggaagagggggaggagacagggctgggggagcgccctgccgagcgcccgccaggctcctcccgctcccgcaccgcctccctctacccacccgccgcacgtactaaggaaggcgcacagcccgccgcgctcgcctctccgccccgcgtccagctcgcccagctcgcccagcgtccgccgcgcctcggccaaggcttcaacggaccacaccaaaatgccatctcaaatggaacacgccatggaaaccatgatgtttacatttcacaaattcgctggggataaaggctacttaacaaaggaggacctgagagtactcatggaaaaggagttccctggatttttggaagtaagtgttgaaaagcttacaaagaaccagacataaaagtcaatgcttctaggccttggttccttttccttcttgtttccatcccttccctgtggaggtcaccactagtgaataaatgaatgtagtcacctgaaggaatgaatgaatgacctcattcattcatttattaaatagtattgagtacctgctatttgtaagatactgttgaggatggtccgcacaggggatcctcggagttgcc

SEQ ID NO: 308364 - DNA, 967 bp, Homo sapiens
ccggtggggcgggaagcccggcttctggggaggtgccgcccctccactggcgcaggccgccgagacccccagacggacctcctagggctaatctgatagtgcctctgaggtcgataggactccacgtgccactccctgcagggtcatccagcaagtaattcctagacccgtaggtggccgcagagccggttacctctggttctgcgccagcgtgccccacccgcaggacggccgggttctttgatttgtacactttctaaaaccaaacccgagaggaagggcaggctcagggtggggatgccctgaaatattcgagagcaggaccgtttctactgaagagaagtttacaagaacgctctgtctggggcgggcgaggcctctgcgaggcgggtccgggagcgagggcagggcgtgggccgcgcgcccggggtcgggggagtcgggggcaggaagagggggaggagacagggctgggggagcgccctgccgagcgcccgccaggctcctcccgctcccgcaccgcctccctctacccacccgccgcacgtactaaggaaggcgcacagcccgccgcgctcgcctctccgccccgcgtccagctcgcccagctcgcccagcgtccgccgcgcctcggccaaggcttcaacggaccacaccaaaatgccatctcaaatggaacacgccatggaaaccatgatgtttacatttcacaaattcgctggggataaaggctacttaacaaaggaggacctgagagtactcatggaaaaggagttccctggatttttggaagttctcgagaggtggctgttgaattcaactgaaggtgcaacattgcatgacaaaatagtagactgaaatgcaagcccttctttccctaccacaattgtagtcacctgaaaagattgtttctgtgcttggtgttgaataatgcattaacctgtaaagggtgagaggagatacggta

SEQ ID NO: 308365 - DNA, 440 bp, Homo sapiens
gtggaggttctctctcttttaggtatgatccccgttgtgcacctgaaactcaggcgatgactttcagtgaaggaaatgacctgtctagggccacataatacctgtttgaaaagccagtaccacactaagtctccactattaagggtgtgatggtgagggtggggtcgtagggagcacaggtatgtgtcagaaagagaaaacatgaggcttgagtgtcctccatttattcactcattcattctacaaaaatggagagcttactttgtgccagggccttatttgggctggttggtggggattcagtaatgggaatacaccaagaacaagacagacgtgctgccagacatactggaactcacggtttagttgggaaagactgacaggaaataattatccatgagatacataattaaaatttggtgttgtgcactgagaaatac

SEQ ID NO: 308366 - DNA, 763 bp, Homo sapiens
ggtgtcactgagccgcgccagctgagccaggtggagccctactttcctctcctgctttctgcctgtgactagcgccgtcccctaccgcccgtcgaccccacttccatgtctggcggacacagctccccggaacctccacgcccatggccactagacagagggagtcttccttcacctcctgcttttccacctggaattgcgacgcgggcgacgagggcgtgggctgcacctgcgaagatgcttccttgtgcaagaagcgcctgtcgggcgcgggattcggggctggcatctgggacgcgggctgaggtgggaggcgggcctgcatctgaagaatacgctcggaggctggcaggttgctgcccccgcctcgcacgaccctcgcttcccacctgtgaaatgcacagaacagggcttcatttatttaacgaatcgtttctgagctcctgctgtgagccaggcttggagcaagcctgggtactgtggatgggagcaggcccctgaaccaggcgggcggggtcttggcgttctcggagctaaacgctgctagaaagacaaacatgatgcacctaactactgtctccgtagattatgaggatgagaggtggaggttctctctcttttaggtatgatccccgttgtgcacctgaaactcaggcgatgactttcagtgaaggaaatgacctgtctagggccacataatacctgtttgaaaagccagtaccacactaagtctccactattaagggtgtgatggtgagggtgg

SEQ ID NO: 308367 - DNA, 784 bp, Homo sapiens
ctccagtgaagagctaatgactggttagaagattgacaaactaaccaaaattttacacactccggttatgtgtgtgaaaggttataaaaggaatggccgggtgcggtggctcacccctgtaatcccagcactttgggaggccgaggcgggtggatcacctgaggtcaggagtttgagaccagcctggccaacatggagaaaccccgcctctactaaaaatacagaaaattagccaggcatggaggcacatgcctgtaatcccagctactcgggaggctgaggtaggagaatcgcttgaatccgggagctggaggttgcagtgagccaagatcgcaccattgcactccagcctgggcaacaagagcgaaactccatctcaaaaaaaaaaaagagattataaaagggatgatgaacatggagctgcatctttttaaacgttgttttttgatgcttcagactcttaatgcttttatataaagctatcaactgtatgttgatcacagtttataagaaagaacaaatcaagattggcaatccttgccgatcttttagaaataccttttctggagaaaaaaaaatccacatgaagtgcaataagcttataaagctaagtagttattaatatttctattaacatgatacaaaggatgatgattgtaagtgtttactgactggcagcttttatttcagtattagcacagcgtcttgccagtgttggaggccatgtattatttcagttcaactggatgaaatgttaaataaactcagaatgaaaataaattct

SEQ ID NO: 308368 - DNA, 223 bp, Homo sapiens
  misc_feature (141)..(141): n is a, c, g, or t
  misc_feature (156)..(156): n is a, c, g, or t
  misc_feature (209)..(209): n is a, c, g, or t
ctccagtgaagagctaatgactggttagaagattgacaaactaaccaaaattttacacactccggttatgtgtgtgaaaggttataaaaggaatggccgggtgcggtggctcacccctgtggtcccgctcctctcagagtnctacccctaccaggnagtgtgtagctccatttcagaatgttgaccatggagaagctgttgtgtttctntggtcttgaaccag

SEQ ID NO: 308369 - DNA, 2973 bp, Homo sapiens
cgcgctccggggacgcgcgaggacgccgtggcgggagaagcgtttccggtggcggcggaggctgcactgagcgggacctgcgagcagcgcgggcggcagcccgggggaagcgtccgggaccatgtctggagaactaccaccaaacattaacatcaaggaacctcgatgggatcaaagcactttcattggacgagccaatcatttcttcactgtaactgaccccaggaacattctgttaaccaacgaacaactcgagagtgcgagaaaaatagtacatgattacaggcaaggaattgttcctcctggtcttacagaaaatgaattgtggagagcaaagtacatctatgattcagcttttcatcctgacactggtgagaagatgattttgataggaagaatgtcagcccaggttcccatgaacatgaccatcacaggttgtatgatgacgttttacaggactacgccggctgtgctgttctggcagtggattaaccagtccttcaatgccgtcgtcaattacaccaacagaagtggagacgcacccctcactgtcaatgagttgggaacagcttacgtttctgcaacaactggtgccgtagcaacagctctaggactcaatgcattgaccaagcatgtctcaccactgataggacgttttgttccctttgctgccgtagctgctgctaattgcattaatattccattaatgaggcaaagggaactcaaagttggcattcccgtcacggatgagaatgggaaccgcttgggggagtcggcgaacgctgcgaaacaagccatcacgcaagttgtcgtgtccaggattctcatggcagcccctggcatggccatccctccattcattatgaacactttggaaaagaaagcctttttgaagaggttcccatggatgagtgcacccattcaagttgggttagttggcttctgtttggtgtttgctacacccctgtgttgtgccctgtttcctcagaaaagttccatgtctgtgacaagcttggaggccgagttgcaagctaagatccaagagagccatcctgaattgcgacgcgtgtacttcaataagggattgtaaagcagggaggaaacctctgcagctcattctgccactgcaaagctggtgtagccatgctggtgagaaaaatcctgttcaacctgggttctcccagttacggaaaccttttaaagatccacattagccttttagaataaagctgctactttaacagagcacctggcgtgggccaagtgcctgatactcccttacactgaatcatgttatgatttatagaaatacctttcctgtagcttttatagtcattgtttttcaaagacgatataccagccctcacccaggttttaaaaaagcactggtaggcatagaataggtgctcagtatatggtcagtaaatgttctattgattatcaatcagtgaaaaaagaaatctgtttaaaatactgaattttcatctcactcccattgcaaatcaaggagatctcagcagtgaactgggaaaatacaaaagctctgggctaatctataaaaacttaccctgaaatattaagggcagtttgcttctagtttggggattgcgctagcccaatgaaggtgatgaagcttttggatttggagggtaaaagctccttcacaccccttccaaaagtcagtcacagaccactgcaacatgccttccctgctggatcattatatacattcagattgtgagtggattgccttggttgacttttaatttattgttttttgttcttataaagatgataatcttaccttgcagttattgactttatattcaattatttacatcaaataatgaaataactgaaatgtacaaatgtcaaattttggaagtatattcaataccaatgctgtatgagtgggctgaatccagttcattgttttttttttggtaagaagtgagactacagttccagctacctacatgtcttttcttgtcatccttatagatctctttggctttcagaaagatacagtgataatgtgtgtatgaatcagtcacaatgaattttacttgaatattgtatgttgcattccacttcatttgaaaataatgaaaccatgtaccactgtttacatcatctgtagtgatttcatagataatatatttaatatgacagattatgtttcaactctgtagatgtttaacgtcatagacagttggccctctgtatccgtgagctctatatctgtgaattcaaccaagtttggatggaaaattttttttttttttttttttttttttgagacggagtctcgctctgtcacccaggctggagtgcagtggcgtagtctcggctcactgcaagctccgcctcctgggttcacgccgttctcctgcctcagcctctctgagaagctgggactacaggcgcccgccaccacgcccggctaatttttttgtatttttagtagagacggggtttcactgtggtctcgatctcctgacctcgtgatccgcccgccttggcctcccaaggtgctgggattacaagcgtgagccaccgcacccggcctgaaaatattttctaaaaagataaaaaatatacataacgatgaaaaataatacaaatttaaaaaccaatacagtataacaactatttacatagtgcttacattgtattaggtgttataagcaatctagagatgatttagcaagtatacaggaggatgtgcctaggttatatgcaaatactgtgccattttatatcaggaacttgagcatctgcagatattggtatcggagggcggtcctggaaccaagcatccacggatactgaggggtgacatttcatgaagtgtagatcattgtattcagagattgtaaatgaaaaaaatatagaaactatttagttttggtagattttttttctgacaatgtgaccagactgaatttcctcataaagaaaaaatggcgtgcc

SEQ ID NO: 308370 - DNA, 3224 bp, Homo sapiens
aaagataaaaggtttctaaaacatgacggaggttgagatgaagcttcttcatggagtaaaaaatgtatttaaaagaaaattgagagaaaggactacagagccccgaattaataccaatagaagggcaatgcttttagattaaaatgaaggtgacttgcactgagcgggacctgcgagcagcgcgggcggcagcccgggggaagcgaggcatggtcttgctttgtcacccaggctggagtgcagcggcatgatgatagctcactacagctccaactcttgggctcaagcgatccccacaccccactgccacctcagcctcctgagtagctgcaactataggcgtgcaccaccatgcccggataatccgggaccatgtctggagaactaccaccaaacattaacatcaaggaacctcgatgggatcaaagcactttcattggacgagccaatcatttcttcactgtaactgaccccaggaacattctgttaaccaacgaacaactcgagagtgcgagaaaaatagtacatgattacaggcaaggaattgttcctcctggtcttacagaaaatgaattgtggagagcaaagtacatctatgattcagcttttcatcctgacactggtgagaagatgattttgataggaagaatgtcagcccaggttcccatgaacatgaccatcacaggttgtatgatgacgttttacaggactacgccggctgtgctgttctggcagtggattaaccagtccttcaatgccgtcgtcaattacaccaacagaagtggagacgcacccctcactgtcaatgagttgggaacagcttacgtttctgcaacaactggtgccgtagcaacagctctaggactcaatgcattgaccaagcatgtctcaccactgataggacgttttgttccctttgctgccgtagctgctgctaattgcattaatattccattaatgaggcaaagggaactcaaagttggcattcccgtcacggatgagaatgggaaccgcttgggggagtcggcgaacgctgcgaaacaagccatcacgcaagttgtcgtgtccaggattctcatggcagcccctggcatggccatccctccattcattatgaacactttggaaaagaaagcctttttgaagaggttcccatggatgagtgcacccattcaagttgggttagttggcttctgtttggtgtttgctacacccctgtgttgtgccctgtttcctcagaaaagttccatgtctgtgacaagcttggaggccgagttgcaagctaagatccaagagagccatcctgaattgcgacgcgtgtacttcaataagggattgtaaagcagggaggaaacctctgcagctcattctgccactgcaaagctggtgtagccatgctggtgagaaaaatcctgttcaacctgggttctcccagttacggaaaccttttaaagatccacattagccttttagaataaagctgctactttaacagagcacctggcgtgggccaagtgcctgatactcccttacactgaatcatgttatgatttatagaaatacctttcctgtagcttttatagtcattgtttttcaaagacgatataccagccctcacccaggttttaaaaaagcactggtaggcatagaataggtgctcagtatatggtcagtaaatgttctattgattatcaatcagtgaaaaaagaaatctgtttaaaatactgaattttcatctcactcccattgcaaatcaaggagatctcagcagtgaactgggaaaatacaaaagctctgggctaatctataaaaacttaccctgaaatattaagggcagtttgcttctagtttggggattgcgctagcccaatgaaggtgatgaagcttttggatttggagggtaaaagctccttcacaccccttccaaaagtcagtcacagaccactgcaacatgccttccctgctggatcattatatacattcagattgtgagtggattgccttggttgacttttaatttattgttttttgttcttataaagatgataatcttaccttgcagttattgactttatattcaattatttacatcaaataatgaaataactgaaatgtacaaatgtcaaattttggaagtatattcaataccaatgctgtatgagtgggctgaatccagttcattgttttttttttggtaagaagtgagactacagttccagctacctacatgtcttttcttgtcatccttatagatctctttggctttcagaaagatacagtgataatgtgtgtatgaatcagtcacaatgaattttacttgaatattgtatgttgcattccacttcatttgaaaataatgaaaccatgtaccactgtttacatcatctgtagtgatttcatagataatatatttaatatgacagattatgtttcaactctgtagatgtttaacgtcatagacagttggccctctgtatccgtgagctctatatctgtgaattcaaccaagtttggatggaaaattttttttttttttttttttttttttgagacggagtctcgctctgtcacccaggctggagtgcagtggcgtagtctcggctcactgcaagctccgcctcctgggttcacgccgttctcctgcctcagcctctctgagaagctgggactacaggcgcccgccaccacgcccggctaatttttttgtatttttagtagagacggggtttcactgtggtctcgatctcctgacctcgtgatccgcccgccttggcctcccaaggtgctgggattacaagcgtgagccaccgcacccggcctgaaaatattttctaaaaagataaaaaatatacataacgatgaaaaataatacaaatttaaaaaccaatacagtataacaactatttacatagtgcttacattgtattaggtgttataagcaatctagagatgatttagcaagtatacaggaggatgtgcctaggttatatgcaaatactgtgccattttatatcaggaacttgagcatctgcagatattggtatcggagggcggtcctggaaccaagcatccacggatactgaggggtgacatttcatgaagtgtagatcattgtattcagagattgtaaatgaaaaaaatatagaaactatttagttttggtagattttttttctgacaatgtgaccagactgaatttcctcataaagaaaaaatggcgtgcc

SEQ ID NO: 308371 - DNA, 2925 bp, Homo sapiens
atcccacgtagcccactgactgagctgggactcgagcagcgcgtgtggcagcccgggggaagcgtccgggaccatgtctggagaactaccaccaaacattaacatcaaggaacctcgatgggatcaaagcactttcattggacgagccaatcatttcttcactgtaactgaccccaggaacattctgttaaccaacgaacaactcgagagtgcgagaaaaatagtacatgattacaggcaaggaattgttcctcctggtcttacagaaaatgaattgtggagagcaaagtacatctatgattcagcttttcatcctgacactggtgagaagatgattttgataggaagaatgtcagcccaggttcccatgaacatgaccatcacaggttgtatgatgacgttttacaggactacgccggctgtgctgttctggcagtggattaaccagtccttcaatgccgtcgtcaattacaccaacagaagtggagacgcacccctcactgtcaatgagttgggaacagcttacgtttctgcaacaactggtgccgtagcaacagctctaggactcaatgcattgaccaagcatgtctcaccactgataggacgttttgttccctttgctgccgtagctgctgctaattgcattaatattccattaatgaggcaaagggaactcaaagttggcattcccgtcacggatgagaatgggaaccgcttgggggagtcggcgaacgctgcgaaacaagccatcacgcaagttgtcgtgtccaggattctcatggcagcccctggcatggccatccctccattcattatgaacactttggaaaagaaagcctttttgaagaggttcccatggatgagtgcacccattcaagttgggttagttggcttctgtttggtgtttgctacacccctgtgttgtgccctgtttcctcagaaaagttccatgtctgtgacaagcttggaggccgagttgcaagctaagatccaagagagccatcctgaattgcgacgcgtgtacttcaataagggattgtaaagcagggaggaaacctctgcagctcattctgccactgcaaagctggtgtagccatgctggtgagaaaaatcctgttcaacctgggttctcccagttacggaaaccttttaaagatccacattagccttttagaataaagctgctactttaacagagcacctggcgtgggccaagtgcctgatactcccttacactgaatcatgttatgatttatagaaatacctttcctgtagcttttatagtcattgtttttcaaagacgatataccagccctcacccaggttttaaaaaagcactggtaggcatagaataggtgctcagtatatggtcagtaaatgttctattgattatcaatcagtgaaaaaagaaatctgtttaaaatactgaattttcatctcactcccattgcaaatcaaggagatctcagcagtgaactgggaaaatacaaaagctctgggctaatctataaaaacttaccctgaaatattaagggcagtttgcttctagtttggggattgcgctagcccaatgaaggtgatgaagcttttggatttggagggtaaaagctccttcacaccccttccaaaagtcagtcacagaccactgcaacatgccttccctgctggatcattatatacattcagattgtgagtggattgccttggttgacttttaatttattgttttttgttcttataaagatgataatcttaccttgcagttattgactttatattcaattatttacatcaaataatgaaataactgaaatgtacaaatgtcaaattttggaagtatattcaataccaatgctgtatgagtgggctgaatccagttcattgttttttttttggtaagaagtgagactacagttccagctacctacatgtcttttcttgtcatccttatagatctctttggctttcagaaagatacagtgataatgtgtgtatgaatcagtcacaatgaattttacttgaatattgtatgttgcattccacttcatttgaaaataatgaaaccatgtaccactgtttacatcatctgtagtgatttcatagataatatatttaatatgacagattatgtttcaactctgtagatgtttaacgtcatagacagttggccctctgtatccgtgagctctatatctgtgaattcaaccaagtttggatggaaaattttttttttttttttttttttttttgagacggagtctcgctctgtcacccaggctggagtgcagtggcgtagtctcggctcactgcaagctccgcctcctgggttcacgccgttctcctgcctcagcctctctgagaagctgggactacaggcgcccgccaccacgcccggctaatttttttgtatttttagtagagacggggtttcactgtggtctcgatctcctgacctcgtgatccgcccgccttggcctcccaaggtgctgggattacaagcgtgagccaccgcacccggcctgaaaatattttctaaaaagataaaaaatatacataacgatgaaaaataatacaaatttaaaaaccaatacagtataacaactatttacatagtgcttacattgtattaggtgttataagcaatctagagatgatttagcaagtatacaggaggatgtgcctaggttatatgcaaatactgtgccattttatatcaggaacttgagcatctgcagatattggtatcggagggcggtcctggaaccaagcatccacggatactgaggggtgacatttcatgaagtgtagatcattgtattcagagattgtaaatgaaaaaaatatagaaactatttagttttggtagattttttttctgacaatgtgaccagactgaatttcctcataaagaaaaaatggcgtgcc

SEQ ID NO: 308372 - DNA, 3065 bp, Homo sapiens
aaagataaaaggtttctaaaacatgacggaggttgagatgaagcttcttcatggagtaaaaaatgtatttaaaagaaaattgagagaaaggactacagagccccgaattaataccaatagaagggcaatgcttttagattaaaatgaaggtgacttgcactgagcgggacctgcgagcagcgcgggcggcagcccgggggaagcggtgagtcgcgggcggcaggcccagccagtccgggaccatgtctggagaactaccaccaaacattaacatcaaggaacctcgatgggatcaaagcactttcattggacgagccaatcatttcttcactgtaactgaccccaggaacattctgttaaccaacgaacaactcgagagtgcgagaaaaatagtacatgattacagaaaatgaattgtggagagcaaagtacatctatgattcagcttttcatcctgacactggtgagaagatgattttgataggaagaatgtcagcccaggttcccatgaacatgaccatcacaggttgtatgatgacgttttacaggactacgccggctgtgctgttctggcagtggattaaccagtccttcaatgccgtcgtcaattacaccaacagaagtggagacgcacccctcactgtcaatgagttgggaacagcttacgtttctgcaacaactggtgccgtagcaacagctctaggactcaatgcattgaccaagcatgtctcaccactgataggacgttttgttccctttgctgccgtagctgctgctaattgcattaatattccattaatgaggcaaagggaactcaaagttggcattcccgtcacggatgagaatgggaaccgcttgggggagtcggcgaacgctgcgaaacaagccatcacgcaagttgtcgtgtccaggattctcatggcagcccctggcatggccatccctccattcattatgaacactttggaaaagaaagcctttttgaagaggttcccatggatgagtgcacccattcaagttgggttagttggcttctgtttggtgtttgctacacccctgtgttgtgccctgtttcctcagaaaagttccatgtctgtgacaagcttggaggccgagttgcaagctaagatccaagagagccatcctgaattgcgacgcgtgtacttcaataagggattgtaaagcagggaggaaacctctgcagctcattctgccactgcaaagctggtgtagccatgctggtgagaaaaatcctgttcaacctgggttctcccagttacggaaaccttttaaagatccacattagccttttagaataaagctgctactttaacagagcacctggcgtgggccaagtgcctgatactcccttacactgaatcatgttatgatttatagaaatacctttcctgtagcttttatagtcattgtttttcaaagacgatataccagccctcacccaggttttaaaaaagcactggtaggcatagaataggtgctcagtatatggtcagtaaatgttctattgattatcaatcagtgaaaaaagaaatctgtttaaaatactgaattttcatctcactcccattgcaaatcaaggagatctcagcagtgaactgggaaaatacaaaagctctgggctaatctataaaaacttaccctgaaatattaagggcagtttgcttctagtttggggattgcgctagcccaatgaaggtgatgaagcttttggatttggagggtaaaagctccttcacaccccttccaaaagtcagtcacagaccactgcaacatgccttccctgctggatcattatatacattcagattgtgagtggattgccttggttgacttttaatttattgttttttgttcttataaagatgataatcttaccttgcagttattgactttatattcaattatttacatcaaataatgaaataactgaaatgtacaaatgtcaaattttggaagtatattcaataccaatgctgtatgagtgggctgaatccagttcattgttttttttttggtaagaagtgagactacagttccagctacctacatgtcttttcttgtcatccttatagatctctttggctttcagaaagatacagtgataatgtgtgtatgaatcagtcacaatgaattttacttgaatattgtatgttgcattccacttcatttgaaaataatgaaaccatgtaccactgtttacatcatctgtagtgatttcatagataatatatttaatatgacagattatgtttcaactctgtagatgtttaacgtcatagacagttggccctctgtatccgtgagctctatatctgtgaattcaaccaagtttggatggaaaattttttttttttttttttttttttttgagacggagtctcgctctgtcacccaggctggagtgcagtggcgtagtctcggctcactgcaagctccgcctcctgggttcacgccgttctcctgcctcagcctctctgagaagctgggactacaggcgcccgccaccacgcccggctaatttttttgtatttttagtagagacggggtttcactgtggtctcgatctcctgacctcgtgatccgcccgccttggcctcccaaggtgctgggattacaagcgtgagccaccgcacccggcctgaaaatattttctaaaaagataaaaaatatacataacgatgaaaaataatacaaatttaaaaaccaatacagtataacaactatttacatagtgcttacattgtattaggtgttataagcaatctagagatgatttagcaagtatacaggaggatgtgcctaggttatatgcaaatactgtgccattttatatcaggaacttgagcatctgcagatattggtatcggagggcggtcctggaaccaagcatccacggatactgaggggtgacatttcatgaagtgtagatcattgtattcagagattgtaaatgaaaaaaatatagaaactatttagttttggtagattttttttctgacaatgtgaccagactgaatttcctcataaagaaaaaatggcgtgcc

SEQ ID NO: 308373 - DNA, 3106 bp, Homo sapiens
cgcgctccggggacgcgcgaggacgccgtggcgggagaagcgtttccggtggcggcggaggctgcactgagcgggacctgcgagcagcgcgggcggcagcccgggggaagcgtccgggaccatgtctggagaactaccaccaaacattaacatcaaggaacctcgatgggatcaaagcactttcattggacgagccaatcatttcttcactgtaactgaccccaggaacattctgttaaccaacgaacaactcgagagtgcgagaaaaatagtacatgattacaggcaaggaattgttcctcctggtcttacagaaaatgaattgtggagagcaaagtacatctatgattcagcttttcatcctgacactggtgagaagatgattttgataggaagaatgtcagcccaggttcccatgaacatgaccatcacaggttgtatgatgacgttttacaggactacgccggctgtgctgttctggcagtggattaaccagtccttcaatgccgtcgtcaattacaccaacagaagtggagacgcacccctcactgtcaatgagttgggaacagcttacgtttctgcaacaactggtgccgtagcaacagctctaggactcaatgcattgaccaagcatgtctcaccactgataggacgttttgttccctttgctgccgtagctgctgctaattgcattaatattccattaatgaggcaaagggaactcaaagttggcattcccgtcacggatgagaatgggaaccgcttgggggagtcggcgaacgctgcgaaacaagccatcacgcaagttgtcgtgtccaggattctcatggcagcccctggcatggccatccctccattcattatgaacactttggaaaagaaagcctttttgaagaggttcccatggatgagtgcacccattcaagttgggttagttggcttctgtttggtgtttgctacacccctgtgttgtgccctgtttcctcagaaaagttccatgtctgtgacaagcttggaggccgagttgcaagctaagatccaagagagccatcctgaattgcgacgcgtgtacttcaataagggattgtaaagcagggaggaaacctctgcagctcattctgccactgcaaagctggtgtagccatgctggtgagaaaaatcctgttcaacctgggttctcccagttacggaaaccttttaaagatccacattagccttttagaataaagctgctactttaacagagcacctggcgtgggccaagtgcctgatactcccttacactgaatcatgttatgatttatagaaatacctttcctgtagcttttatagtcattgtttttcaaagacgatataccagccctcacccaggttttaaaaaagcactggtaggcatagaataggtgctcagtatatggtcagtaaatgttctattgattatcaatcagtgaaaaaagaaatctgtttaaaatactgaattttcatctcactcccattgcaaatcaaggagatctcagcagtgaactgggaaaatacaaaagctctgggctaatctataaaaacttaccctgaaatattaagggcagtttgcttctagtttggggattgcgctagcccaatgaaggtgatgaagcttttggatttggagggtaaaagctccttcacaccccttccaaaagtcagtcacagaccactgcaacatgccttccctgctggatcattatatacattcagattgtgagtggattgccttggttgacttttaatttattgttttttgttcttataaagatgataatcttaccttgcagttattgactttatattcaattatttacatcaaataatgaaataactgaaatgtacaaatgtcaaattttggaagtatattcaataccaatgctgtatgagtgggctgaatccagttcattgttttttttttggtaagaagtgagactacagttccagctacctacatgtcttttcttgtcatccttatagatctctttggctttcagaaagatacagtgataatgtgtgtatgaatcagtcacaatgaattttacttgaatattgtatgttgcattccacttcatttgaaaataatgaaaccatgtaccactgtttacatcatctgtagtgatttcatagataatatatttaatatgacagattatgtttcaactctgtagatgtttaacgtcatagacagttggccctctgtatccgtgagctctatatctgtgaattcaaccaagtttggatggaaaattttttttttttttttttttttttttgagacggagtctcgctctgtcacccaggctggagtgcagtggcgtagtctcggctcactgcaagctccgcctcctgggttcacgccgttctcctgcctcagcctctctgagaagctgggactacaggcgcccgccaccacgcccgaatcccagcactttgggaggccgaggcgggtggatcacctgaggtcaggagtttgagaccagcctggccaacatggagaaaccccgcctctactaaaaatacagaaaattagccaggcatggaggcacatgcctgtaatcccagctactcgggaggctgaggtaggagaatcgcttgaatccgggagctggaggttgcagtgagccaagatcgcaccattgcactccagcctgggcaacaagagcgaaactccatctcaaaaaaaaaaaagagattataaaagggatgatgaacatggagctgcatctttttaaacgttgttttttgatgcttcagactcttaatgcttttatataaagctatcaactgtatgttgatcacagtttataagaaagaacaaatcaagattggcaatccttgccgatcttttagaaataccttttctggagaaaaaaaaatccacatgaagtgcaataagcttataaagctaagtagttattaatatttctattaacatgatacaaaggatgatgattgtaagtgtttactgactggcagcttttatttcagtattagcacagcgtcttgccagtgttggaggccatgtattatttcagttcaactggatgaaatgttaaataaactcagaatgaaaataaattct

SEQ ID NO: 308374 - DNA, 2126 bp, Homo sapiens
cgcgctccggggacgcgcgaggacgccgtggcgggagaagcgtttccggtggcggcggaggctgcactgagcgggacctgcgagcagcgcgggcggcagcccgggggaagcgtccgggaccatgtctggagaactaccaccaaacattaacatcaaggaacctcgatgggatcaaagcactttcattggacgagccaatcatttcttcactgtaactgaccccaggaacattctgttaaccaacgaacaactcgagagtgcgagaaaaatagtacatgattacaggcaaggaattgttcctcctggtcttacagaaaatgaattgtggagagcaaagtacatctatgattcagcttttcatcctgacactggtgagaagatgattttgataggaagaatgtcagcccaggttcccatgaacatgaccatcacaggttgtatgatgacgttttacaggactacgccggctgtgctgttctggcagtggattaaccagtccttcaatgccgtcgtcaattacaccaacagaagtggagacgcacccctcactgtcaatgagttgggaacagcttacgtttctgcaacaactggtgccgtagcaacagctctaggactcaatgcattgaccaagcatgtctcaccactgataggacgttttgttccctttgctgccgtagctgctgctaattgcattaatattccattaatgaggcaaagggaactcaaagttggcattcccgtcacggatgagaatgggaaccgcttgggggagtcggcgaacgctgcgaaacaagccatcacgcaagttgtcgtgtccaggattctcatggcagcccctggcatggccatccctccattcattatgaacactttggaaaagaaagcctttttgaagaggttcccatggatgagtgcacccattcaagttgggttagttggcttctgtttggtgtttgctacacccctgtgttgtgccctgtttcctcagaaaagttccatgtctgtgacaagcttggaggccgagttgcaagctaagatccaagagagccatcctgaattgcgacgcgtgtacttcaataagggattgtaaagcagggaggaaacctctgcagctcattctgccactgcaaagctggtgtagccatgctggtgagaaaaatcctgttcaacctgggttctcccagttacggaaaccttttaaagatccacattagccttttagaataaagctgctactttaacagagcacctggcgtgggccaagtgcctgatactcccttacactgaatcatgttatgatttatagaaatacctttcctgtagcttttatagtcattgtttttcaaagacgatataccagccctcacccaggttttaaaaaagcactggtaggcatagaataggtgctcagtatatggtcagtaaatgttctattgattatcaatcagtgaaaaaagaaatctgtttaaaatactgaattttcatctcactcccattgcaaatcaaggagatctcagcagtgaactgggaaaatacaaaagctctgggctaatctataaaaacttaccctgaaatattaagggcagtttgcttctagtttggggattgcgctagcccaatgaaggtgatgaagcttttggatttggagggtaaaagctccttcacaccccttccaaaagtcagtcacagaccactgcaacatgccttccctgctggatcattatatacattcagattgtgagtggattgccttggttgacttttaatttattgttttttgttcttataaagatgataatcttaccttgcagttattgactttatattcaattatttacatcaaataatgaaataactgaaatgtacaaatgtcaaattttggaagtatattcaataccaatgctgtatgagtgggctgaatccagttcattgttttttttttggtaagaagtgagactacagttccagctacctacatgtcttttcttgtcatccttatagatctctttggctttcagaaagatacagtgataatgtgtgtatgaatcagtcacaatgaattttacttgaatattgtatgttgcattccacttcatttgaaaataatgaaaccatgtaccactgtt

SEQ ID NO: 308375 - DNA, 2191 bp, Homo sapiens
cgcgctccggggacgcgcgaggacgccgtggcgggagaagcgtttccggtggcggcggaggctgcactgagcgggacctgcgagcagcgcgggcggcagcccgggggaagcgtccgggaccatgtctggagaactaccaccaaacattaacatcaaggaacctcgatgggatcaaagcactttcattggacgagccaatcatttcttcactgtaactgaccccaggaacattctgttaaccaacgaacaactcgagagtgcgagaaaaatagtacatgattacaggcaaggaattgttcctcctggtcttacagaaaatgaattgtggagagcaaagtacatctatgattcagcttttcatcctgacactggtgagaagatgattttgataggaagaatgtcagcccaggttcccatgaacatgaccatcacaggttgtatgatgacgttttacaggactacgccggctgtgctgttctggcagtggattaaccagtccttcaatgccgtcgtcaattacaccaacagaagtggagacgcacccctcactgtcaatgagttgggaacagcttacgtttctgcaacaactggtgccgtagcaacagctctaggactcaatgcattgaccaagcatgtctcaccactgataggacgttttgttccctttgctgccgtagctgctgctaattgcattaatattccattaatgaggcaaagggaactcaaagttggcattcccgtcacggatgagaatgggaaccgcttgggggagtcggcgaacgctgcgaaacaagccatcacgcaagttgtcgtgtccaggattctcatggcagcccctggcatggccatccctccattcattatgaacactttggaaaagaaagcctttttgaagaggttcccatggatgagtgcacccattcaagttgggttagttggcttctgtttggtgtttgctacacccctgtgttgtgccctgtttcctcagaaaagttccatgtctgtgacaagcttggaggccgagttgcaagctaagatccaagagagccatcctgaattgcgacgcgtgtacttcaataagggattgtaaagcagggaggaaacctctgcagctcattctgccactgcaaagctggtgtagccatgctggtgagaaaaatcctgttcaacctgggttctcccagttacggaaaccttttaaagatccacattagccttttagaataaagctgctactttaacagagcacctggcgtgggccaagtgcctgatactcccttacactgaatcatgttatgatttatagaaatacctttcctgtagcttttatagtcattgtttttcaaagacgatataccagccctcacccaggttttaaaaaagcactggtaggcatagaataggtgctcagtatatggtcagtaaatgttctattgattatcaatcagtgaaaaaagaaatctgtttaaaatactgaattttcatctcactcccattgcaaatcaaggagatctcagcagtgaactgggaaaatacaaaagctctgggctaatctataaaaacttaccctgaaatattaagggcagtttgcttctagtttggggattgcgctagcccaatgaaggtgatgaagcttttggatttggagggtaaaagctccttcacaccccttccaaaagtcagtcacagaccactgcaacatgccttccctgctggatcattatatacattcagattgtgagtggattgccttggttgacttttaatttattgttttttgttcttataaagatgataatcttaccttgcagttattgactttatattcaattatttacatcaaataatgaaataactgaaatgtacaaatgtcaaattttggaagtatattcaataccaatgctgtatgagtgggctgaatccagttcattgttttttttttggtaagaagtgagactacagttccaagcctgggcaaccacaagcgagatccatctcaacaaccacacaaaacgcattttctcaccgggacagacgacacagtgcacccagcactctctataccccgatgtactaagcactcctcacaactctataacgcgcttacacatacacgctaccaaccggtcatgtctcacacaacagaataagaatagagaaactcactcatgggaaccttgaccgattttaa

SEQ ID NO: 308376 - DNA, 4108 bp, Homo sapiens
aaagataaaaggtttctaaaacatgacggaggttgagatgaagcttcttcatggagtaaaaaatgtatttaaaagaaaattgagagaaaggactacagagccccgaattaataccaatagaagggcaatgcttttagattaaaatgaaggtgacttgcactgagcgggacctgcgagcagcgcgggcggcagcccgggggaagcggtgagtcgcgggcggcaggcccagccagtccgggaccatgtctggagaactaccaccaaacattaacatcaaggaacctcgatgggatcaaagcactttcattggacgagccaatcatttcttcactgtaactgaccccaggaacattctgttaaccaacgaacaactcgagagtgcgagaaaaatagtacatgattacagaaaatgaattgtggagagcaaagtacatctatgattcagcttttcatcctgacactggtgagaagatgattttgataggaagaatgtcagcccaggttcccatgaacatgaccatcacaggttgtatgatgacgttttacaggactacgccggctgtgctgttctggcagtggattaaccagtccttcaatgccgtcgtcaattacaccaacagaagtggagacgcacccctcactgtcaatgagttgggaacagcttacgtttctgcaacaactggtgccgtagcaacagctctaggactcaatgcattgaccaagcatgtctcaccactgataggacgttttgttccctttgctgccgtagctgctgctaattgcattaatattccattaatgaggcaaagggaactcaaagttggcattcccgtcacggatgagaatgggaaccgcttgggggagtcggcgaacgctgcgaaacaagccatcacgcaagttgtcgtgtccaggattctcatggcagcccctggcatggccatccctccattcattatgaacactttggaaaagaaagcctttttgaagaggttcccatggatgagtgcacccattcaagttgggttagttggcttctgtttggtgtttgctacacccctgtgttgtgccctgtttcctcagaaaaggtatgtatttgttattcgtcagaatcatcatgagtattaatcctaaaaaccaattgaaggtgcaggtgccattattccatttcattggcagggaagttgagactcaaaagatactgaagccagggtctcttaaaaggaagggatggaggcagaaatcaaacccacatctgtctaatttcagatgcacccagctcttttctacccccttccattaaatttgaaaatgctttattcttttgtgagaatcagattaactctgatgcaaatttgcttttatgaaaatttaaaatatggtccaatccactggcaaatgcatctgtaatacagatatgataggatgcaagttccacccccagggacagcaattatatgcacttagcttaggtggttggtatatttgcttcctttcttcccacttagttttttgccttaaaagctttcttgtgcacgcctctcatcgcaaactgcccttgaatcctgcctttgatgtgagaacaggactaactggcgttaaatcggcattttctacatcaggtctccagcctgctcttgacctgactccaacacacaaagcagcggcattttgttgtctgtcattttctgtaagtgttaccaggccccttgccttggtaataccctttcctttgtgggccagtaggtcccgaacatatggtctttaatcccccagccttgcggagttggttttggatgaggtgttctgttctagaactaatgctgtcagatccctctacctgatcgagaactccaccttgtatctgctctcccactctgtctccgaccctgctgttcttgaatagaaatttaaacctcatggacaggagcccttcatcaccttggagcctactgaagagccccccttgaagagggcaggaccttcagaacttgctctgggagcctgattcagatgaatttcctcatctctacagtgggataatgatacctgcttaattgtacaaaccccagagtcttggggctcaacctgagaatgtccatttctgtagtatgtggcttatgaacactggtgttcagcagctggccttgatttagcagtttagactttgagcacataaaatgccaaggggtgtgcctgataccaagttgtaaaacacctaagaaatgtagctgtaattattttcagattgaaagggttttagatttgaaaacccatagagaaactttctactttggccttttttctttgagtgctgcaagaaataaaatatagcccaacatttattttttatgattcattgaaactctaggggtagaaatggaaagctttctgtaactactagtgtccttaggtcaaggccctcagaaagcgtgtggttttacatttgagaaaccaatcctcttttgttttactgtattttaaaatagcttcttactctgttttgttgtttatacattgtatgtttggcttcttgaggtctctggctcctcagtttttccttggctcataacatagtatcctcattgatccaagcatgaccctgttttgcttatttttattttacttatactaataatataatgaatatccacaaattcagtgcccaatgaggcaggagaatcgctcgaacccagtaggcagaggctgtggtgagccaagatcacgctactgcattccagcctgggcaacagtgcgagattctgtctcaaaaaaaaaaaaaaaaaaaatatatatatatatatatatatatatatctccaataagttacatcttataggctcctcccaacctgtgtccctgcctcccctgcagatttaaccactatgctgaatttcatgctcttgcattttatatttgtgtatgtatctttagtttgtcttaggaactttttagacaagggtgtcacactgtcataagatgtatagtcttctagtacttgttctttttattcagtgtcagaactaagattcatctacattattgtgtgtacctatagtccattcattgttgttgttgtataatagtgcattgtatgaatgcaccacagtttcccgtctcctatgtgaacaagtgataatgaaaacattctttattaacatttttgagaagcagcaaatgtgttgctttgagagatatttatagctttaaatgtttatattatgaagaatagctgaaaatcaatgcactaaatgtcccaacttaaaaaaaaaaaagcacaaaagaataaacatcagaaaagaaggaaggaaggagatgaagatcagaaatcaataaaataaataacagaaagagtagaggatcaacaaagtgaaatcttggttctttgaaaatagaaacaaaatagacagttgtctggtgagattaatcaaaacaaaaagagaaagagaaaagtacaaataatatgaatgaaaaagaggtataactgtaggttcagcagtgattaaaaataataccaacattataccaacagatttgaaaacaagcaaaatagacaaatttctggaaaaaatattagcaaagctgaaaaattagaaagtcagaataggccagatagtcattaaggaagctgaagcagcatttaatcttcctcctacaaagaaaacacaagaaacaggtagttttacaggtaagtttctcccaactgtcaagaaacagattattccaatttcaaacaaactctcctggaagataaaaaagagaatactccccatcatccaccaaggtttgaataactttaattccaagatcagacttgggcctttaacatacattcatagtaattacagatacttagagatcagtggcaaaacagaaagaccaagaggtggtatagcagggctttgggatcaagaaagatctgccttcaacatctcagttgcacctcaggtttccttacctgtacaattataatactggacttacagagttttcctaagggttaaaatgcataacgtctggcccagcaagtgagctgtaagtcatagccattatcattaccatcatcagtgtcgtcatcatcatttaaaatcacccaaagaccccccccata

SEQ ID NO: 308377 - DNA, 989 bp, Homo sapiens
cgcgctccggggacgcgcgaggacgccgtggcgggagaagcgtttccggtggcggcggaggctgcactgagcgggacctgcgagcagcgcgggcggcagcccgggggaagcgtccgggaccatgtctggagaactaccaccaaacattaacatcaaggaacctcgatgggatcaaagcactttcattggacgagccaatcatttcttcactgtaactgaccccaggaacattctgttaaccaacgaacaactcgagagtgcgagaaaaatagtacatgattacaggcaaggaattgttcctcctggtcttacagaaaatgaattgtggagagcaaagtacatctatgattcagcttttcatcctgacactggtgagaagatgattttgataggaagaatgtcagcccaggttcccatgaacatgaccatcacaggttgtatgatgacgttttacaggactacgccggctgtgctgttctggcagtggattaaccagtccttcaatgccgtcgtcaattacaccaacagaagtggagacgcacccctcactgtcaatgagttgggaacagcttacgtttctgcaacaactggtgccgtagcaacagctctaggactcaatgcattgaccaagcatgtctcaccactgataggacgttttgttccctttgctgccgtagctgctgctaattgcattaatattccattaatgaggcaaagggaactcaaagttggcattcccgtcacggatgagaatgggaaccgcttgggggagtcggcgaacgctgcgaaacaagccatcacgcaagttgtcgtgtccaggattctcatggcagcccctggcatgggttagcaggactttgtcatttattccataaatacaggttgaaccagcgttcacggatccgtgaaccagaaaacaaacacatatatcacacctcttagtggaaattgccttccactgggggtggcagaaaataaacaagtaaata

SEQ ID NO: 308378 - DNA, 1173 bp, Homo sapiens
aaagataaaaggtttctaaaacatgacggaggttgagatgaagcttcttcatggagtaaaaaatgtatttaaaagaaaattgagagaaaggactacagagccccgaattaataccaatagaagggcaatgcttttagattaaaatgaaggtgacttgcactgagcgggacctgcgagcagcgcgggcggcagcccgggggaagcgtccgggaccatgtctggagaactaccaccaaacattaacatcaaggaacctcgatgggatcaaagcactttcattggacgagccaatcatttcttcactgtaactgaccccaggaacattctgttaaccaacgaacaactcgagagtgcgagaaaaatagtacatgattacaggcaaggaattgttcctcctggtcttacagaaaatgaattgtggagagcaaagtacatctatgattcagcttttcatcctgacactggtgagaagatgattttgataggaagaatgtcagcccaggttcccatgaacatgaccatcacaggttgtatgatgacgttttacaggactacgccggctgtgctgttctggcagtggattaaccagtccttcaatgccgtcgtcaattacaccaacagaagtggagacgcacccctcactgtcaagtaaggctacgagaattgaccactctctgcagttcttcaaccttcattttattaagtggtgatactctcctgtttaaaaaagcctatgtgtgcatatttttatattgttcagaatattatgtagcatccttttttgtagcttttttcttttttaaagtaaagtgtttcattttctctctccctatcaagaaaacagtcttcttccagcctgccttctcagacattactcgtgcctttggaggtactggtaggatgttacctccttctcaccctggagctcatggccctgtagaacacatggcaggcagcaccggcctggcctctgataagtgacaggctgttccgccatctaccctgcctgagttgacagacaccaacgttaagagtagaggagacaaagtgtggtctctgcagaaatcaaggggagaccatggcggtgtgaactttatatctgatatgtttttaaaatagctcatctgtggagtccaaaagaaagcaatgagttttaattttttgtcacctgtt

SEQ ID NO: 308379 - DNA, 453 bp, Homo sapiens
ctcagcctcccaaagtgctgggattacagacgtaagccaccacacccagccagagcataaacttttaaaaccttgtagccacttgtctctaggacactggggagatatttgaaatgagcaattgccatattatttgttgttttcttaggcaaggaattgttcctcctggtcttacagaaaatgaattgtggagagcaaagtacatctatgattcagcttttcatcctgacactggtgagaagatgattttgataggaagaatgtcagcccaggttcccatgaacatgaccatcacaggttgtatgatgacgttttacaggtatgttatgaatatgtagcaacagtgtgtttaccattacagaagctcaaagtatatttttgtatgtaaataattttgttgaaataagtattatttcataagtatatgaagtgacaaacaaggtaattagcttg

SEQ ID NO: 308380 - DNA, 397 bp, Homo sapiens
tgagttgggaacagcttacgtttctgcaacaactggtgccgtagcaacagctctaggactcaatgcattgaccaaggtactcagatttttatttccataataaagctgtttaatttgttatcacctgcctggctctaaatccctctattatttcttaaactagttcaagtcatatggctttcttgttatagtgcttatcttcagctgcatattttagttatatcttccaataagtttgggaagagttgtcaccagtaacacctaccaggactgtggtctgtgcctgactctgtgtacgaagtgctaaatgttcacccatcctgacagcccaccagaggcattgcagagggcagtgtgcctcaggccacagctctgaagagaggcaagagcatctctc

SEQ ID NO: 308381 - DNA, 2072 bp, Homo sapiens
acgctccgggcctccaggtctcgcaggccccgccccctcgccgcgggttcgctgttgggcggagatattcgccgccggcgcttgcgcccggaaggtgtgccgcaccacacgggggaggaaggaaggagctcccaactcgccggcctggccacgggatggcccccaaattcccagactctgtggaggagctccgcgccgccggcaatgagagtttccgcaacggccagtacgccgaggcctccgcgctctacggccgcgcgctgcgggtgctgcaggcgcaaggttcttcagacccagaagaagaaagtgttctctactccaaccgagcagcatgtcacttgaaggatggaaactgcagagactgcatcaaagattgcacttcagcactggccttggttcccttcagcattaagcccctgctgcggcgagcatctgcttatgaggctctggagaagtaccctatggcctatgttgactataagactgtgctgcagattgatgataatgtgacgtcagccgtagaaggcatcaacagaatgaccagagctctcatggactcgcttgggcctgagtggcgcctgaagctgccctcaatccccttggtgcctgtttcagctcagaagaggtggaattccttgccttcggagaaccacaaagagatggctaaaagcaaatccaaagaaaccacagctacaaagaacagagtgccttctgctggggatgtggagaaagccagagttctgaaggaagaaggcaatgagcttgtaaagaagggaaaccataagaaagctattgagaagtacagtgaaagcctcttgtgtagtaacctggaatctgccacgtacagcaacagagcactctgctatttggtcctgaagcagtacacagaagcagtgaaggactgcacagaagccctcaagctggatggaaagaacgtgaaggcattctacagacgggctcaagcccacaaagcactcaaggactataaatccagctttgcagacatcagcaacctcctacagattgagcctaggaatggtcctgcacagaagttgcggcaggaagtgaagcagaacctacactaaaaacccaacagggcaactggaacccctgcctgaccttacccagagaagccatgggccacctgctctgtgcccgctcctgaaacccagcatgccccaagtgagctctgaagccccctcctcaatcccttgatggcctcccaccctgtaagaggctttgcttgttcaaattaaactcagtgtagtcaaacacagacatggttgttgcaccagaaaggtccccactagagctaagcgtgaagctgaagctctgtccctattcccccagcccagctagctgatcacaccaacagatcctcatcagcaaagcatttggctttgtcctgcccaagtgggctgcagactgagtgctgcccttgtagcttccccagaccccaactcactgcagttcatctgaacaacctgagctcctgggccggggtggaaggagggggataaacctaaggccctgatccaaagcagcctgttgagctggttctccagggctgcagtctctccaggtgtacagctgctgtccctgccctgtcctgtccttgcacagtctcctatgtctgagccccagtgccttctgttcgggccctcctttggtgggaaggcagagccctgacccttgaatggttgtccttgactctgtgctgctgccttctgcagagaggcacctaagctgtttaaagagcccagtgattgtggctgctcctcctagaggtgggagggggcaagaggcctccttggtcagtgtccatgctttctgggcagggacttggttttttgttccaacagtggccttctccgggcttcatagttctttgtaatatgttgaagttaatttgaattgactgattttgttgaactgtgtgtttaagctgttgcattaaaaagctttcttctacatcaatatctgctgtgctttcatttatgccttttcagctttgcacctggaactctgtagtaataataaaagttattgcttattgggcattcattcatttg

SEQ ID NO: 308382 - DNA, 2461 bp, Homo sapiens
acgctccgggcctccaggtctcgcaggccccgccccctcgccgcgggttcgctgttgggcggagatattcgccgccggcgcttgcgcccggaaggtgtgccgcaccacacgggggaggaaggaaggagctcccaactcgccggcctggccacgggatggcccccaaattcccagactctgtggaggagctccgcgccgccggcaatgagagtttccgcaacggccagtacgccgaggcctccgcgctctacggccgcgcgctgcgggtgctgcaggcgcaaggttcttcagacccagaagaagaaagtgttctctactccaaccgagcagcatgtcacttgaaggatggaaactgcagagactgcatcaaagattgcacttcagcactggccttggttcccttcagcattaagcccctgctgcggcgagcatctgcttatgaggctctggagaagtaccctatggcctatgttgactataagactgtgctgcagattgatgataatgtgacgtcagccgtagaaggcatcaacagaatgaccagagctctcatggactcgcttgggcctgagtggcgcctgaagctgccctcaatccccttggtgcctgtttcagctcagaagaggtggaattccttgccttcggagaaccacaaagagatggctaaaagcaaatccaaagaaaccacagctacaaagaacagagtgccttctgctggggatgtggagaaagccagagttctgaaggaagaaggcaatgagcttgtaaagaagggaaaccataagaaagctattgagaagtacagtgaaagcctcttgtgtagtaacctggaatctgccacgtacagcaacagagcactctgctatttggtcctgaagcagtacacagaagcagtgaaggactgcacagaagccctcaagctggatggaaagaacgtgaaggcattctacagacgggctcaagcccacaaagcactcaaggactataaatccagctttgcagacatcagcaacctcctacagattgagcctaggaatggtcctgcacagaagttgcggcaggaagtgaagcagaacctacactaaaaacccaacagggcaactggaacccctgcctgaccttacccagagaagccatgggccacctgctctgtgcccgctcctgaaacccagcatgccccaagtgagctctgaagccccctcctcaatcccttgatggcctcccaccctgtaagaggctttgcttgttcaaattaaactcagtgtagtcaaacacagacatggttgttgcaccagaaaggtccccactagagctaagcgtgaagctgaagctctgtccctattcccccagcccagctagctgatcacaccaacagatcctcatcagcaaagcatttggctttgtcctgcccaagtgggctgcagactgagtgctgcccttgtagcttccccagaccccaactcactgcagttcatctgaacaacctgagctcctgggccggggtggaaggagggggataaacctaaggccctgatccaaagcagcctgttgagctggttctccagggctgcagtctctccaggtgtacagctgctgtccctgccctgtcctgtccttgcacagtctcctatgtctgagccccagtgccttctgttcgggccctcctttggtgggaaggcagagccctgacccttgaatggttgtccttgactctgtgctgctgccttctgcagagaggcacctaagctgtttaaagagcccagtgattgtggctgctcctcctagaggtgggagggggcaagaggcctccttggtcagtgtccatgctttctgggcagggacttggttttttgttccaacagtggccttctccgggcttcatagttctttgtaatatgttgaagttaatttgaattgactgattttgttgaactgtgtgtttaagctgttgcattaaaaagctttcttctacatcaaaaaaaaaaaaaaaaaaaaaaaaacagaaactaaaaaaacaaaaaatacaacaacaaacacaacaacaacaaaaaaagggggcgcggcccttaataaattaaacacacgggggggccaccagtagtgacgcaaccacgcatgttttataaagaaggcgtcccaatatggaggcacaaaatataaagcaaacagacaaggcggccaccctaaatcacacaaagatgagagggggaaaaagccggaaacgggccgccctgaggagaggacccccttcaacagtagggagggggaacgcacaacacaaaaagcggggcaaccaccaccactcccaagaagcaaacagaagcagccctacgagagagtatcatatacaacactctcacggcctataccggggatcacacaacacggaagcaatattcgtacgccgctgtagacaaaagaccaacactaggagactatctccccctgcaaaattttaacg

SEQ ID NO: 308383 - DNA, 2103 bp, Homo sapiens
acgctccgggcctccaggtctcgcaggccccgccccctcgccgcgggttcgctgttgggcggagatattcgccgccggcgcttgcgcccggaaggtgtgccgcaccacacgggggaggaaggaaggagctcccaactcgccggcctggccacgggatggcccccaaattcccagactctgtggaggagctccgcgccgccggcaatgagagtttccgcaacggccagtacgccgaggcctccgcgctctacggccgcgcgctgcgggtgctgcaggcgcaaggttcttcagacccagaagaagaaagtgttctctactccaaccgagcagcatgtcacttgaaggatggaaactgcagagactgcatcaaagattgcacttcagcactggccttggttcccttcagcattaagcccctgctgcggcgagcatctgcttatgaggctctggagaagtaccctatggcctatgttgactataagactgtgctgcagattgatgataatgtgacgtcagccgtagaaggcatcaacagaatgaccagagctctcatggactcgcttgggcctgagtggcgcctgaagctgccctcaatccccttggtgcctgtttcagctcagaagaggtggaattccttgccttcggagaaccacaaagagatggctaaaagcaaatccaaagaaaccacagctacaaagaacagagtgccttctgctggggatgtggagaaagccagagttctgaaggaagaaggcaatgagcttgtaaagaagggaaaccataagaaagctattgagaagtacagtgaaagcctcttgtgtagtaacctggaatctgccacgtacagcaacagagcactctgctatttggtcctgaagcagtacacagaagcagtgaaggactgcacagaagccctcaagctggatggaaagaacgtgaaggcattctacagacgggctcaagcccacaaagcactcaaggactataaatccagctttgcagacatcagcaacctcctacagattgagcctaggaatggtcctgcacagaagttgcggcaggaagtgaagcagaacctacactaaaaacccaacagggcaactggaacccctgcctgaccttacccagagaagccatgggccacctgctctgtgcccgctcctgaaacccagcatgccccaagtgagctctgaagccccctcctcaatcccttgatggcctcccaccctgtaagaggctttgcttgttcaaattaaactcagtgtagtcaaacacagacatggttgttgcaccagaaaggtccccactagagctaagcgtgaagctgaagctctgtccctattcccccagcccagctagctgatcacaccaacagatcctcatcagcaaagcatttggctttgtcctgcccaagtgggctgcagactgagtgctgcccttgtagcttccccagaccccaactcactgcagttcatctgaacaacctgagctcctgggccggggtggaaggagggggataaacctaaggccctgatccaaagcagcctgttgagctggttctccagggctgcagtctctccaggtgtacagctgctgtccctgccctgtcctgtccttgcacagtctcctatgtctgagccccagtgccttctgttcgggccctcctttggtgggaaggcagagccctgacccttgaatggttgtccttgactctgtgctgctgccttctgcagagaggcacctaagctgtttaaagagcccagtgattgtggctgctcctcctagaggtgggagggggcaagaggcctccttggtcagtgtccatgctttctgggcagggacttggttttttgttccaacagtggccttctccgggcttcatagttctttgtaatatgttgaagttaatttgaattgactgattttgttgaactgtgtgtttaagctgttgcattaaaaagctttcttctacatcgttccaacagtggccttctccgggcttcatagttctttgtaatatgttgaagttaatttgaattgactgattttgttgaactgtgtgtttaagctgttgcattaaaaagctttcttctacatcaaaaa

SEQ ID NO: 308384 - DNA, 1902 bp, Homo sapiens
cgaagcggaaaaaacccccatactcagtaagccgggttgtaatcggacgaggcacctcccaactcgccggcctggccacgggatggcccccaaattcccagactctgtggaggagctccgcgccgccggcaatgagagtttccgcaacggccagtacgccgaggcctccgcgctctacggccgcgcgctgcgggtgctgcaggcgcaaggttcttcagacccagaagaagaaagtgttctctactccaaccgagcagcatgtcacttgaaggatggaaactgcagagactgcatcaaagattgcacttcagcactggccttggttcccttcagcattaagcccctgctgcggcgagcatctgcttatgaggctctggagaagtaccctatggcctatgttgactataagactgtgctgcagattgatgataatgtgacgtcagccgtagaaggcatcaacagaatgaccagagctctcatggactcgcttgggcctgagtggcgcctgaagctgccctcaatccccttggtgcctgtttcagctcagaagaggtggaattccttgccttcggagaaccacaaagagatggctaaaagcaaatccaaagaaaccacagctacaaagaacagagtgccttctgctggggatgtggagaaagccagagttctgaaggaagaaggcaatgagcttgtaaagaagggaaaccataagaaagctattgagaagtacagtgaaagcctcttgtgtagtaacctggaatctgccacgtacagcaacagagcactctgctatttggtcctgaagcagtacacagaagcagtgaaggactgcacagaagccctcaagctggatggaaagaacgtgaaggcattctacagacgggctcaagcccacaaagcactcaaggactataaatccagctttgcagacatcagcaacctcctacagattgagcctaggaatggtcctgcacagaagttgcggcaggaagtgaagcagaacctacactaaaaacccaacagggcaactggaacccctgcctgaccttacccagagaagccatgggccacctgctctgtgcccgctcctgaaacccagcatgccccaagtgagctctgaagccccctcctcaatcccttgatggcctcccaccctgtaagaggctttgcttgttcaaattaaactcagtgtagtcaaacacagacatggttgttgcaccagaaaggtccccactagagctaagcgtgaagctgaagctctgtccctattcccccagcccagctagctgatcacaccaacagatcctcatcagcaaagcatttggctttgtcctgcccaagtgggctgcagactgagtgctgcccttgtagcttccccagaccccaactcactgcagttcatctgaacaacctgagctcctgggccggggtggaaggagggggataaacctaaggccctgatccaaagcagcctgttgagctggttctccagggctgcagtctctccaggtgtacagctgctgtccctgccctgtcctgtccttgcacagtctcctatgtctgagccccagtgccttctgttcgggccctcctttggtgggaaggcagagccctgacccttgaatggttgtccttgactctgtgctgctgccttctgcagagaggcacctaagctgtttaaagagcccagtgattgtggctgctcctcctagaggtgggagggggcaagaggcctccttggtcagtgtccatgctttctgggcagggacttggttttttgttccaacagtggccttctccgggcttcatagttctttgtaatatgttgaagttaatttgaattgactgattttgttgaactgtgtgtttaagctgttgcattaaaaagctttcttctacatc

SEQ ID NO: 308385 - DNA, 1654 bp, Homo sapiens
ctggtgttctagaggatcccagaaggatggagacgcaaagacgcatcaaagattgcacttcagcactggccttggttcccttcagcattaagcccctgctgcggcgagcatctgcttatgaggctctggagaagtaccctatggcctatgttgactataagactgtgctgcagattgatgataatgtgacgtcagccgtagaaggcatcaacagaatgaccagagctctcatggactcgcttgggcctgagtggcgcctgaagctgccctcaatccccttggtgcctgtttcagctcagaagaggtggaattccttgccttcggagaaccacaaagagatggctaaaagcaaatccaaagaaaccacagctacaaagaacagagtgccttctgctggggatgtggagaaagccagagttctgaaggaagaaggcaatgagcttgtaaagaagggaaaccataagaaagctattgagaagtacagtgaaagcctcttgtgtagtaacctggaatctgccacgtacagcaacagagcactctgctatttggtcctgaagcagtacacagaagcagtgaaggactgcacagaagccctcaagctggatggaaagaacgtgaaggcattctacagacgggctcaagcccacaaagcactcaaggactataaatccagctttgcagacatcagcaacctcctacagattgagcctaggaatggtcctgcacagaagttgcggcaggaagtgaagcagaacctacactaaaaacccaacagggcaactggaacccctgcctgaccttacccagagaagccatgggccacctgctctgtgcccgctcctgaaacccagcatgccccaagtgagctctgaagccccctcctcaatcccttgatggcctcccaccctgtaagaggctttgcttgttcaaattaaactcagtgtagtcaaacacagacatggttgttgcaccagaaaggtccccactagagctaagcgtgaagctgaagctctgtccctattcccccagcccagctagctgatcacaccaacagatcctcatcagcaaagcatttggctttgtcctgcccaagtgggctgcagactgagtgctgcccttgtagcttccccagaccccaactcactgcagttcatctgaacaacctgagctcctgggccggggtggaaggagggggataaacctaaggccctgatccaaagcagcctgttgagctggttctccagggctgcagtctctccaggtgtacagctgctgtccctgccctgtcctgtccttgcacagtctcctatgtctgagccccagtgccttctgttcgggccctcctttggtgggaaggcagagccctgacccttgaatggttgtccttgactctgtgctgctgccttctgcagagaggcacctaagctgtttaaagagcccagtgattgtggctgctcctcctagaggtgggagggggcaagaggcctccttggtcagtgtccatgctttctgggcagggacttggttttttgttccaacagtggccttctccgggcttcatagttctttgtaatatgttgaagttaatttgaattgactgattttgttgaactgtgtgtttaagctgttgcattaaaaagctttcttctacatc

SEQ ID NO: 308386 - DNA, 1906 bp, Homo sapiens
  misc_feature (124)..(125): n is a, c, g, or t
  misc_feature (143)..(144): n is a, c, g, or t
  misc_feature (160)..(161): n is a, c, g, or t
  misc_feature (165)..(166): n is a, c, g, or t
  misc_feature (169)..(169): n is a, c, g, or t
  misc_feature (171)..(173): n is a, c, g, or t
  misc_feature (175)..(175): n is a, c, g, or t
  misc_feature (180)..(180): n is a, c, g, or t
  misc_feature (184)..(184): n is a, c, g, or t
  misc_feature (188)..(188): n is a, c, g, or t
  misc_feature (190)..(190): n is a, c, g, or t
  misc_feature (206)..(206): n is a, c, g, or t
  misc_feature (298)..(298): n is a, c, g, or t
  misc_feature (300)..(300): n is a, c, g, or t
  misc_feature (343)..(343): n is a, c, g, or t
  misc_feature (346)..(346): n is a, c, g, or t
  misc_feature (359)..(359): n is a, c, g, or t
  misc_feature (361)..(361): n is a, c, g, or t
  misc_feature (378)..(378): n is a, c, g, or t
  misc_feature (380)..(382): n is a, c, g, or t
  misc_feature (386)..(386): n is a, c, g, or t
  misc_feature (388)..(388): n is a, c, g, or t
  misc_feature (393)..(393): n is a, c, g, or t
  misc_feature (398)..(398): n is a, c, g, or t
  misc_feature (400)..(400): n is a, c, g, or t
  misc_feature (409)..(409): n is a, c, g, or t
  misc_feature (414)..(415): n is a, c, g, or t
  misc_feature (420)..(420): n is a, c, g, or t
  misc_feature (426)..(426): n is a, c, g, or t
  misc_feature (436)..(436): n is a, c, g, or t
  misc_feature (442)..(442): n is a, c, g, or t
  misc_feature (446)..(446): n is a, c, g, or t
cgaagcggaaaaaacccccatactcagtaagccgggttgtaatcggacgaggcacctcccaactcgccggcctggccacgggatggcccccaaattcccagactctgtggaggagctccgctcnnttgtcaatttgatttttnnttacggccatttcgcnntggnnttntnnntnttttntttntcgntncgggtttttttggcgntatgtttttttttttcataataagatatttttttttttttttttttttttttctttttttttttttttttttatattttatatatttttttntntttttttttttttatcttttttttttttttttttttttttttntcntctttttcggtgntnattttttttttttgttntnnnttantnccctntggcntnttttttttnttttnnttttntgcagntttatgatantttttnttcntccgtagaaggcatcaacagaatgaccagagctctcatggactcgcttgggcctgagtggcgcctgaagctgccctcaatccccttggtgcctgtttcagctcagaagaggtggaattccttgccttcggagaaccacaaagagatggctaaaagcaaatccaaagaaaccacagctacaaagaacagagtgccttctgctggggatgtggagaaagccagagttctgaaggaagaaggcaatgagcttgtaaagaagggaaaccataagaaagctattgagaagtacagtgaaagcctcttgtgtagtaacctggaatctgccacgtacagcaacagagcactctgctatttggtcctgaagcagtacacagaagcagtgaaggactgcacagaagccctcaagctggatggaaagaacgtgaaggcattctacagacgggctcaagcccacaaagcactcaaggactataaatccagctttgcagacatcagcaacctcctacagattgagcctaggaatggtcctgcacagaagttgcggcaggaagtgaagcagaacctacactaaaaacccaacagggcaactggaacccctgcctgaccttacccagagaagccatgggccacctgctctgtgcccgctcctgaaacccagcatgccccaagtgagctctgaagccccctcctcaatcccttgatggcctcccaccctgtaagaggctttgcttgttcaaattaaactcagtgtagtcaaacacagacatggttgttgcaccagaaaggtccccactagagctaagcgtgaagctgaagctctgtccctattcccccagcccagctagctgatcacaccaacagatcctcatcagcaaagcatttggctttgtcctgcccaagtgggctgcagactgagtgctgcccttgtagcttccccagaccccaactcactgcagttcatctgaacaacctgagctcctgggccggggtggaaggagggggataaacctaaggccctgatccaaagcagcctgttgagctggttctccagggctgcagtctctccaggtgtacagctgctgtccctgccctgtcctgtccttgcacagtctcctatgtctgagccccagtgccttctgttcgggccctcctttggtgggaaggcagagccctgacccttgaatggttgtccttgactctgtgctgctgccttctgcagagaggcacctaagctgtttaaagagcccagtgattgtggctgctcctcctagaggtgggagggggcaagaggcctccttggtcagtgtccatgctttctgggcagggacttggttttttgttccaacagtggccttctccgggcttcatagttctttgtaatatgttgaagttaatttgaattgactgattttgttgaactgtgtgtttaagctgttgcattaaaaagctttcttctacatc

SEQ ID NO: 308387 - DNA, 1827 bp, Homo sapiens
acgctccgggcctccaggtctcgcaggccccgccccctcgccgcgggttcgctgttgggcggagatattcgccgccggcgcttgcgcccggaaggtgtgccgcaccacacgggggaggaaggaaggagctcccaactcgccggcctggccacgggatggcccccaaattcccagactctgtggaggagctccgcgccgccggcaatgagagtttccgcaacggccagtacgccgaggcctccgcgctctacggccgcgcgctgcgggtgctgcaggcgcaaggttcttcagacccagaagaagaaagtgttctctactccaaccgagcagcatgtcacttgaaggatggaaactgcagagactgcatcaaagattgcacttcagcactggccttggttcccttcagcattaagcccctgctgcggcgagcatctgcttatgaggctctggagaagtaccctatggcctatgttgactataagactgtgctgcagattgatgataatgtgacgtcagccgtagaaggcatcaacagaatgaccagagctctcatggactcgcttgggcctgagtggcgcctgaagctgccctcaatccccttggtgcctgtttcagctcagaagaggtggaattccttgccttcggagaaccacaaagagatggctaaaagcaaatccaaagaaaccacagctacaaagaacagagagcactctgctatttggtcctgaagcagtacacagaagcagtgaaggactgcacagaagccctcaagctggatggaaagaacgtgaaggcattctacagacgggctcaagcccacaaagcactcaaggactataaatccagctttgcagacatcagcaacctcctacagattgagcctaggaatggtcctgcacagaagttgcggcaggaagtgaagcagaacctacactaaaaacccaacagggcaactggaacccctgcctgaccttacccagagaagccatgggccacctgctctgtgcccgctcctgaaacccagcatgccccaagtgagctctgaagccccctcctcaatcccttgatggcctcccaccctgtaagaggctttgcttgttcaaattaaactcagtgtagtcaaacacagacatggttgttgcaccagaaaggtccccactagagctaagcgtgaagctgaagctctgtccctattcccccagcccagctagctgatcacaccaacagatcctcatcagcaaagcatttggctttgtcctgcccaagtgggctgcagactgagtgctgcccttgtagcttccccagaccccaactcactgcagttcatctgaacaacctgagctcctgggccggggtggaaggagggggataaacctaaggccctgatccaaagcagcctgttgagctggttctccagggctgcagtctctccaggtgtacagctgctgtccctgccctgtcctgtccttgcacagtctcctatgtctgagccccagtgccttctgttcgggccctcctttggtgggaaggcagagccctgacccttgaatggttgtccttgactctgtgctgctgccttctgcagagaggcacctaagctgtttaaagagcccagtgattgtggctgctcctcctagaggtgggagggggcaagaggcctccttggtcagtgtccatgctttctgggcagggacttggttttttgttccaacagtggccttctccgggcttcatagttctttgtaatatgttgaagttaatttgaattgactgattttgttgaactgtgtgtttaagctgttgcattaaaaagctttcttctacatc

SEQ ID NO: 308388 - DNA, 1554 bp, Homo sapiens
aaggctagaacctgggttgctttttatcatttatatatttttatgtgcatgcaaaaatgtttttatatcaggattccccaacttcttgatgaaaaactgttgaattgcccagaagctattaattgggggaagtcattaatcaggaaggatgatttacagcaggggaggaaatctctgggagagaggattgtagtcagtttggaagggacgatgctgaagagacctcactgatctcagttgggtgctgctccatggtttttttcctcttctgaatttgtatctagtgccttctgctggggatgtggagaaagccagagttctgaaggaagaaggcaatgagcttgtaaagaagggaaaccataagaaagctattgagaagtacagtgaaagcctcttgtgtagtaacctggaatctgccacgtacagcaacagagcactctgctatttggtcctgaagcagtacacagaagcagtgaaggactgcacagaagccctcaagctggatggaaagaacgtgaaggcattctacagacgggctcaagcccacaaagcactcaaggactataaatccagctttgcagacatcagcaacctcctacagattgagcctaggaatggtcctgcacagaagttgcggcaggaagtgaagcagaacctacactaaaaacccaacagggcaactggaacccctgcctgaccttacccagagaagccatgggccacctgctctgtgcccgctcctgaaacccagcatgccccaagtgagctctgaagccccctcctcaatcccttgatggcctcccaccctgtaagaggctttgcttgttcaaattaaactcagtgtagtcaaacacagacatggttgttgcaccagaaaggtccccactagagctaagcgtgaagctgaagctctgtccctattcccccagcccagctagctgatcacaccaacagatcctcatcagcaaagcatttggctttgtcctgcccaagtgggctgcagactgagtgctgcccttgtagcttccccagaccccaactcactgcagttcatctgaacaacctgagctcctgggccggggtggaaggagggggataaacctaaggccctgatccaaagcagcctgttgagctggttctccagggctgcagtctctccaggtgtacagctgctgtccctgccctgtcctgtccttgcacagtctcctatgtctgagccccagtgccttctgttcgggccctcctttggtgggaaggcagagccctgacccttgaatggttgtccttgactctgtgctgctgccttctgcagagaggcacctaagctgtttaaagagcccagtgattgtggctgctcctcctagaggtgggagggggcaagaggcctccttggtcagtgtccatgctttctgggcagggacttggttttttgttccaacagtggccttctccgggcttcatagttctttgtaatatgttgaagttaatttgaattgactgattttgttgaactgtgtgtttaagctgttgcattaaaaagctttcttctacatc

SEQ ID NO: 308389 - DNA, 628 bp, Homo sapiens
aacaaaatgtatgattctttcttggagaaactatagtctttttggatcatggtttaagtatccttaacaagcaacagatcaccactttaaaggtaacatagtttgaccaagctcaaggaatgtcatggggactgatctgagatggtgtttatgggttcctgtattgcacgtgttggaggagctaaagaggtggttccgaccagggggagggtggcagctctggctcttctgaaaaggcctacctcccatgggtgtgtgaaaggagaaatatcttcttgacccagctggaaacctccctgcaatcctgccttcttttccagaatgaccagagctctcatggactcgcttgggcctgagtggcgcctgaagctgccctcaatccccttggtgcctgtttcagctcagaagaggtggaattccttgccttcggagaaccacaaagagatggctaaaagcaaatccaaagaaaccacagctacaaagaacagaggtgagctgtgactccctgcccagagtcttgcaatctcccactatccattttctttagagtagtcctgcaaaaattggcattgtttagctgagttataaaaataatcttaggaacaaagtataaaacaaaatacaagtc

SEQ ID NO: 308390 - DNA, 1975 bp, Homo sapiens
acgctccgggcctccaggtctcgcaggccccgccccctcgccgcgggttcgctgttgggcggagatattcgccgccggcgcttgcgcccggaaggtgtgccgcaccacacgggggaggaaggaaggagctcccaactcgccggcctggccacgggatggcccccaaattcccagactctgtggaggagctccgcgccgccggcaatgagagtttccgcaacggccagtacgccgaggcctccgcgctctacggccgcgcgctgcgggtgctgcaggcgcaaggttcttcagacccagaagaagaaagtgttctctactccaaccgagcagcatgtcacttgaaggatggaaactgcagagactgcatcaaagattgcacttcagcactggccttggttcccttcagcattaagcccctgctgcggcgagcatctgcttatgaggctctggagaagtaccctatggcctatgttgactataagactgtgctgcagattgatgataatgtgacgtcagccgtagaaggcatcaacagaatgaccagagctctcatggactcgcttgggcctgagtggcgcctgaagctgccctcaatccccttggtgcctgtttcagctcagaagaggtggaattccttgccttcggagaaccacaaagagatggctaaaagcaaatccaaagaaaccacagctacaaagaacagagtgccttctgctggggatgtggagaaagccagagttctgaaggaagaaggcaatgagcttgtaaagaagggaaaccataagaaagctattgagaagtacagtgaaagcctcttgtgtagtaacctggaatctgccacgtacagcaacagagcactctgctatttggtcctgaagcagtacacagaagcagtgaaggactgcacagaagccctcaagctggatggaaagaacgtgaaggcattctacagacgggctcaagcccacaaagcactcaaggactataaatccagctttgcagacatcagcaacctcctacagattgagcctaggaatggtcctgcacagaagttgcggcaggaagtgaagcagaacctacactaaaaacccaacagggcaactggaacccctgcctgaccttacccagagaagccatgggccacctgctctgtgcccgctcctgaaacccagcatgccccaagtgagctctgaagccccctcctcaatcccttgatggcctcccaccctgtaagaggctttgcttgttcaaattaaactcagtgtagtcaaacacagacatggttgttgcaccagaaaggtccccactagagctaagcgtgaagctgaagctctgtccctattcccccagcccagctagctgatcacaccaacagatcctcatcagcaaagcatttggctttgtcctgcccaagtgggctgcagactgagtgctgcccttgtagcttccccagaccccaactcactgcagttcatctgaacaacctgagctcctgggccggggtggaaggagggggataaacctaaggccctgatccaaagcagcctgttgagctggttctccagggctgcagtctctccaggtgtacagctgctgtccctgccctgtcctgtccttgcacagtctcctatgtctgagccccagtgccttctgttcgggccctcctttggtgggaaggcagagccctgacccttgaatggttgtccttgactctgtgctgctgccttctgcagagaggcacctaagctgtttaaagagcccagtgattgtggctgctcctcctagaggtgggagggggcaagaggcctccttggtcagtgtccatgctttctgggcagggacttggttttttgttccaacagtggccttctccgggcttcatagttctttgtaatatgttgaagttaatttgaattgactgattttgttgaactgtgtgtttaagctgttgcattaaaaagctttcttctacatc

SEQ ID NO: 308391 - DNA, 1934 bp, Homo sapiens
acgctccgggcctccaggtctcgcaggccccgccccctcgccgcgggttcgctgttgggcggagatattcgccgccggcgcttgcgcccggaaggtgtgccgcaccacacgggggaggaaggaaggagctcccaactcgccggcctggccacgggatggcccccaaattcccagactctgtggaggagctccgcgccgccggcaatgagagtttccgcaacggccagtacgccgaggcctccgcgctctacggccgcgcgctgcgggtgctgcaggcgcaaggttcttcagacccagaagaagaaagtgttctctactccaaccgagcagcatgtcacttgaaggatggaaactgcagagactgcatcaaagattgcacttcagcactggccttggttcccttcagcattaagcccctgctgcggcgagcatctgcttatgaggctctggagaagtaccctatggcctatgttgactataagactgtgctgcagattgatgataatgtgacgtcagccgtagaaggcatcaacagaatgaccagagctctcatggactcgcttgggcctgagtggcgcctgaagctgccctcaatccccttggtgcctgtttcagctcagaagaggtggaattccttgccttcggagaaccacaaagagatggctaaaagcaaatccaaagaaaccacagctacaaagaacagagtgccttctgctggggatgtggagaaagccagagttctgaaggaagaaggcaatgagcttgtaaagaagggaaaccataagaaagctattgagaagtacagtgaaagcctcttgtgtagtaacctggaatctgccacgtacagcaacagagcactctgctatttggtcctgaagcagtacacagaagcagtgaaggactgcacagaagccctcaagctggatggaaagaacgtgaaggcattctacagacgggctcaagcccacaaagcactcaaggactataaatccagctttgcagacatcagcaacctcctacagattgagcctaggaatggtcctgcacagaagttgcggcaggaagtgaagcagaacctacactaaaaacccaacagggcaactggaacccctgcctgaccttacccagagaagccatgggccacctgctctgtgcccgctcctgaaacccagcatgccccaagtgagctctgaagccccctcctcaatcccttgatggcctcccaccctgtaagaggctttgcttgttcaaattaaactcagtgtagtcaaacacagacatggttgttgcaccagaaaggtccccactagagctaagcgtgaagctgaagctctgtccctattcccccagcccagctagctgatcacaccaacagatcctcatcagcaaagcatttggctttgtcctgcccaagtgggctgcagactgagtgctgcccttgtagcttccccagaccccaactcactgcagttcatctgaacaacctgagctcctgggccggggtggaaggagggggataaacctaaggccctgatccaaagcagcctgttgagctggttctccagggctgcagtctctccaggtgtacagctgctgtccctgccctgtcctgtccttgcacagtctcctatgtctgagccccagtgccttctgttcgggccctcctttggtgggaaggcagagccctgacccttgaatggttgtccttgactctgtgctgctgccttctgcagagaggcacctaagctgtttaaagagcccagtgattgtggctgctcctcctagaggtgggagggggcaagaggcctccttggtcagtgtccatgctttctgggcttcatagttctttgtaatatgttgaagttaatttgaattgactgattttgttgaactgtgtgtttaagctgttgcattaaaaagctttcttctacatc

SEQ ID NO: 308392 - DNA, 1900 bp, Homo sapiens
ggcctcgcgcggcggccagcagtcctgcccggcctcccacccttccagccccttccgactccggcatcctaccagaaacttcctcggccctttctttccacctgcttgttaactgccctgttggcccccatcctaagttatttaggcctcgttctgagccctgagaagaaagctaaaccctcctcccccgcagcaattcatttttcagttcttcagacccagaagaagaaagtgttctctactccaaccgagcagcatgtcacttgaaggatggaaactgcagagactgcatcaaagattgcacttcagcactggccttggttcccttcagcattaagcccctgctgcggcgagcatctgcttatgaggctctggagaagtaccctatggcctatgttgactataagactgtgctgcagattgatgataatgtgacgtcagccgtagaaggcatcaacagaatgaccagagctctcatggactcgcttgggcctgagtggcgcctgaagctgccctcaatccccttggtgcctgtttcagctcagaagaggtggaattccttgccttcggagaaccacaaagagatggctaaaagcaaatccaaagaaaccacagctacaaagaacagagtgccttctgctggggatgtggagaaagccagagttctgaaggaagaaggcaatgagcttgtaaagaagggaaaccataagaaagctattgagaagtacagtgaaagcctcttgtgtagtaacctggaatctgccacgtacagcaacagagcactctgctatttggtcctgaagcagtacacagaagcagtgaaggactgcacagaagccctcaagctggatggaaagaacgtgaaggcattctacagacgggctcaagcccacaaagcactcaaggactataaatccagctttgcagacatcagcaacctcctacagattgagcctaggaatggtcctgcacagaagttgcggcaggaagtgaagcagaacctacactaaaaacccaacagggcaactggaacccctgcctgaccttacccagagaagccatgggccacctgctctgtgcccgctcctgaaacccagcatgccccaagtgagctctgaagccccctcctcaatcccttgatggcctcccaccctgtaagaggctttgcttgttcaaattaaactcagtgtagtcaaacacagacatggttgttgcaccagaaaggtccccactagagctaagcgtgaagctgaagctctgtccctattcccccagcccagctagctgatcacaccaacagatcctcatcagcaaagcatttggctttgtcctgcccaagtgggctgcagactgagtgctgcccttgtagcttccccagaccccaactcactgcagttcatctgaacaacctgagctcctgggccggggtggaaggagggggataaacctaaggccctgatccaaagcagcctgttgagctggttctccagggctgcagtctctccaggtgtacagctgctgtccctgccctgtcctgtccttgcacagtctcctatgtctgagccccagtgccttctgttcgggccctcctttggtgggaaggcagagccctgacccttgaatggttgtccttgactctgtgctgctgccttctgcagagaggcacctaagctgtttaaagagcccagtgattgtggctgctcctcctagaggtgggagggggcaagaggcctccttggtcagtgtccatgctttctgggcagggacttggttttttgttccaacagtggccttctccgggcttcatagttctttgtaatatgttgaagttaatttgaattgactgattttgttgaactgtgtgtttaagctgttgcattaaaaagctttcttctacatc

SEQ ID NO: 308393 - DNA, 1916 bp, Homo sapiens
acgctccgggcctccaggtctcgcaggccccgccccctcgccgcgggttcgctgttgggcggagatattcgccgccggcgcttgcgcccggaaggtgtgccgcaccacacgggggaggaaggaaggagctcccaactcgccggcctggccacgggatggcccccaaattcccagactctgtggaggagctccgcgccgccggcaatgagagtttccgcaacggccagtacgccgaggcctccgcgctctacggccgcgcgctgcgggtgctgcaggcgcaaggttcttcagacccagaagaagaaagtgttctctactccaaccgagcagcatgtcacttgaaggatggaaactgcagagatgcggcgagcatctgcttatgaggctctggagaagtaccctatggcctatgttgactataagactgtgctgcagattgatgataatgtgacgtcagccgtagaaggcatcaacagaatgaccagagctctcatggactcgcttgggcctgagtggcgcctgaagctgccctcaatccccttggtgcctgtttcagctcagaagaggtggaattccttgccttcggagaaccacaaagagatggctaaaagcaaatccaaagaaaccacagctacaaagaacagagtgccttctgctggggatgtggagaaagccagagttctgaaggaagaaggcaatgagcttgtaaagaagggaaaccataagaaagctattgagaagtacagtgaaagcctcttgtgtagtaacctggaatctgccacgtacagcaacagagcactctgctatttggtcctgaagcagtacacagaagcagtgaaggactgcacagaagccctcaagctggatggaaagaacgtgaaggcattctacagacgggctcaagcccacaaagcactcaaggactataaatccagctttgcagacatcagcaacctcctacagattgagcctaggaatggtcctgcacagaagttgcggcaggaagtgaagcagaacctacactaaaaacccaacagggcaactggaacccctgcctgaccttacccagagaagccatgggccacctgctctgtgcccgctcctgaaacccagcatgccccaagtgagctctgaagccccctcctcaatcccttgatggcctcccaccctgtaagaggctttgcttgttcaaattaaactcagtgtagtcaaacacagacatggttgttgcaccagaaaggtccccactagagctaagcgtgaagctgaagctctgtccctattcccccagcccagctagctgatcacaccaacagatcctcatcagcaaagcatttggctttgtcctgcccaagtgggctgcagactgagtgctgcccttgtagcttccccagaccccaactcactgcagttcatctgaacaacctgagctcctgggccggggtggaaggagggggataaacctaaggccctgatccaaagcagcctgttgagctggttctccagggctgcagtctctccaggtgtacagctgctgtccctgccctgtcctgtccttgcacagtctcctatgtctgagccccagtgccttctgttcgggccctcctttggtgggaaggcagagccctgacccttgaatggttgtccttgactctgtgctgctgccttctgcagagaggcacctaagctgtttaaagagcccagtgattgtggctgctcctcctagaggtgggagggggcaagaggcctccttggtcagtgtccatgctttctgggcagggacttggttttttgttccaacagtggccttctccgggcttcatagttctttgtaatatgttgaagttaatttgaattgactgattttgttgaactgtgtgtttaagctgttgcattaaaaagctttcttctacatc

SEQ ID NO: 308394 - DNA, 312 bp, Homo sapiens
atctcacctccgggcctgctcctccaactcccgcaaccaccgcccgggcctcgcgcggcggccagcagtcctgcccggcctcccacccttccagccccttccgactccggcatcctaccagaaacttcctcggccctttctttccacctgcttgttaactgccctgttggcccccatcctaagttatttaggcctcgttctgagccctgagaagaaagctaaaccctcctcccccgcagcaattcatttttcagttagtatttgttgagtagctgttatataccgcctgtgtaacaagacacaaaaagtccc

SEQ ID NO: 308395 - DNA, 431 bp, Homo sapiens
cagtagtagattaggtctataaattcatcccaatgtctgagcagcttacagaacaagtcttcggattgcactggtgacccagctcatcccctctttctctcttgtagttctcagaataactgtagaatgtgctggaaatggaacattctcagataaggaggaactggccagatcaaactaagctgtgttcccatccctcctgaaacaggatcttatggtgctttagcccaggacgtcaagtatcccctaggtatgaaacccagagtggagcatgctttgaaggtccctcagctacatgcagactagactgcatgtagctgactctaactgccctgggaaactatcctgagctttgacagacctgccatgaatcttaagcttttattgtcccttgctgcctatctgtgaggaataaagttgcttcacttact

SEQ ID NO: 308396 - DNA, 5426 bp, Homo sapiens
ggagccagcccctgggcgcggcctgcagggtaccggcaaccgcccgggtaagcgggggcaggacaaggccggagcctgtgtccgcccggcagccgcccgcagctgcagagagtcccgctgcgtctccgccgcgtgcgccctcctcgaccagcagacccgcgctgcgctccgccgctgacatgtgtgccgctcagatgccgcccctggcgcacatcttccgagggacgttcgtccactccacctggacctgccccatggaggtgctgcgggatcacctcctcggcgtgagcgacagcggcaaaatagtgtttttagaagaagcatctcaacaggaaaaactggccaaagaatggtgcttcaagccgtgtgaaataagagaactgagccaccatgagttcttcatgcctgggctggttgatacacacatccatgcctctcagtattcctttgctggaagtagcatagacctgccactcttggagtggctgaccaagtacacatttcctgcagaacacagattccagaacatcgactttgcagaagaagtatataccagagttgtcaggagaacactaaagaatggaacaaccacagcttgttactttgcaacaattcacactgactcatctctgctccttgccgacattacagataaatttggacagcgggcatttgtgggcaaagtttgcatggatttgaatgacacttttccagaatacaaggagaccactgaggaatcgatcaaggaaactgagagatttgtgtcagaaatgctccaaaagaactattctagagtgaagcccatagtgacaccacgtttttccctctcctgctctgagactttgatgggtgaactgggcaacattgctaaaacccgtgatttgcacattcagagccatataagtgaaaatcgtgatgaagttgaagctgtgaaaaacttataccccagttataaaaactacacatctgtgtatgataaaaacaatcttttgacaaataagacagtgatggcacacggctgctacctctctgcagaagaactgaacgtattccatgaacgaggagcatccatcgcacactgtcccaattctaatttatcgctcagcagtggatttctaaatgtgctagaagtcctgaaacatgaagtcaagatagggctgggtacagacgtggctggtggctattcatattccatgcttgatgcaatcagaagagcagtgatggtttccaatatccttttaattaataaggtaaatgagaaaagcctcaccctcaaagaagtcttcagactagctactcttggaggaagccaagccctggggctggatggtgagattggaaactttgaagtgggcaaggaatttgatgccatcctgatcaaccccaaagcatccgactctcccattgacctgttttatggggacttttttggtgatatttctgaggctgttatccagaagttcctctatctaggagatgatcgaaatattgaagaggtttatgtgggcggaaagcaggtggttccgttttccagctcagtgtaagaccctcgggcgtctacaaagttctcctgggattagcgtggttctgcatctcccttgtgcccaggtggagttagaaagtcaaaaaatagtaccttgttcttgggatgactatccctttctgtgtctagttacagtattcacttgacaaatagttcgaaggaagttgcactaattctcaactctggttgagagggttcataaatttcatgaaaatatctccctttggagctgctcagacttactttaagctcaaacagaagggaatgctattactggtggtgttcctacggtaagacttaagcaaagcctttttcatatttgaaaatgtggaaagaaaagatgttcctaaaaggttagatattttgagctaataattgcaaaaattagaagactgaaaatggacccatgagagtatatttttatgagggagcaaaagttagactgagaacaaacgttagaaaatcacttcagattgtgtttgaaaattatatactgagcatactaatttaaaaagagaacttgttgaaatttaaaacgtgtttctaggttgaccttgtgttttagaaatttgcacttaatggaatttgcatttcagagatgtgttagtgttgtgctttgccttctttggcgatgaatgtcagaaattgaatgccacatgctttcataatatagttttgtgcttcaaagtgtttgacagaagttgggtattaaagatttaaagtctcttaggaatattattcatgtaactccatggcataaatagttgtatttttgtgtactttaaaatcaacttataactgtgagatgttattgcttccattttattagaagagaaacaaattccatgctttatggaatttatgtagactggagtcttcgtgaactggggcaaatgctggcatccaggagccgccaatactaacaggacaggttccattgccatggcctattccacccaaacaatatgttgtagtttctggaaattccatactcagatatcagtctgctagaactttaaaatgaaggacaaatcctgttaaagaaatattgttaaaaatctttaaaccctgtgtattgaaagcactctattttctaattttatccagttttctgtttaactccttataatgtttaggatattaaaattttaggataatgaagagtacataatgtcctacttaatatttatgttaataggacttaattcttactagacatctaggaacattacaaagcaaagactatttttatgcttccataacctagaattaaaaccaaattatgaccttatgataaatctttaagtattggtgtgaatgttatttaaattctatatttttcttatttaattacaaatactataaatgagcaaggaaaaggaatagactttcttaatatattataacactcattcctagagcttaggggtgactctttaatattaccttatagtagaaactttatgtaatatagctaactccgtatttacagaacaaaaaaacacagttccccctcctgtagtataaattttattttcacatacttagctaatttagcagtaattggcccagttttttccctaatagaaatacttttagatttgattatgtatacatgacacctaaagagggaacaaaagttagttttatttttttaataaacaacagagtttgttttgtgagataagtatcttagtaaacccaatttccagtcttagtctgtatttccaatatttctaattcctgagccacgtcaaagatgccttgccaaatttctccccatttctctacggggctagcaaaaatcttcagctttatcactcaacccctgccaaaggaacttgattacatggtgtctaaccaaatgagcaggcttaggaatttagatgagatgtgtaagattcacttacaggcagtagctgcttctagcatttgcaagatcctacacttttaccttctttaagggtgtacattttgatgttgaacatcagttttcatgtagacttaggactcatgtgcagtaaatataaataagtgtagcatcagaagcagtaggaatggccgtatacaaccatcctgttaaacatttaaatttagctctgatagtgtgttaagacctgaatatctttcctagtaaaaataggatgtgttgaaatatttatatgtactttgatctctccacatcacttataacttatgtgttttatttctccaagtgcggtgttcctgaatgttatgtatgcttttttttctgtaccacaggcattatctatacctggggccagattttctgcactttgaaatgttgcctttgcctaatgtaggttgactttctgaattgtggagaggcacttttccaagccaatcttatttgtcactttttgttttaatatcttgctctctgacaggaaagaaacaattcacttaccagcctcctcaccccatcctccaccatttccttaatgttccatggtattttcaacggaatacactttgaaaggtaaaaacaattcaaaagtatcgattatcataaattcacaaaatatttttgcaaccagaacacaaaagcaggctagtcagctaaggtaaatttcattttcaaacgagagggaaacatgggaagtaaaagattaggatgtgaaaggttgtcctaaacagaccaaggagactgttccctaatttattctcttggctggttctctcattgaattatcagaccccaagaggagatattggaacaggctcccttcatgccaagggtctttctaagttaatactgtgagcattgagcccccattaaaactcttttttacttcagaaagaattttacaggttaaagggaaagaaatggtgggaaactctccccgtaatgcttagccaactttaaagtgtacccttcaatatccccattggcaactgcagctgagatcttagagaggaaatataaccggtgtgagatctagcaatgcattttgaatcttcactccctaccaggctcttcctatttttaatctcttcacctcagaactagacatatggagagctttaaaggcaagctggaaggcacattgtatcaattctaccttgtgctatacgtaggagagatccaaaatttggatgcttctggagactcttagacatcttttcattgttgtccatttttaaagttgatgattgctggaaacattcacacgcttaaaagcaatggtgtgagttattaatgggtaaactaagaagtgttataggcaatgacttgaaatggtttttaaattgtatggattgttaagaattgttgaaaaaaaatttttttttttgggacagcttcaaggagatgttagcaatttcagatatactagccagtttaggtatgactttggaagtgcagaaacagaaggatactgttagaaaatcctaacattggtctccgtgcatgtgttcacacctggtctcactgcctttccttcccacagacctgagtgtgaaagactgagagttgaggagttactttgtggatcttgtccaaatttagtgaaatgtggaagtcaaccagaccaatgatggaattaaatgtaaattccaagagggctttcacagtccacagggttcaaatgacttgggtaacagaagttattcttagcttacctgttatgtgacagtgatttacctgtccatttccaacccaaaagcctgtcagaaagcattctttagagaaaaccactttacatttgttgttaaactcctgatcgctactcttaagaatatacatgtatgtattcataggaacattttttctcaatatttgtatgattcgcttactgttattgtgctgagtgagctcctgtgtgcttcagacaaaaataaatgagactttgtgtttacgtta

SEQ ID NO: 308397 - DNA, 5372 bp, Homo sapiens
ggagccagcccctgggcgcggcctgcagggtaccggcaaccgcccgggtaagcgggggcaggacaaggccggagcctgtgtccgcccggcagccgcccgcagctgcagagagtcccgctgcgtctccgccgcgtgcgccctcctcgaccagcagacccgcgctgcgctccgccgctgacatgtgtgccgctcagatgccgcccctggcgcacatcttccgagggacgttcgtccactccacctggacctgccccatggaggtgctgcgggatcacctcctcggcgtgagcgacagcggcaaaatagtgtttttagaagaagcatctcaacaggaaaaactggccaaagaatggtgcttcaagccgtgtgaaataagagaactgagccaccatgagttcttcatgcctgggctggttgatacacacatccatgcctctcagtattcctttgctggaagtagcatagacctgccactcttggagtggctgaccaagtacacatttcctgcagaacacagattccagaacatcgactttgcagaagaagtatataccagagttgtcaggagaacactaaagaatggaacaaccacagcttgttactttgcaacaattcacactgactcatctctgctccttgccgacattacagataaatttggacagcgggcatttgtgggcaaagtttgcatggatttgaatgacacttttccagaatacaaggagaccactgaggaatcgatcaaggaaactgagagatttgtgtcagaaatgctccaaaagaactattctagagtgaagcccatagtgacaccacgtttttccctctcctgctctgagactttgatgggtgaactgggcaacattgctaaaacccgtgatttgcacattcagagccatataagtgaaaatcgtgatgaagttgaagctgtgaaaaacttataccccagttataaaaactacacatctgtgtatgataaaaacaatcttttgacaaataagacagtgatggcacacggctgctacctctctgcagaagaactgaacgtattccatgaacgaggagcatccatcgcacactgtcccaattctaatttatcgctcagcagtggatttctaaatgtgctagaagtcctgaaacatgaagtcaagatagggctgggtacagacgtggctggtggctattcatattccatgcttgatgcaatcagaagagcagtgatggtttccaatatccttttaattaataaggtaaatgagaaaagcctcaccctcaaagaagtcttcagactagctactcttggaggaagccaagccctggggctggatggtgagattggaaactttgaagtgggcaaggaatttgatgccatcctgatcaaccccaaagcatccgactctcccattgacctgttttatggggacttttttggtgatatttctgaggctgttatccagaagttcctctatctaggagatgatcgaaatattgaagaggtttatgtgggcggaaagcaggtggttccgttttccagctcagtgtaagaccctcgggcgtctacaaagttctcctgggattagcgtggttctgcatctcccttgtgcccaggtggagttagaaagtcaaaaaatagtaccttgttcttgggatgactatccctttctgtgtctagttacagtattcacttgacaaatagttcgaaggaagttgcactaattctcaactctggttgagagggttcataaatttcatgaaaatatctccctttggagctgctcagacttactttaagctcaaacagaagggaatgctattactggtggtgttcctacggtaagacttaagcaaagcctttttcatatttgaaaatgtggaaagaaaagatgttcctaaaaggttagatattttgagctaataattgcaaaaattagaagactgaaaatggacccatgagagtatatttttatgagggagcaaaagttagactgagaacaaacgttagaaaatcacttcagattgtgtttgaaaattatatactgagcatactaatttaaaaagagaacttgttgaaatttaaaacgtgtttctaggttgaccttgtgttttagaaatttgcacttaatggaatttgcatttcagagatgtgttagtgttgtgctttgccttctttggcgatgaatgtcagaaattgaatgccacatgctttcataatatagttttgtgcttcaaagtgtttgacagaagttgggtattaaagatttaaagtctcttaggaatattattcatgtaactccatggcataaatagttgtatttttgtgtactttaaaatcaacttataactgtgagatgttattgcttccattttattagaagagaaacaaattccatgctttatggaatttatgtagactggagtcttcgtgaactggggcaaatgctggcatccaggagccgccaatactaacaggacaggttccattgccatggcctattccacccaaacaatatgttgtagtttctggaaattccatactcagatatcagtctgctagaactttaaaatgaaggacaaatcctgttaaagaaatattgttaaaaatctttaaaccctgtgtattgaaagcactctattttctaattttatccagttttctgtttaactccttataatgtttaggatattaaaattttaggataatgaagagtacataatgtcctacttaatatttatgttaataggacttaattcttactagacatctaggaacattacaaagcaaagactatttttatgcttccataacctagaattaaaaccaaattatgaccttatgataaatctttaagtattggtgtgaatgttatttaaattctatatttttcttatttaattacaaatactataaatgagcaaggaaaaggaatagactttcttaatatattataacactcattcctagagcttaggggtgactctttaatattaccttatagtagaaactttatgtaatatagctaactccgtatttacagaacaaaaaaacacagttccccctcctgtagtataaattttattttcacatacttagctaatttagcagtaattggcccagttttttccctaatagaaatacttttagatttgattatgtatacatgacacctaaagagggaacaaaagttagttttatttttttaataaacaacagagtttgttttgtgagataagtatcttagtaaacccaatttccagtcttagtctgtatttccaatatttctaattcctgagccacgtcaaagatgccttgccaaatttctccccatttctctacggggctagcatctaaccaaatgagcaggcttaggaatttagatgagatgtgtaagattcacttacaggcagtagctgcttctagcatttgcaagatcctacacttttaccttctttaagggtgtacattttgatgttgaacatcagttttcatgtagacttaggactcatgtgcagtaaatataaataagtgtagcatcagaagcagtaggaatggccgtatacaaccatcctgttaaacatttaaatttagctctgatagtgtgttaagacctgaatatctttcctagtaaaaataggatgtgttgaaatatttatatgtactttgatctctccacatcacttataacttatgtgttttatttctccaagtgcggtgttcctgaatgttatgtatgcttttttttctgtaccacaggcattatctatacctggggccagattttctgcactttgaaatgttgcctttgcctaatgtaggttgactttctgaattgtggagaggcacttttccaagccaatcttatttgtcactttttgttttaatatcttgctctctgacaggaaagaaacaattcacttaccagcctcctcaccccatcctccaccatttccttaatgttccatggtattttcaacggaatacactttgaaaggtaaaaacaattcaaaagtatcgattatcataaattcacaaaatatttttgcaaccagaacacaaaagcaggctagtcagctaaggtaaatttcattttcaaacgagagggaaacatgggaagtaaaagattaggatgtgaaaggttgtcctaaacagaccaaggagactgttccctaatttattctcttggctggttctctcattgaattatcagaccccaagaggagatattggaacaggctcccttcatgccaagggtctttctaagttaatactgtgagcattgagcccccattaaaactcttttttacttcagaaagaattttacaggttaaagggaaagaaatggtgggaaactctccccgtaatgcttagccaactttaaagtgtacccttcaatatccccattggcaactgcagctgagatcttagagaggaaatataaccggtgtgagatctagcaatgcattttgaatcttcactccctaccaggctcttcctatttttaatctcttcacctcagaactagacatatggagagctttaaaggcaagctggaaggcacattgtatcaattctaccttgtgctatacgtaggagagatccaaaatttggatgcttctggagactcttagacatcttttcattgttgtccatttttaaagttgatgattgctggaaacattcacacgcttaaaagcaatggtgtgagttattaatgggtaaactaagaagtgttataggcaatgacttgaaatggtttttaaattgtatggattgttaagaattgttgaaaaaaaatttttttttttgggacagcttcaaggagatgttagcaatttcagatatactagccagtttaggtatgactttggaagtgcagaaacagaaggatactgttagaaaatcctaacattggtctccgtgcatgtgttcacacctggtctcactgcctttccttcccacagacctgagtgtgaaagactgagagttgaggagttactttgtggatcttgtccaaatttagtgaaatgtggaagtcaaccagaccaatgatggaattaaatgtaaattccaagagggctttcacagtccacagggttcaaatgacttgggtaacagaagttattcttagcttacctgttatgtgacagtgatttacctgtccatttccaacccaaaagcctgtcagaaagcattctttagagaaaaccactttacatttgttgttaaactcctgatcgctactcttaagaatatacatgtatgtattcataggaacattttttctcaatatttgtatgattcgcttactgttattgtgctgagtgagctcctgtgtgcttcagacaaaaataaatgagactttgtgtttacgtta

SEQ ID NO: 308398 - DNA, 5319 bp, Homo sapiens
cccgctacaacgcccggctaatttttttgtatttccccttccttctttgctttcaaaatccaggcttaggggtacaaaaacctatatgtctgagacaggaagcactccgaagtttgaagaagagggcagcagcccaactcagaagaactggactccccagcactataaggagagagggtggtggttccaccagagatagtgtttttagaagaagcatctcaacaggaaaaactggccaaagaatggtgcttcaagccgtgtgaaataagagaactgagccaccatgagttcttcatgcctgggctggttgatacacacatccatgcctctcagtattcctttgctggaagtagcatagacctgccactcttggagtggctgaccaagtacacatttcctgcagaacacagattccagaacatcgactttgcagaagaagtatataccagagttgtcaggagaacactaaagaatggaacaaccacagcttgttactttgcaacaattcacactgactcatctctgctccttgccgacattacagataaatttggacagcgggcatttgtgggcaaagtttgcatggatttgaatgacacttttccagaatacaaggagaccactgaggaatcgatcaaggaaactgagagatttgtgtcagaaatgctccaaaagaactattctagagtgaagcccatagtgacaccacgtttttccctctcctgctctgagactttgatgggtgaactgggcaacattgctaaaacccgtgatttgcacattcagagccatataagtgaaaatcgtgatgaagttgaagctgtgaaaaacttataccccagttataaaaactacacatctgtgtatgataaaaacaatcttttgacaaataagacagtgatggcacacggctgctacctctctgcagaagaactgaacgtattccatgaacgaggagcatccatcgcacactgtcccaattctaatttatcgctcagcagtggatttctaaatgtgctagaagtcctgaaacatgaagtcaagatagggctgggtacagacgtggctggtggctattcatattccatgcttgatgcaatcagaagagcagtgatggtttccaatatccttttaattaataaggtaaatgagaaaagcctcaccctcaaagaagtcttcagactagctactcttggaggaagccaagccctggggctggatggtgagattggaaactttgaagtgggcaaggaatttgatgccatcctgatcaaccccaaagcatccgactctcccattgacctgttttatggggacttttttggtgatatttctgaggctgttatccagaagttcctctatctaggagatgatcgaaatattgaagaggtttatgtgggcggaaagcaggtggttccgttttccagctcagtgtaagaccctcgggcgtctacaaagttctcctgggattagcgtggttctgcatctcccttgtgcccaggtggagttagaaagtcaaaaaatagtaccttgttcttgggatgactatccctttctgtgtctagttacagtattcacttgacaaatagttcgaaggaagttgcactaattctcaactctggttgagagggttcataaatttcatgaaaatatctccctttggagctgctcagacttactttaagctcaaacagaagggaatgctattactggtggtgttcctacggtaagacttaagcaaagcctttttcatatttgaaaatgtggaaagaaaagatgttcctaaaaggttagatattttgagctaataattgcaaaaattagaagactgaaaatggacccatgagagtatatttttatgagggagcaaaagttagactgagaacaaacgttagaaaatcacttcagattgtgtttgaaaattatatactgagcatactaatttaaaaagagaacttgttgaaatttaaaacgtgtttctaggttgaccttgtgttttagaaatttgcacttaatggaatttgcatttcagagatgtgttagtgttgtgctttgccttctttggcgatgaatgtcagaaattgaatgccacatgctttcataatatagttttgtgcttcaaagtgtttgacagaagttgggtattaaagatttaaagtctcttaggaatattattcatgtaactccatggcataaatagttgtatttttgtgtactttaaaatcaacttataactgtgagatgttattgcttccattttattagaagagaaacaaattccatgctttatggaatttatgtagactggagtcttcgtgaactggggcaaatgctggcatccaggagccgccaatactaacaggacaggttccattgccatggcctattccacccaaacaatatgttgtagtttctggaaattccatactcagatatcagtctgctagaactttaaaatgaaggacaaatcctgttaaagaaatattgttaaaaatctttaaaccctgtgtattgaaagcactctattttctaattttatccagttttctgtttaactccttataatgtttaggatattaaaattttaggataatgaagagtacataatgtcctacttaatatttatgttaataggacttaattcttactagacatctaggaacattacaaagcaaagactatttttatgcttccataacctagaattaaaaccaaattatgaccttatgataaatctttaagtattggtgtgaatgttatttaaattctatatttttcttatttaattacaaatactataaatgagcaaggaaaaggaatagactttcttaatatattataacactcattcctagagcttaggggtgactctttaatattaccttatagtagaaactttatgtaatatagctaactccgtatttacagaacaaaaaaacacagttccccctcctgtagtataaattttattttcacatacttagctaatttagcagtaattggcccagttttttccctaatagaaatacttttagatttgattatgtatacatgacacctaaagagggaacaaaagttagttttatttttttaataaacaacagagtttgttttgtgagataagtatcttagtaaacccaatttccagtcttagtctgtatttccaatatttctaattcctgagccacgtcaaagatgccttgccaaatttctccccatttctctacggggctagcaaaaatcttcagctttatcactcaacccctgccaaaggaacttgattacatggtgtctaaccaaatgagcaggcttaggaatttagatgagatgtgtaagattcacttacaggcagtagctgcttctagcatttgcaagatcctacacttttaccttctttaagggtgtacattttgatgttgaacatcagttttcatgtagacttaggactcatgtgcagtaaatataaataagtgtagcatcagaagcagtaggaatggccgtatacaaccatcctgttaaacatttaaatttagctctgatagtgtgttaagacctgaatatctttcctagtaaaaataggatgtgttgaaatatttatatgtactttgatctctccacatcacttataacttatgtgttttatttctccaagtgcggtgttcctgaatgttatgtatgcttttttttctgtaccacaggcattatctatacctggggccagattttctgcactttgaaatgttgcctttgcctaatgtaggttgactttctgaattgtggagaggcacttttccaagccaatcttatttgtcactttttgttttaatatcttgctctctgacaggaaagaaacaattcacttaccagcctcctcaccccatcctccaccatttccttaatgttccatggtattttcaacggaatacactttgaaaggtaaaaacaattcaaaagtatcgattatcataaattcacaaaatatttttgcaaccagaacacaaaagcaggctagtcagctaaggtaaatttcattttcaaacgagagggaaacatgggaagtaaaagattaggatgtgaaaggttgtcctaaacagaccaaggagactgttccctaatttattctcttggctggttctctcattgaattatcagaccccaagaggagatattggaacaggctcccttcatgccaagggtctttctaagttaatactgtgagcattgagcccccattaaaactcttttttacttcagaaagaattttacaggttaaagggaaagaaatggtgggaaactctccccgtaatgcttagccaactttaaagtgtacccttcaatatccccattggcaactgcagctgagatcttagagaggaaatataaccggtgtgagatctagcaatgcattttgaatcttcactccctaccaggctcttcctatttttaatctcttcacctcagaactagacatatggagagctttaaaggcaagctggaaggcacattgtatcaattctaccttgtgctatacgtaggagagatccaaaatttggatgcttctggagactcttagacatcttttcattgttgtccatttttaaagttgatgattgctggaaacattcacacgcttaaaagcaatggtgtgagttattaatgggtaaactaagaagtgttataggcaatgacttgaaatggtttttaaattgtatggattgttaagaattgttgaaaaaaaatttttttttttgggacagcttcaaggagatgttagcaatttcagatatactagccagtttaggtatgactttggaagtgcagaaacagaaggatactgttagaaaatcctaacattggtctccgtgcatgtgttcacacctggtctcactgcctttccttcccacagacctgagtgtgaaagactgagagttgaggagttactttgtggatcttgtccaaatttagtgaaatgtggaagtcaaccagaccaatgatggaattaaatgtaaattccaagagggctttcacagtccacagggttcaaatgacttgggtaacagaagttattcttagcttacctgttatgtgacagtgatttacctgtccatttccaacccaaaagcctgtcagaaagcattctttagagaaaaccactttacatttgttgttaaactcctgatcgctactcttaagaatatacatgtatgtattcataggaacattttttctcaatatttgtatgattcgcttactgttattgtgctgagtgagctcctgtgtgcttcagacaaaaataaatgagactttgtgtttacgtta

SEQ ID NO: 308399 - DNA, 5544 bp, Homo sapiens
ggagccagcccctgggcgcggcctgcagggtaccggcaaccgcccgggtaagcgggggcaggacaaggccggagcctgtgtccgcccggcagccgcccgcagctgcagagagtcccgctgcgtctccgccgcgtgcgccctcctcgaccagcagacccgcgctgcgctccgccgctgacatgtgtgccgctcagatgccgcccctggcgcacatcttccgagggacgttcgtccactccacctggacctgccccatggaggtgctgcgggatcacctcctcggcgtgagcgacagcggcaaaatagtgtttttagaagaagcatctcaacaggaaaaactggccaaagaatggtgcttcaagccgtgtgaaataagagaactgagccaccatgagttcttcatgcctgggctggttgatacacacatccatgcctctcagtattcctttgctggaagtagcatagacctgccactcttggagtggctgaccaagtacacatttcctgcagaacacagattccagaacatcgactttgcagaagaagtatataccagagttgtcaggagaacactaaagaatggaacaaccacagcttgttactttgcaacaattcacactgactcatctctgctccttgccgacattacagataaatttggacagcgggcatttgtgggcaaagtttgcatggatttgaatgacacttttccagaatacaaggagaccactgaggaatcgatcaaggaaactgagagactgtcactctgtcacccaggctggagtgcaatggcgcgatctcagctcactgaaacctccacctcctgtgttcaagagattctcctgcctcagcctcccgagtagctgggattacagatttgtgtcagaaatgctccaaaagaactattctagagtgaagcccatagtgacaccacgtttttccctctcctgctctgagactttgatgggtgaactgggcaacattgctaaaacccgtgatttgcacattcagagccatataagtgaaaatcgtgatgaagttgaagctgtgaaaaacttataccccagttataaaaactacacatctgtgtatgataaaaacaatcttttgacaaataagacagtgatggcacacggctgctacctctctgcagaagaactgaacgtattccatgaacgaggagcatccatcgcacactgtcccaattctaatttatcgctcagcagtggatttctaaatgtgctagaagtcctgaaacatgaagtcaagatagggctgggtacagacgtggctggtggctattcatattccatgcttgatgcaatcagaagagcagtgatggtttccaatatccttttaattaataaggtaaatgagaaaagcctcaccctcaaagaagtcttcagactagctactcttggaggaagccaagccctggggctggatggtgagattggaaactttgaagtgggcaaggaatttgatgccatcctgatcaaccccaaagcatccgactctcccattgacctgttttatggggacttttttggtgatatttctgaggctgttatccagaagttcctctatctaggagatgatcgaaatattgaagaggtttatgtgggcggaaagcaggtggttccgttttccagctcagtgtaagaccctcgggcgtctacaaagttctcctgggattagcgtggttctgcatctcccttgtgcccaggtggagttagaaagtcaaaaaatagtaccttgttcttgggatgactatccctttctgtgtctagttacagtattcacttgacaaatagttcgaaggaagttgcactaattctcaactctggttgagagggttcataaatttcatgaaaatatctccctttggagctgctcagacttactttaagctcaaacagaagggaatgctattactggtggtgttcctacggtaagacttaagcaaagcctttttcatatttgaaaatgtggaaagaaaagatgttcctaaaaggttagatattttgagctaataattgcaaaaattagaagactgaaaatggacccatgagagtatatttttatgagggagcaaaagttagactgagaacaaacgttagaaaatcacttcagattgtgtttgaaaattatatactgagcatactaatttaaaaagagaacttgttgaaatttaaaacgtgtttctaggttgaccttgtgttttagaaatttgcacttaatggaatttgcatttcagagatgtgttagtgttgtgctttgccttctttggcgatgaatgtcagaaattgaatgccacatgctttcataatatagttttgtgcttcaaagtgtttgacagaagttgggtattaaagatttaaagtctcttaggaatattattcatgtaactccatggcataaatagttgtatttttgtgtactttaaaatcaacttataactgtgagatgttattgcttccattttattagaagagaaacaaattccatgctttatggaatttatgtagactggagtcttcgtgaactggggcaaatgctggcatccaggagccgccaatactaacaggacaggttccattgccatggcctattccacccaaacaatatgttgtagtttctggaaattccatactcagatatcagtctgctagaactttaaaatgaaggacaaatcctgttaaagaaatattgttaaaaatctttaaaccctgtgtattgaaagcactctattttctaattttatccagttttctgtttaactccttataatgtttaggatattaaaattttaggataatgaagagtacataatgtcctacttaatatttatgttaataggacttaattcttactagacatctaggaacattacaaagcaaagactatttttatgcttccataacctagaattaaaaccaaattatgaccttatgataaatctttaagtattggtgtgaatgttatttaaattctatatttttcttatttaattacaaatactataaatgagcaaggaaaaggaatagactttcttaatatattataacactcattcctagagcttaggggtgactctttaatattaccttatagtagaaactttatgtaatatagctaactccgtatttacagaacaaaaaaacacagttccccctcctgtagtataaattttattttcacatacttagctaatttagcagtaattggcccagttttttccctaatagaaatacttttagatttgattatgtatacatgacacctaaagagggaacaaaagttagttttatttttttaataaacaacagagtttgttttgtgagataagtatcttagtaaacccaatttccagtcttagtctgtatttccaatatttctaattcctgagccacgtcaaagatgccttgccaaatttctccccatttctctacggggctagcaaaaatcttcagctttatcactcaacccctgccaaaggaacttgattacatggtgtctaaccaaatgagcaggcttaggaatttagatgagatgtgtaagattcacttacaggcagtagctgcttctagcatttgcaagatcctacacttttaccttctttaagggtgtacattttgatgttgaacatcagttttcatgtagacttaggactcatgtgcagtaaatataaataagtgtagcatcagaagcagtaggaatggccgtatacaaccatcctgttaaacatttaaatttagctctgatagtgtgttaagacctgaatatctttcctagtaaaaataggatgtgttgaaatatttatatgtactttgatctctccacatcacttataacttatgtgttttatttctccaagtgcggtgttcctgaatgttatgtatgcttttttttctgtaccacaggcattatctatacctggggccagattttctgcactttgaaatgttgcctttgcctaatgtaggttgactttctgaattgtggagaggcacttttccaagccaatcttatttgtcactttttgttttaatatcttgctctctgacaggaaagaaacaattcacttaccagcctcctcaccccatcctccaccatttccttaatgttccatggtattttcaacggaatacactttgaaaggtaaaaacaattcaaaagtatcgattatcataaattcacaaaatatttttgcaaccagaacacaaaagcaggctagtcagctaaggtaaatttcattttcaaacgagagggaaacatgggaagtaaaagattaggatgtgaaaggttgtcctaaacagaccaaggagactgttccctaatttattctcttggctggttctctcattgaattatcagaccccaagaggagatattggaacaggctcccttcatgccaagggtctttctaagttaatactgtgagcattgagcccccattaaaactcttttttacttcagaaagaattttacaggttaaagggaaagaaatggtgggaaactctccccgtaatgcttagccaactttaaagtgtacccttcaatatccccattggcaactgcagctgagatcttagagaggaaatataaccggtgtgagatctagcaatgcattttgaatcttcactccctaccaggctcttcctatttttaatctcttcacctcagaactagacatatggagagctttaaaggcaagctggaaggcacattgtatcaattctaccttgtgctatacgtaggagagatccaaaatttggatgcttctggagactcttagacatcttttcattgttgtccatttttaaagttgatgattgctggaaacattcacacgcttaaaagcaatggtgtgagttattaatgggtaaactaagaagtgttataggcaatgacttgaaatggtttttaaattgtatggattgttaagaattgttgaaaaaaaatttttttttttgggacagcttcaaggagatgttagcaatttcagatatactagccagtttaggtatgactttggaagtgcagaaacagaaggatactgttagaaaatcctaacattggtctccgtgcatgtgttcacacctggtctcactgcctttccttcccacagacctgagtgtgaaagactgagagttgaggagttactttgtggatcttgtccaaatttagtgaaatgtggaagtcaaccagaccaatgatggaattaaatgtaaattccaagagggctttcacagtccacagggttcaaatgacttgggtaacagaagttattcttagcttacctgttatgtgacagtgatttacctgtccatttccaacccaaaagcctgtcagaaagcattctttagagaaaaccactttacatttgttgttaaactcctgatcgctactcttaagaatatacatgtatgtattcataggaacattttttctcaatatttgtatgattcgcttactgttattgtgctgagtgagctcctgtgtgcttcagacaaaaataaatgagactttgtgtttacgtta

SEQ ID NO: 308400 - DNA, 2279 bp, Homo sapiens
ggagccagcccctgggcgcggcctgcagggtaccggcaaccgcccgggtaagcgggggcaggacaaggccggagcctgtgtccgcccggcagccgcccgcagctgcagagagtcccgctgcgtctccgccgcgtgcgccctcctcgaccagcagacccgcgctgcgctccgccgctgacatgtgtgccgctcagatgccgcccctggcgcacatcttccgagggacgttcgtccactccacctggacctgccccatggaggtgctgcgggatcacctcctcggcgtgagcgacagcggcaaaatagtgtttttagaagaagcatctcaacaggaaaaactggccaaagaatggtgcttcaagccgtgtgaaataagagaactgagccaccatgagttcttcatgcctgggctggttgatacacacatccatgcctctcagtattcctttgctggaagtagcatagacctgccactcttggagtggctgaccaagtacacatttcctgcagaacacagattccagaacatcgactttgcagaagaagtatataccagagttgtcaggagaacactaaagaatggaacaaccacagcttgttactttgcaacaattcacactgactcatctctgctccttgccgacattacagataaatttggacagcgggcatttgtgggcaaagtttgcatggatttgaatgacacttttccagaatacaaggagaccactgaggaatcgatcaaggaaactgagagatttgtgtcagaaatgctccaaaagaactattctagagtgaagcccatagtgacaccacgtttttccctctcctgctctgagactttgatgggtgaactgggcaacattgctaaaacccgtgatttgcacattcagagccatataagtgaaaatcgtgatgaagttgaagctgtgaaaaacttataccccagttataaaaactacacatctgtgtatgataaaaacaatcttttgacaaataagacagtgatggcacacggctgctacctctctgcagaagaactgaacgtattccatgaacgaggagcatccatcgcacactgtcccaattctaatttatcgctcagcagtggatttctaaatgtgctagaagtcctgaaacatgaagtcaagatagggctgggtacagacgtggctggtggctattcatattccatgcttgatgcaatcagaagagcagtgatggtttccaatatccttttaattaataaggtaaatgagaaaagcctcaccctcaaagaagtcttcagactagctactcttggaggaagccaagccctggggctggatggtgagattggaaactttgaagtgggcaaggaatttgatgccatcctgatcaaccccaaagcatccgactctcccattgacctgttttatggggacttttttggtgatatttctgaggctgttatccagaagttcctctatctaggagatgatcgaaatattgaagaggtttatgtgggcggaaagcaggtggttccgttttccagctcagtgtaagaccctcgggcgtctacaaagttctcctgggattagcgtggttctgcatctcccttgtgcccaggtggagttagaaagtcaaaaaatagtaccttgttcttgggatgactatccctttctgtgtctagttacagtattcacttgacaaatagttcgaaggaagttgcactaattctcaactctggttgagagggttcataaatttcatgaaaatatctccctttggagctgctcagacttactttaagctcaaacagaagggaatgctattactggtggtgttcctacggtaagacttaagcaaagcctttttcatatttgaaaatgtggaaagaaaagatgttcctaaaaggttagatattttgagctaataattgcaaaaattagaagactgaaaatggacccatgagagtatatttttatgagggagcaaaagttagactgagaacaaacgttagaaaatcacttcagattgtgtttgaaaattatatactgagcatactaatttaaaaagagaacttgttgaaatttaaaacgtgtttctaggttgaccttgtgttttagaaatttgcacttaatggaatttgcatttcagagatgtgttagtgttgtgctttgccttctttggcgatgaatgtcagaaattgaatgccacatgctttcaaccagatggaccgcatttaaatgcatgcatattatcttgaaactgggatattctaatggcacaattgaggc

SEQ ID NO: 308401 - DNA, 481 bp, Homo sapiens
ttaaagacagataaaagacttttgtattaattgcaaagtttgatttcttcatttttttcccatacaaacgatcccctgcttttccttctggctcttgctgctttgtgcccacctgagattaaccttggcccaaggattaggctattttatgatcctgtttactccaggacttggatggtctgatttgactaatatgtttgtgtcaacattagagccgatatattgggaagcacaattttcagtggcatcaccgtcattgttattagtgttcatcttttattggaaccacatggatctccttgttctgacatctcctctctctacaggctcagcagtggatttctaaatgtgctagaagtcctgaaacatgaagtcaagatagggctgggtacaggttagtagttcaccatttggagctatggcaaagtggttgattactgtgtaattttctaatgtgactaatttgcaggtgactgttctg

SEQ ID NO: 308402 - DNA, 2344 bp, Homo sapiens
cgacccctaacaggggccctctcagccctcctaatgacctccggcctagccatgtgatttcacttccactccataacgctcctcatactaggcctactaaccaacacactaaccatataccaatgatggcgcgatgtaacacgagaaagcacataccaaggccaccacacaccacctgtccaaaaaaaggccttctgaggtaataaataggattatcccgtatcgaaggcctttttggacaggtggtgtgtggtggccttggtatgtgctttctcgtgttacatcgcgccatcattggtatatggttagtgtgttggttagtaggccccctgcaggccgcgcccgggtaagcgggggcaggacaaggccggagcctgtgtccgcccggcagccgcccgcagctgcagagagtcccgctgcgtctccgccgcgtgcgccctcctcgaccagcagacccgcgctgcgctccgccgctgacatgtgtgccgctcagatgccgcccctggcgcacatcttccgagggacgttcgtccactccacctggacctgccccatggaggtgctgcgggatcacctcctcggcgtgagcgacagcggcaaaatagtgtttttagaagaagcatctcaacaggaaaaactggccaaagaatggtgcttcaagccgtgtgaaataagagaactgagccaccatgagttcttcatgcctgggctggttgatacacacatccatgcctctcagtattcctttgctggaagtagcatagacctgccactcttggagtggctgaccaagtacacatttcctgcagaacacagattccagaacatcgactttgcagaagaagtatataccagagttgtcaggagaacactaaagaatggaacaaccacagcttgttactttgcaacaattcacactgactcatctctgctccttgccgacattacagataaatttggacagcgggcatttgtgggcaaagtttgcatggatttgaatgacacttttccagaatacaaggagaccactgaggaatcgatcaaggaaactgagagatttgtgtcagaaatgctccaaaagaactattctagagtgaagcccatagtgacaccacgtttttccctctcctgctctgagactttgatgggtgaactgggcaacattgctaaaacccgtgatttgcacattcagagccatataagtgaaaatcgtgatgaagttgaagctgtgaaaaacttataccccagttataaaaactacacatctgtgtatgataaaaacaatcttttgacaaataagacagtgatggcacacggctgctacctctctgcagaagaactgaacgtattccatgaacgaggagcatccatcgcacactgtcccaattctaatttatcgctcagcagtggatttctaaatgtgctagaagtcctgaaacatgaagtcaagatagggctgggtacagacgtggctggtggctattcatattccatgcttgatgcaatcagaagagcagtgatggtttccaatatccttttaattaataaggtaaatgagaaaagcctcaccctcaaagaagtcttcagactagctactcttggaggaagccaagccctggggctggatggtgagattggaaactttgaagtgggcaaggaatttgatgccatcctgatcaaccccaaagcatccgactctcccattgacctgttttatggggacttttttggtgatatttctgaggctgttatccagaagttcctctatctaggagatgatcgaaatattgaagaggtttatgtgggcggaaagcaggtggttccgttttccagctcagtgaaagaaacaattcacttaccagcctcctcaccccatcctccaccatttccttaatgttccatggtattttcaacggaatacactttgaaagacctgagtgtgaaagactgagagttgaggagttactttgtggatcttgtccaaatttagtgaaatgtggaagtcaaccagaccaatgatggaattaaatgtaaattccaagagggctttcacagtccacagggttcaaatgacttgggtaacagaagttattcttagcttacctgttatgtgacagtgatttacctgtccatttccaacccaaaagcctgtcagaaagcattctttagagaaaaccactttacatttgttgttaaactcctgatcgctactcttaagaatatacatgtatgtattcataggaacattttttctcaatatttgtatgattcgcttactgttattgtgctgagtgagctcctgtgtgcttcagacaaaaataaatgagactttgtgtttacgtta

SEQ ID NO: 308403 - DNA, 5373 bp, Homo sapiens
ggagccagcccctgggcgcggcctgcagggtaccggcaaccgcccgggtaagcgggggcaggacaaggccggagcctgtgtccgcccggcagccgcccgcagctgcagagagtcccgctgcgtctccgccgcgtgcgccctcctcgaccagcagacccgcgctgcgctccgccgctgacatgtgtgccgctcagatgccgcccctggcgcacatcttccgagggacgttcgtccactccacctggacctgccccatggaggtgctgcgggatcacctcctcggcgtgagcgacagcggcaaaatagtgtttttagaagaagcatctcaacaggaaaaactggccaaagaatggtgcttcaagccgtgtgaaataagagaactgagccaccatgagttcttcatgcctgggctggttgatacacacatccatgcctctcagtattcctttgctggaagtagcatagacctgccactcttggagtggctgaccaagtacacatttcctgcagaacacagattccagaacatcgactttgcagaagaagtatataccagagttgtcaggagaacactaaagaatggaacaaccacagcttgttactttgcaacaattcacactgactcatctctgctccttgccgacattacagataaatttggacagcgggcatttgtgggcaaagtttgcatggatttgaatgacacttttccagaatacaaggagaccactgaggaatcgatcaaggaaactgagagatttgtgtcagaaatgctccaaaagaactattctagagtgaagcccatagtgacaccacgtttttccctctcctgctctgagactttgatgggtgaactgggcaacattgctaaaacccgtgatttgcacattcagagccatataagtgaaaatcgtgatgaagttgaagctgtgaaaaacttataccccagttataaaaactacacatctgtgtatgataaaaacaatcttttgacaaataagacagtgatggcacacggctgctacctctctgcagaagaactgaacgtattccatgaacgaggagcatccatcgcacactgtcccaattctaatttatcgctcagcagtggatttctaaatgtgctagaagtcctgaaacatgaagtcaagatagggctgggtacagacgtggctggtggctattcatattccatgcttgatgcaatcagaagagcagtgatggtttccaatatccttttaattaataaggtaaatgagaaaagcctcaccctcaaagaagtcttcagactagctactcttggaggaagccaagccctggggctggatggtgagattggaaactttgaagtgggcaaggaatttgatgccatcctgatcaaccccaaagcatccgactctcccattgacctgttttatggggacttttttggtgatatttctgaggctgttatccagaagttcctctatctaggagatgatcgaaatattgaagaggtttatgtgggcggaaagcaggtggttccgttttccagctcagtgtaagaccctcgggcgtctacaaagttctcctgggattagcgtggttctgcatctcccttgtgcccaggtggagttagaaagtcaaaaaatagtaccttgttcttgggatgactatccctttctgtgtctagttacagtattcacttgacaaatagttcgaaggaagttgcactaattctcaactctggttgagagggttcataaatttcatgaaaatatctccctttggagctgctcagacttactttaagctcaaacagaagggaatgctattactggtggtgttcctacggtaagacttaagcaaagcctttttcatatttgaaaatgtggaaagaaaagatgttcctaaaaggttagatattttgagctaataattgcaaaaattagaagactgaaaatggacccatgagagtatatttttatgagggagcaaaagttagactgagaacaaacgttagaaaatcacttcagattgtgtttgaaaattatatactgagcatactaatttaaaaagagaacttgttgaaatttaaaacgtgtttctaggttgaccttgtgttttagaaatttgcacttaatggaatttgcatttcagagatgtgttagtgttgtgctttgccttctttggcgatgaatgtcagaaattgaatgccacatgctttcataatatagttttgtgcttcaaagtgtttgacagaagttgggtattaaagatttaaagtctcttaggaatattattcatgtaactccatggcataaatagttgtatttttgtgtactttaaaatcaacttataactgtgagatgttattgcttccattttattagaagagaaacaaattccatgctttatggaatttatgtagactggagtcttcgtgaactggggcaaatgctggcatccaggagccgccaatactaacaggacaggttccattgccatggcctattccacccaaacaatatgttgtagtttctggaaattccatactcagatatcagtctgctagaactttaaaatgaaggacaaatcctgttaaagaaatattgttaaaaatctttaaaccctgtgtattgaaagcactctattttctaattttatccagttttctgtttaactccttataatgtttaggatattaaaattttaggataatgaagagtacataatgtcctacttaatatttatgttaataggacttaattcttactagacatctaggaacattacaaagcaaagactatttttatgcttccataacctagaattaaaaccaaattatgaccttatgataaatctttaagtattggtgtgaatgttatttaaattctatatttttcttatttaattacaaatactataaatgagcaaggaaaaggaatagactttcttaatatattataacactcattcctagagcttaggggtgactctttaatattaccttatagtagaaactttatgtaatatagctaactccgtatttacagaacaaaaaaacacagttccccctcctgtagtataaattttattttcacatacttagctaatttagcagtaattggcccagttttttccctaatagaaatacttttagatttgattatgtatacatgacacctaaagagggaacaaaagttagttttatttttttaataaacaacagagtttgttttgtgagataagtatcttagtaaacccaatttccagtcttagtctgtatttccaatatttctaattcctgagccacgtcaaagatgccttgccaaatttctccccatttctctacggggctagcaaaaatcttcagctttatcactcaacccctgccatgagatgtgtaagattcacttacaggcagtagctgcttctagcatttgcaagatcctacacttttaccttctttaagggtgtacattttgatgttgaacatcagttttcatgtagacttaggactcatgtgcagtaaatataaataagtgtagcatcagaagcagtaggaatggccgtatacaaccatcctgttaaacatttaaatttagctctgatagtgtgttaagacctgaatatctttcctagtaaaaataggatgtgttgaaatatttatatgtactttgatctctccacatcacttataacttatgtgttttatttctccaagtgcggtgttcctgaatgttatgtatgcttttttttctgtaccacaggcattatctatacctggggccagattttctgcactttgaaatgttgcctttgcctaatgtaggttgactttctgaattgtggagaggcacttttccaagccaatcttatttgtcactttttgttttaatatcttgctctctgacaggaaagaaacaattcacttaccagcctcctcaccccatcctccaccatttccttaatgttccatggtattttcaacggaatacactttgaaaggtaaaaacaattcaaaagtatcgattatcataaattcacaaaatatttttgcaaccagaacacaaaagcaggctagtcagctaaggtaaatttcattttcaaacgagagggaaacatgggaagtaaaagattaggatgtgaaaggttgtcctaaacagaccaaggagactgttccctaatttattctcttggctggttctctcattgaattatcagaccccaagaggagatattggaacaggctcccttcatgccaagggtctttctaagttaatactgtgagcattgagcccccattaaaactcttttttacttcagaaagaattttacaggttaaagggaaagaaatggtgggaaactctccccgtaatgcttagccaactttaaagtgtacccttcaatatccccattggcaactgcagctgagatcttagagaggaaatataaccggtgtgagatctagcaatgcattttgaatcttcactccctaccaggctcttcctatttttaatctcttcacctcagaactagacatatggagagctttaaaggcaagctggaaggcacattgtatcaattctaccttgtgctatacgtaggagagatccaaaatttggatgcttctggagactcttagacatcttttcattgttgtccatttttaaagttgatgattgctggaaacattcacacgcttaaaagcaatggtgtgagttattaatgggtaaactaagaagtgttataggcaatgacttgaaatggtttttaaattgtatggattgttaagaattgttgaaaaaaaatttttttttttgggacagcttcaaggagatgttagcaatttcagatatactagccagtttaggtatgactttggaagtgcagaaacagaaggatactgttagaaaatcctaacattggtctccgtgcatgtgttcacacctggtctcactgcctttccttcccacagacctgagtgtgaaagactgagagttgaggagttactttgtggatcttgtccaaatttagtgaaatgtggaagtcaaccagaccaatgatggaattaaatgtaaattccaagagggctttcacagtccacagggttcaaatgacttgggtaacagaagttattcttagcttacctgttatgtgacagtgatttacctgtccatttccaacccaaaagcctgtcagaaagcattctttagagaaaaccactttacatttgttgttaaactcctgatcgctactcttaagaatatacatgtatgtattcataggaacattttttctcaatatttgtatgattcgcttactgttattgtgctgagtgagctcctgtgtgcttcagacaaaaataaatgagactttgtgtttacgtta

SEQ ID NO: 308404 - DNA, 4367 bp, Homo sapiens
ggagccagcccctgggcgcggcctgcagggtaccggcaaccgcccgggtaagcgggggcaggacaaggccggagcctgtgtccgcccggcagccgcccgcagctgcagagagtcccgctgcgtctccgccgcgtgcgccctcctcgaccagcagacccgcgctgcgctccgccgctgacatgtgtgccgctcagatgccgcccctggcgcacatcttccgagggacgttcgtccactccacctggacctgccccatggaggtgctgcgggatcacctcctcggcgtgagcgacagcggcaaaatagtgtttttagaagaagcatctcaacaggaaaaactggccaaagaatggtgcttcaagccgtgtgaaataagagaactgagccaccatgagttcttcatgcctgggctggttgatacacacatccatgcctctcagtattcctttgctggaagtagcatagacctgccactcttggagtggctgaccaagtacacatttcctgcagaacacagattccagaacatcgactttgcagaagaagtatataccagagttgtcaggagaacactaaagaatggaacaaccacagcttgttactttgcaacaattcacactgactcatctctgctccttgccgacattacagataaatttggacagcgggcatttgtgggcaaagtttgcatggatttgaatgacacttttccagaatacaaggagaccactgaggaatcgatcaaggaaactgagagatttgtgtcagaaatgctccaaaagaactattctagagtgaagcccatagtgacaccacgtttttccctctcctgctctgagactttgatgggtgaactgggcaacattgctaaaacccgtgatttgcacattcagagccatataagtgaaaatcgtgatgaagttgaagctgtgaaaaacttataccccagttataaaaactacacatctgtgtatgataaaaacaatcttttgacaaataagacagtgatggcacacggctgctacctctctgcagaagaactgaacgtattccatgaacgaggagcatccatcgcacactgtcccaattctaatttatcgctcagcagtggatttctaaatgtgctagaagtcctgaaacatgaagtcaagatagggctgggtacagacgtggctggtggctattcatattccatgcttgatgcaatcagaagagcagtgatggtttccaatatccttttaattaataaggtaaatgagaaaagcctcaccctcaaagaagtcttcagactagctactcttggaggaagccaagccctggggctggatggtgagattggaaactttgaagtgggcaaggaatttgatgccatcctgatcaaccccaaagcatccgactctcccattgacctgttttatggggacttttttggtgatatttctgaggctgttatccagaagttcctctatctaggagatgatcgaaatattgaagaggtttatgtgggcggaaagcaggtggttccgttttccagctcagtgtaagaccctcgggcgtctacaaagttctcctgggattagcgtggttctgcatctcccttgtgcccaggtggagttagaaagtcaaaaaatagtaccttgttcttgggatgactatccctttctgtgtctagttacagtattcacttgacaaatagttcgaaggaagttgcactaattctcaactctggttgagagggttcataaatttcatgaaaatatctccctttggagctgctcagacttactttaagctcaaacagaagggaatgctattactggtggtgttcctacggtaagacttaagcaaagcctttttcatatttgaaaatgtggaaagaaaagatgttcctaaaaggttagatattttgagctaataattgcaaaaattagaagactgaaaatggacccatgagagtatatttttatgagggagcaaaagttagactgagaacaaacgttagaaaatcacttcagattgtgtttgaaaattatatactgagcatactaatttaaaaagagaacttgttgaaatttaaaacgtgtttctaggttgaccttgtgttttagaaatttgcacttaatggaatttgcatttcagagatgtgttagtgttgtgctttgccttctttggcgatgaatgtcagaaattgaatgccacatgctttcataatatagttttgtgcttcaaagtgtttgacagaagttgggtattaaagatttaaagtctcttaggaatattattcatgtaactccatggcataaatagttgtatttttgtgtactttaaaatcaacttataactgtgagatgttattgcttccattttattagaagagaaacaaattccatgctttatggaatttatgtagactggagtcttcgtgaactggggcaaatgctggcatccaggagccgccaatactaacaggacaggttccattgccatggcctattccacccaaacaatatgttgtagtttctggaaattccatactcagatatcagtctgctagaactttaaaatgaaggacaaatcctgttaaagaaatattgttaaaaatctttaaaccctgtgtattgaaagcactctattttctaattttatccagttttctgtttaactccttataatgtttaggatattaaaattttaggataatgaagagtacataatgtcctacttaatatttatgttaataggacttaattcttactagacatctaggaacattacaaagcaaagactatttttatgcttccataacctagaattaaaaccaaattatgaccttatgataaatctttaagtattggtgtgaatgttatttaaattctatatttttcttatttaattacaaatactataaatgagcaaggaaaaggaatagactttcttaatatattataacactcattcctagagcttaggggtgactctttaatattaccttatagtagaaactttatgtaatatagctaactccgtatttacagaacaaaaaaacacagttccccctcctgtagtataaattttattttcacatacttagctaatttagcagtaattggcccagttttttccctaatagaaatacttttagatttgattatgtatacatgacacctaaagagggaacaaaagttagttttatttttttaataaacaacagagtttgttttgtgagataagtatcttagtaaacccaatttccagtcttagtctgtatttccaatatttctaattcctgagccacgtcaaagatgccttgccaaatttctccccatttctctacggggctagcaaaaatcttcagctttatcactcaacccctgccaaaggaacttgattacatggtgtctaaccaaatgagcaggcttaggaatttagatgagatgtgtaagattcacttacaggcagtagctgcttctagcatttgcaagatcctacacttttaccttctttaagggtgtacattttgatgttgaacatcagttttcatgtagacttaggactcatgtgcagtaaatataaataagtgtagcatcagaagcagtaggaatggccgtatacaaccatcctgttaaacatttaaatttagctctgatagtgtgttaagacctgaatatctttcctagtaaaaataggatgtgttgaaatatttatatgtactttgatctctccacatcacttataacttatgtgttttatttctccaagtgcggtgttcctgaatgttatgtatgcttttttttctgtaccacaggcattatctatacctggggccagattttctgcactttgaaatgttgcctttgcctaatgtaggttgactttctgaattgtggagaggcacttttccaagccaatcttatttgtcactttttgttttaatatcttgctctctgacaggaaagaaacaattcacttaccagcctcctcaccccatcctccaccatttccttaatgttccatggtattttcaacggaatacactttgaaagttctcagaataactgtagaatgtgctggaaatggaacattctcagataaggaggaactggccagatcaaactaagctgtgttcccatccctcctgaaacaggatcttatggtgctttagcccaggacgtcaagtatcccctaggtatgaaacccagagtggagcatgctttgaaggtccctcagctacatgcagactagactgcatgtagctgactctaactgccctgggaaactatcctgagctttgacagacctgccatgaatcttaagcttttattgtcccttgctgcctatctgtgaggaataaagttgcttcacttact

SEQ ID NO: 308405 - DNA, 2113 bp, Homo sapiens
ggagccagcccctgggcgcggcctgcagggtaccggcaaccgcccgggtaagcgggggcaggacaaggccggagcctgtgtccgcccggcagccgcccgcagctgcagagagtcccgctgcgtctccgccgcgtgcgccctcctcgaccagcagacccgcgctgcgctccgccgctgacatgtgtgccgctcagatgccgcccctggcgcacatcttccgagggacgttcgtccactccacctggacctgccccatggaggtgctgcgggatcacctcctcggcgtgagcgacagcggcaaaatagtgtttttagaagaagcatctcaacaggaaaaactggccaaagaatggtgcttcaagccgtgtgaaataagagaactgagccaccatgagttcttcatgcctgggctggttgatacacacatccatgcctctcagtattcctttgctggaagtagcatagacctgccactcttggagtggctgaccaagtacacatttcctgcagaacacagattccagaacatcgactttgcagaagaagtatataccagagttgtcaggagaacactaaagaatggaacaaccacagcttgttactttgcaacaattcacactgactcatctctgctccttgccgacattacagataaatttggacagcgggcatttgtgggcaaagtttgcatggatttgaatgacacttttccagaatacaaggagaccactgaggaatcgatcaaggaaactgagagatttgtgtcagaaatgctccaaaagaactattctagagtgaagcccatagtgacaccacgtttttccctctcctgctctgagactttgatgggtgaactgggcaacattgctaaaacccgtgatttgcacattcagagccatataagtgaaaatcgtgatgaagttgaagctgtgaaaaacttataccccagttataaaaactacacatctgtgtatgataaaaacaatcttttgacaaataagacagtgatggcacacggctgctacctctctgcagaagaactgaacgtattccatgaacgaggagcatccatcgcacactgtcccaattctaatttatcgctcagcagtggatttctaaatgtgctagaagtcctgaaacatgaagtcaagatagggctgggtacagacgtggctggtggctattcatattccatgcttgatgcaatcagaagagcagtgatggtttccaatatccttttaattaataaggtaaatgagaaaagcctcaccctcaaagaagtcttcagactagctactcttggaggaagccaagccctggggctggatggtgagattggaaactttgaagtgggcaaggaatttgatgccatcctgatcaaccccaaagcatccgactctcccattgacctgttttatggggacttttttggtgatatttctgaggctgttatccagaagttcctctatctaggagatgatcgaaatattgaagaggtttatgtgggcggaaagcaggtggttccgttttccagctcagtgtaagaccctcgggcgtctacaaagttctcctgggattagcgtggttctgcatctcccttgtgcccaggaaagaaacaattcacttaccagcctcctcaccccatcctccaccatttccttaatgttccatggtattttcaacggaatacactttgaaagacctgagtgtgaaagactgagagttgaggagttactttgtggatcttgtccaaatttagtgaaatgtggaagtcaaccagaccaatgatggaattaaatgtaaattccaagagggctttcacagtccacagggttcaaatgacttgggtaacagaagttattcttagcttacctgttatgtgacagtgatttacctgtccatttccaacccaaaagcctgtcagaaagcattctttagagaaaaccactttacatttgttgttaaactcctgatcgctactcttaagaatatacatgtatgtattcataggaacattttttctcaatatttgtatgattcgcttactgttattgtgctgagtgagctcctgtgtgcttcagacaaaaataaatgagactttgtgtttacgtta

SEQ ID NO: 308406 - DNA, 1848 bp, Homo sapiens
ggagccagcccctgggcgcggcctgcagggtaccggcaaccgcccgggtaagcgggggcaggacaaggccggagcctgtgtccgcccggcagccgcccgcagctgcagagagtcccgctgcgtctccgccgcgtgcgccctcctcgaccagcagacccgcgctgcgctccgccgctgacatgtgtgccgctcagatgccgcccctggcgcacatcttccgagggacgttcgtccactccacctggacctgccccatggaggtgctgcgggatcacctcctcggcgtgagcgacagcggcaaaatagtgtttttagaagaagcatctcaacaggaaaaactggccaaagaatggtgcttcaagccgtgtgaaataagagaactgagccaccatgagttcttcatgcctgggctggttgatacacacatccatgcctctcagtattcctttgctggaagtagcatagacctgccactcttggagtggctgaccaagtacacatttcctgcagaacacagattccagaacatcgactttgcagaagaagtatataccagagttgtcaggagaacactaaagaatggaacaaccacagcttgttactttgcaacaattcacactgactcatctctgctccttgccgacattacagataaatttggacagcgggcatttgtgggcaaagtttgcatggatttgaatgacacttttccagaatacaaggagaccactgaggaatcgatcaaggaaactgagagatttgtgtcagaaatgctccaaaagaacagccatataagtgaaaatcgtgatgaagttgaagctgtgaaaaacttataccccagttataaaaactacacatctgtgtatgataaaaacaatcttttgacaaataagacagtgatggcacacggctgctacctctctgcagaagaactgaacgtattccatgaacgaggagcatccatcgcacactgtcccaattctaatttatcgctcagcagtggatttctaaatgtgctagaagtcctgaaacatgaagtcaagatagggctgggtacagacgtggctggtggctattcatattccatgcttgatgcaatcagaagagcagtgatggtttccaatatccttttaattaataaggtaaatgagaaaagcctcaccctcaaagaagtcttcagactagctactcttggaggaagccaagccctggggctggatggtgagattggaaactttgaagtgggcaaggaatttgatgccatcctgatcaaccccaaagcatccgactctcccattgacctgttttatggggacttttttggtgatatttctgaggctgttatccagaagttcctctatctaggagatgatcgaaatattgaagaggtttatgtgggcggaaagcaggtggttccgttttccagctcagtgaaagaaacaattcacttaccagcctcctcaccccatcctccaccatttccttaatgttccatggtattttcaacggaatacactttgaaagttctcagaataactgtagaatgtgctggaaatggaacattctcagataaggaggaactggccagatcaaactaagctgtgttcccatccctcctgaaacaggatcttatggtgctttagcccaggacgtcaagtatcccctaggtatgaaacccagagtggagcatgctttgaaggtccctcagctacatgcagactagactgcatgtagctgactctaactgccctgggaaactatcctgagctttgacagacctgccatgaatcttaagcttttattgtcccttgctgcctatctgtgaggaataaagttgcttcacttact

SEQ ID NO: 308407 - DNA, 1139 bp, Homo sapiens
tcctctccaagaattcgtggtttagcaattccttctattctgaaaagaagaatatattgccacgttcaaaggatctgaatacttctgctacgacttgtctcaaaaccccattcaaagcagcagtgatgaaataactctgtcatttaaaacccttcagaggaatggactgatgcttcacactgggaaatcggctgattatgtcaatcttgccctgaaaaatggagctgtctctctggtcattaatttgggatcaggggcctttgaagcactagtggagcctgtgaatggaaagtttaatgataatgcctggcatgatgtgaaagtcaccaggaatctgcgtcaggtgacaatatcagtggatgggattcttaccacaacgggctacacgcaagaagattataccatgctggggtctgatgactttttctatgttggaggcagtcccagcacagccgaccttccagggtcaccaatccagcatgaaagcacctttgctgaagacccgatgttccagagtcaaacgggacaactttaaattcaatattctactattgtttatgtaggattgggggagggaaacagctcatagatcattatgaaggaattaggttcctcttctttattagtctgtaagtaatttacatttgagatttgtgtggacagttgatattagctataaaagaaagtcaaaccaaaaagagatactgggtctaaagttgagctaaatggtttacttgcttatttctacttaaatgccataggtgttatgcatacagtgatgacttttttgagtattaaaagaaaaaagaagaaaaagcaattagcctataggagaagcaacgactatgtaattcaaaacaaaactaaaacaaaataagtctatataatgacataattttcttcccttattttcaacacattctggaggaagtaaatgttatctggtgaatttacttgatatttatctgagcaagatcatcaaactaaatgacatcaataatttcatccctcattatcagctgtagttgtgtattgtaactttgtataagattggaatttgttgggttttggggagagaaagatgaagaagtccctgaatttcattttttaatgaatattttccataaaagctgtcttta
